United States Patent Application Publication US 2013/0096032 A1 - sequence listing, part 36

SEQ ID NO: 1269 - DNA, 100887 bp, Arabidopsis thaliana
gaattctttaatcatcagttggccagaggcaatgatctccgttatgtactcgagctcccagtcatgaccttcttcagcttctgataaagcaacagattctgagagttcggtttcttcaatgttatggtgataatcattgcgtgaacttgagaaactcgtgctgcaggagatttggagattttcggcagtgctgaaactgttaacttcctcatcatcttctgcctgcgtcatagaaaatatgaaattttcaaaggtcagtggagtcagaaaaccttacggaaacatatatagcgaattatagaacattgataagctactaaaagtagacatatccttgtgcggagaaaggaatttgccatatgactaactaacctggaatattttctttttgtagaatgaactactatagtcagaatcagattcgctttctgataaaccgttatcctgatcatctgacggcaatgatcttgtcccattcacccaatcctttgtaatggaacccgaagactcttcttcttgggtcagactactgcaagatgactccatcttagaggttagttctctgagctttttctccaacagaaaatttagagaatcactatctatcttattgaaacaaagtgctgactctgcatcttgatcattcttttttaaaaagtattgcgaatctgatgataaacctttgatcggggatgagaaagtgaacgaaatcacatccatgtccttctttcgatcatcgtcccctgtcttcaacccgccatcgacggtgatgttacattttatcaccttctcaccctttttgatccgtttatcactgttaactccagcttcttgcaccccatttgccggttttttgctgcgggaaagattctttttgcgggacaaagatgaagaagtgctctttttcgctgatgttgctgtaaaaccaggcttcttagttgtagttccgttttccaccaaaactttgtttactttcttcatcacttttctgcctctctgatttgaaacagacgtttcagcaaattggttctgtttctggttatttggcttatcaacggttttcctagtgctagcagaagattctttaagaccactttttactatgcggttcttagtttccaccttcttcttttggtctctgtagccatttgagagcattgaactgtctcgcttgtgaatagtattggcctttgcatgtgcagatacagagggcggcttcactttacccttcgaaccaccaaacctgctttctcccaataaattatttcgctcttgtgtcttgagtggtaatgtagttctcttttcatcttgctttcctctgaagcacttattattgcaagtgccatttgagatttgagggctttgtcctttctgtgaagcttctagtttctctttcaaatctctgattttcattggaagtgatgaagaggaatcagatgatgaaaaccgtgttttagcaactacccgaggacttggttcaatcattctcgaagcttcttccattacagaagcagggttcctggactgaacaaacccaggactccggataggagacaagagcctattgtgggtgacagggattggtttagccgaccttggaggtaacgtttcggtttgaaagcggtcgataggccggttacactccttgttcattcttgaatccaaatggtcccaagaaataccatcatagtcactgcggagatttacataacccaaattctcatatgcatcccatgtgcttgccttgcgtgaggatctgaggaagtatggatcaaaatcaggattacgccggggctccaaggcatttggtacaggtatagactctaaacccatgagcctcgcaacaacacttggagctttggaaccttgtccatcatcactagtgggagtggatgttgaacaactcgagtcacttctgggattgtaagttgaattctttccaatctcatctccctcaatctgttaaacaaaagatcagataaaacacaattggatcctgtcactcactgaaatcattgagaagccttaccagagagggccatgactttgaggggttttgagcattttgtttctcttgctttgatccttctgatacaaacaaagaagacaagagtttgagtctattgaacaagaacccaaagtcgataaaaagtgaagttctttgaaacaagaagtggactatcttcatccacgtagatatatacaggacaatgcatcaaagatcacacacaccaaaaaattcaacatatcaagtagaaaccaaccaagggcttcaagacaagaaccatttgaacttaaaccaaaactgatagagcattaaagtagacattaccggagagtttcgagctgctgctgctagaggagaagagcttcttacgggatttaccaggccaatcaaacatatttagaaaacctcctctggatcgtttcctctcaacagcctccatttctaccatctacataacacagcaattgaattatttctatggactctaaatatgtactcaatctcagccaactattacagatggaatttttatttggtttttcaatcaaaaggacaaaaaaagaccgaactttcgacagtaacattaacagtctacaacaggataaaaaatgaatacagacaaatcaaatgattagaagagtaccaaattcgaaatagtctaaacgtcaacaagataatgtaggcaccaagacgaatacccagatgtgaaaatctgagatactgaagattgaaaccctaaaaacaacgaaagtctttcactttcgtctctctctcactgagaatttctgacctaaaagaattgaagagaaaacaaatcagtgaaaagaaggaaaagttgagaattttgagaaatgggtcagaagaagagaaagagtttggcatttggaattgggggacgatgaaaacagatttgatttagcatttgcagttttgtggatttgggttaagagtagagaaacctaaagaactaaagaagaagaagaagaagaagaagaagaagcggagcggagagggagcttgtgaaaacgaagagatgcatagtgtgtgtgtgaattgatgatgtgacaagaaagagactttgaattttccacctctgtaaattaaatgtgacattgttttctgtaaattaacaagactttttctttgttggcttacagatatgaatttttaatgtttttcattttttctgttcaaccgaatttaatgtttatgtcagacaaaaccgagaataagaaaagtttttttgatatttatggaccaaaaaacacaaagcccaaaattttccatcaatttaaatacttttatctttatcgctaaactaaaaatgtaacttctatattaccacgtggcagtcgttaaagagtgtcctagataaatggcaacagatcaaccatttttttcaagatcacccttctactttttgcaggtttcttttacttccctgattttaccagtttggttctgtttctagctacttatttgttgaaatgattcataatatatttttcaggagacataaactatattttgatccggaagttttagagaccaactataacaacatagtagcagacagcttctgggccagatccggaacatttgaagtccctttcccatcattaccatactcgctttacttcccatttggccatgcaaatttggcggttggagactacaaccagaatgccattgcaaatccgtttcttgaaccgcaagctatcccaccatctcaacaaatgaacgtaccttcacctgatcctcaggttgaccgaatttaggaggcacattgcaacacaaccagcaagaagaagcatcgaaatcgggagagaaaagaaaacaacaatttgggaatgattcaatgcttttatgaagcattgttgtttataaaaaaaattccaagctttttacatgtagttctgctttccaccaaaaaacttatttacaactttgatcatcattaccctgctctgtcttgcaccaataatcttgtccttgaactggagggaaagagtgaaagagattttgtgcagtaccctcaacttgatagaatttggtaaactaaaatgctaaaacagactacttccagtgtgtgttacttacgccgccgattgcaagaattctaacaagttgcaagagttgaaattaactcggatcgcatacacaatgcttcaatatcgtagtcgaacatttgatttacaaaactaaagtatgaagtaaacttagtaacgtatacacatttcacatccaaataatgaagtcaaagaattaacgaattatcaattcttatgttaacatgcatatctcaaattcttagaacatgagtttggaaaaaatcttacttaattatataagatcatttagcataaagtactttcatgtttatatttatttgtattgatgaaaaagaaaacaaagaaaatatgtaagtgatgtgagtcttataatctatagtttaaaaaagaaatgatacagataagtagataaccaaatctaatgaaactaaaatacaatgggttttcttctgtttttgttataaaaaaaaaaactaaatagtggtattaagataaaatgaaaagaggaaacatatcacaaggagatatgtcacatgtcaacttcttagaacattcatgagtttggaagaaattttactttattataagagataacttaacataaaataatttcatgtttatatttatttgtattgatgaaaaaaacataggaaaagtaagaaatgtgtgtctctttattatagttttttaaaaataatgatatatataactaaatctaagaaaattaaataatgttttttttttgttaaaaccctaaataatgggattggaataaaaatgaaagaggaaacatatcacaaggagaaatgccacttgagtttggatgagaccttaactttattatataaaggtttagattattccaattcactaatacaatcttaatattttactacacacacaattttttcacatccaaagcaggcaatgggtatttcttgcatcacaagaaacggatattatatcctccattttcttcttcttcttattatactaatcataactccttcgtcctcttccttgtccttcaaagacatcgtcacaaaagagctcatcaacaatttctgttcaaatttggaaatgttcgatcgtcaattttgcgccaaatggttcaacgcggatcaaaaaacaaaatcaatcagcgtccaaggctttataagcctcagagtaaaagaaactcgagagtttggcctgcaaacccaagcactgatgagcaaattagcaaaaagctctgggaaggaccagcaactcaagggatcttacgagtcatgcgtggctagttatggccaagcaatcaaagagcttgagaaagctcaaaagtttttgagcagtaactctttcacgcaagcacttgtggctatttctgacgcattttataaagctggcgattgcaaagatgcgttcgaagggccttctaatgagccacctctggtttttaatcgcgttgaaaactttgccaatatgtgttacgttacttggagtttcggttcacttatctaaattcataaatatatgtttcaattacaataatgaaaactcagatacagtatcttttaacataatgctttgtttcaatagttcctttctttcttttttgtttcttttggtacatatcaatattctacgacaaaaaccaaaaataaccttgaagaattgcaatgagaacttaacattggaaatgctcgaatttaccatataacataaggaagagaaaaataaaacttactattacaacatcacaaattggttttactattatctcaggtcatgtgaagaaagctatatacattatcaataacaggtcaagtcatcgaagatttgatatcagcttctttcacagttatcacacggatttaaactgcttttacaaatcatccggtcgaatgactctccaaagtactctagcaacatctgtcttctgcattctgtctgaaacattcatagattaagacttagtaaggatgaagtaaaatcttggaacatataatctacaatggaaacatacgattaattaacagagtttgctttcccatttcgcgttttaacgatattaccttgagctcacagtattgctgcatcttctttgcctgagccatggctgacttaaatctatccatgtttctgccttgtccgtttcgtaacatgcaaacgactctgctgaaatctttcttctggtacaagcaaatgcactgcgcttgaagcccgtcccttcctgctctccctgactcttggtagtaactttccacagctttcgacaaggtgttgtggataacaaaacgctgcagctaatacgatttaagaaagaggatcgtggcagaaaatttgcaacaaacagctatgcataggcttgacttaccacgtctgctttgtctattcccatcccaaatgcgatagttgcacaaactattcggacttcccctgtttgccatttcctctggacatcaactctttgttttgcaggcaccccggcatggtaataaactgtcttcaccttgcatttctcgttcagaaacttggcaacatccacacattcacttttggagagacagtaaacaatcccagactgatccttgaaccgatctcttagcagctcttggagctgtttcagcggctcctttgttttgacgatcacctcatacttcaagttgattctgtcaaagctcatcttcagaaccggagccctgggaattctcagactttttagtacgtcctgtgtgtggaaaagaggatcaaaatggcaatataccagtgttcagatcataaagatccacaacatatgataaattgagaaccggagcaatggaaaagctcagagcatttaaatctgttcccaattttaagaggatctatctctaatcatggtgatggttattacctgacagactgattcagttgccgttgctgtaagagccatcacaggaacacggggaaagttctgcttaagacatcccagttccctgtagtctggccggaagtcgtgcccccattggctggaaagaaaaaacaacacgttcatgtaaatcacaaaggaaaaattcttcaggtgcaggcagaaatctattttgatattaaggtgttggtgatgaacaatcagagaacattagtgtagaccacaagataatgtgtgaaagaagggtagaacagtattgtacctcacgcagtgagcctcatcaaccacaaaacctgccagcagtccctgtggttaataaaggaaaatgttaaacatttttcttagagctagaatttggttgttatcgaattatgtaacaacaacaagaaaaactgaacaggctaccttgcggtctaaacatcttagtgtctccaaaaaggatgaacttccagcgattttctcaggtgtcacgtataagagtttacatgacggattatctcttctgcaaacaaaaatgtcaatacaatctccattaaaggaaaagacagataaatgatgcataagatacttggatactgtgaaaatgaaagacatgtagaaaggatcttcacctaagttcttgtaatacagctgctgcttgagaagatgtttgctgagagttgagaaaagtagctggtatcccgaacttaaggttaagcgcaactatctgatcttggatgagggacaacagaggagatataactatggtcactccagcttttagtgttgcaggaagctgtaaaacaaacaaagagacaaaatttactatgcagactgtagcaatataaacttttggttattggactaactattcctaaacaagattcaaatcaccccttcaggaacagagaaaggtaaggatcatgacctggtaacacaaacttttcccccctcccgttggcattagaacaaaacaatccttcctttccatagaagctctacatgcttgatgctgcaggggccgaaacaccttgttcccaaaaatcaccaagtttgcaaattcaagatcatccaatgcctgcaactcttcgtaactcggagtttcatggtccttgtttgatatctggacagaaggttttctgcctgaaattgttgaaactgaatcctccatggaatagtccttcaaagcagaacaaaaaggaacccacaataaatctcttttaacttgttcataggcaccaaacccaatgaaaggtcaagtctttgtaaaaaaagctgttcttttgtataccattaatctcagttctcaccatatattttgtttatacacataattatacatacatatgtatatctctcaccagtgtttgccaaacaaaaagcttgtgttttttcttcttccaaattccatgaaaaaaataactgcaatgttgatacttaccatagatctggaacatgtttgtgatctccttggaactttaaaacgcgtctcaacatcttccaaatcactagaagaatccaactccactatctctggctttttcttaggctcaggagaatcctcaataacatgaacttcgactcttgaatcatcatcatcatcatcagtatcgaatccgttatcactaggattagtagatttatcaaacatttcagccaaatttccttgagcttcagactctatagcctgtatatcatcccattcctcagttccttcctcaaaatcagctaacgccgcaagaaaatcatctccacataactcaacagtgatgaaatcccgaccatcatcaccttttaagaccaaacacacagacaaaaaaaaaaacactaattaccgcaatcgattacgagagcataggtttctaaaatcttgatttgaattttggtaccgtaaagatcgacgaatcgatccaagcatttcttcgcagaatcttcgtcgaatccgagctttgtagctaggcttattaatcgaactttctccaattcgagatcttgatccttcatcttcaaagacgagtgctccactccggtaacggaattatcgattttttccgacgacgattaataaatctgctgaacttttagagcccttccgcgcaataacaattcattttcccgccaattttacgaaacgctaccgtttcattttcttacatatgggctttcaggctcaagtccagcttaaggtgcgattcaataatcttctccgatccttgtgattctgttgacaaccggtttccatgatatcggttttccttttctggttcaattgatttcaattaaacgccggtttgatttctggttcttacaatgtaatccggttgcttttattgttacgtaagaagatatagataggcgggttgaatatatgggtccaaattaaaaagacaaatgaagaaagttggggtcccaacttttctttttattgggggaaaaaatttaaaattcaacgagtaaacttgaaccttttatttctgatatttatttaaattctgaaaagaggtcattttcctaaatctatagaggtcacttgatcccataactttagcttcgtagctcggggacatggccacttgattcttttattgaaggtccactattcatcaatgtctcaaatttcacctctaacatattatccttggaaatcttttgagagcttcttaagtcaaatctttctcctcttttgtttcgtctataaactcgactacctaaagattaatatttaaaaacttttaacacaattagtacaacaatatacaagacctttttgtaaatttcgatttggaaaataagagatgcctaaatgagtgtagtgtaaacaatcacaataggagttttttgctcggcatatctttggacggagatgtttgcctcaatctttagttaaaaaaataaaccaagtgaatgagtgatgcatcgatactttcattttcgtatgtcattttgtagtttcaatcattatttttttaattttggtaattgacgtagaggaaaaaaaaaaaagaatagtcaaacttagaagtttttttttgttgttttaagatcacacttagaaatgtagtgtcactaaacaagtatagtgtcattgtatatcgccaaagaagattattaaagataatcttactcttggaaatgtagtgtcactactcactaaacaagctttatatcaggaggtgtaacattgttactcctgtttttaaactcttagttgtttcacacttttcagttttcatacttaataaaaaatattatgcaaccacctgcctgatataaagctcattggttcaatattgattttgtataaatttaatttcttacatagaaaatagaaaacatttatctctgtggaacaatttcttcctaaaacatctaacattaagaaatggaggaataattatcaaattgtattgtgtacggagaccatcaagacgaggattgtatgttttgatctaaatagtttaatagacaaattacgtagacaaaacacaaaacaattttattattaaaaagaaaaagcatacaacatgatcttattatagaagcagagagaagccgtcattagcttcgtcctactgtttttaacagaaactaactcatacacatacacatacccttacataggaacgaaaccacacttacattatagagatacaatcttatttgttattggatacgagtttttcgtaaaatatttcaacgaccgtagcagtggcaatgctcttcttcgttgtcatgatgcactacgtggtcatgatgctcacactctcctttacatgagtgtgggtaatgctcatagcattgggcttcacagtctctttccctacatgggtaatacactgtgacttcgcctaaatacgtatcacaattagcctcagccgtcgggatctctgtagaaatatccaacattcattcaaattaatatatatacaccaaattttgactatatatgttgagatcgaagaagaaaaagttacgttcaaaataatatgtatgaatttatgcattgcatatgaacaacttaattagaaagagtagaaccgaaattaccagccgagatgaacaagagaacgagcagaagagtggtgaagcagatggaattgagggtctttgccattttggaagtttttgctttcttttctttgtatgcttaaataagtgtttctctactgttttcagaaacttgggtgatactactccatgggggttgtaatctatttatagtacaatttcgttgacttatactatcgttacattatctatatatcatccactagattcgcgacgtcgccattgtctctcgtgtataagcctttaaaggcccatcttacaagttccatactttcttttcagagcccatttcataagataattatccctatcaaacagtgctttttattgaacgtgtttgtcatttttttcttttttaactacggttttcttaccaagagtcaagagggatagataacataatgctacaagaagttaagtaaaataaattctcaaaagtcaaaaatatattgttgtgaagattgacaaagcccaaaggcttgagagtccttcttaagttagcaccattcacgaaagataaaggatttactacataaatcactcatggttttgaagttggaactttactcaaaggctctcgaagtttataaattattaaagacctcaaacacaagaaagaaagggaaatttcaagataagtggctgaaagatgattggaaccggattaagaagcctcaccagattatttgcgaaaaaccactacacatgcacataaaggatctccagtaaaaagaaagttcatgggagatattgaaggaggaagctaagtgaataggaattagaagtggttgttggaggaagaaatgtagtacaagggtggggtggtgtggtggtcggaatcttcaaaggaggggaggaggagcttgcggtattcttatgcaaacattccacattttcatgagtatggggttggaaatggtcaaaactaaaaaaatgttgggtcttaacattgcgttttaatattgggggtggaaaattgaattcagtgttactattcctaaatctatagaggtagttttgatcccattaactgtttcctagctcggctaacgctcaatggccacttgattctagttcttagtgaaagtcatctgctcattaatttctctaattactccagtgagatattttctttggactttttcaaaagcttaaagtcaaatccttctcccctaactcttgtaattccggaatattaaaataataaaatagcattttgcttataattttattgttttaataatacttatattcacagtagttttaaccaatgattaatttgttaagaaagaaggtaagtacatgcagacaaatacaagaattaccagcaaatatttgaattagtggccaggattgatggcttcaatctttcttaagtgagagttttttagtatttaccaaaaaaagaaataaaacaagtggtggtatttgtacgttcttgttaataaatgggtagtatatatgtgtacttccatcgtatactcatacagtactgttgagacaaaaagtgaaaaagttaccctcgaaactaaataaggttattctcaccaaacaagggaacaattatgtgtaaggccgtagtcacaataagttctatcaaatatataaatatgatgtataaactgaccttaaagtttcacaaaaaaaaaataataataaactgaccttaacaatactccatttgtgtttcaaaagaaaaaaaaaacatgtactccgtttattttagggttatcttgttacgtgtttcacaattttatacatatttaaattttcgtttatcttagttctagctaataatgataaaaattaaaatatcatattttttgttactgtaaacaaatatatctttgtgaagcatttatttctacaaaaatttaatattaagaacggaagaaatattaaattaaatcatcaagaagatgatggtatcattggtatatatgttttattctaaatggtaaaaaattaaattgagtagacacaaaacataatcaagtttattattacttaaaacgaaacaggatacaacatgatattactatagacgtatagggaggaaacaatcgtcagcttcttcctattgttttatttgaaaacaaacaacttacacttacatcatatatatagagagagatacgattttatcttttttatattgcataagagtttattagtaaatcgtcagtgataatcaccgtagcagtggcaatgcacttcgcggccatgatactcgcactctcctttacatgcgtggtggtagtgctccttacatacggatttacaagctttttccttacatgggtacactggggcttcccccaaaaagtgatcacagtgagcctcgctcttcgggatttctatatataacacatattcaaattaagaaacatgtttgtgtaaagttatgcatgcatatgaaagttcaggaattaccggtagagatgaacaagacaacgagcaaaagagtggtgaagcagatggagctgaaggtctttgccatttcgtagttttttttttttcttaagcttaataaaatgtttctttctgtttatagaaacttgggtgatactaatcaatggggttgtcatctatttataccaaaattttgttgactttctatgtactagattcataacgtcgtcgtttcgttctcacataggtaacccttcaagtcctatctcttaatccataattacgttttaatgcccacttgagaatttccacacatttttttcttaattgtagtgtttattaattacaaaaaacaaaaaaaaaatcataacaatatataaatatagtcgtatttgtttatttttggatgtacaagttaattgaatgtcatagaaatacacaatgaacatagttacagaatgaataaaataaattaaatttgatacatgatttaataccttttttcaaaacaaacttctaaacagataaaacagagtagagatagagagacctatattccatgaatgatcttcgagcattggatcttaatccatttgtaactctttctcaaagttatcttcatcttcccttcggctgaatagagtttgtatttcgccactcgtctctttctctttatctccggatcgttccaccatcctccaattgattattacgcaaacaaacattccacaatattaaaaacattataaatccccacaattaacattaggattatgacttgtttatatgtgtataattaattttgaacacaaatgacttgtttatatcttataccactataatcactatttttaacttttgcaatcaaatgcaagcaacaattttagatgtgcgctattaatcaaataattcatttattttagttacctttgaacaatgtcgaatgagaagaagatcttctcggtctaacgggcatgtctttgtaagacatcttgcgccatatatctgtttttatcggagatcgattgcgcctcgattctctaacaacatatatccctctgaccagttttaaatctgcaggattaaccagttggaggttcctatctccttcatacgatttgtaagatcgtattctaggagattggaattcctccatctcgttttttttttttccccctttttctctcctaactcttttgttttcattttattatgcttttatattccaaaaaaacgtaatctctatgatgtttaaagagcttgtatttcggaagaggtaatatgcggtggaaagtcaaaataaaaacttcgttacaacaaaatgaccaaaaatagaaagaaaaataacttttacgaagaataacttttcaactaagatatgtctatacaaaatacaacactttatcttgacttatagatagatatggtctattttgcttttctagctcagggaatcttctctgttacggactatgctcagataatgcatgatcaaggactgtgcacactatgattgtcttaaaattacataattcacacaatttagcaaaggcaatttgttatggttaatacttttcttctgttttatgtattacgaaatcatcaaactcaccataatcacaggaatgtgtatatatacaatatttaaaatattttataatgtgaactttttcaaaataataaaagctattggcccaatttattcgacacgaaataatagtgaaataatatctgttacagaattaggcgggaacgaatcaacttgcgctcgcattttttttaatctttgttctccctaacttgtcttacaaatttgaatttgactccctaatgtttttaaatatcgatttaaccctaacaattaaattttttttttttttttcagtgtgggcctgtttcgtgggaatttgattttggtcgcataaaaccgtcgaaatcatttggtagggaggtgaggagatcaaaagatgaagggaggagagacaatgtcagtacggaggagcgggtacaaggcggtggttgacggagttggtggacggcggcgaagagaggacgacatggttgagatccgcaaagctaagagagaagagagcttgcttaagaagcgtcgcgaggctcttcctcattctccttccgccgattctcttgaccagaaggtccgtttggcatatgtacacattttgtattttcgtcgcgaaacctggagattgatgaatctgacagttcaattctggagacatgtgatttctgattcgtagatgcatgctttcagtgttaggaattttgaaatgacctatccaatttcgatccattttggcgtttcttgtggttttccgtgtttgaaatttggtgttcgtaatttgtcttgagattcgtatttcttgacatgttcgttgtgaaatttgacttgacgcttgaattttcgatatatgatcgctagagtttttacttgcctcctgacattttaaattctcagagtgagctactaacctttcatgattgattttggtttatgaagaatttgcatgttctgaaacttggttatacagtgctagaattatcagaaggagctacatagcttggttaagactttccatattatttttgaactgaagatttttcttttgcatgttctggaatatgataatggtgattgcatttctcggaatgggagattacattttctattttggatcattttttctattttgagtagttggtatgttcgattggttacagttgataagctgtatttggtctgacgagagggatctgttgattgaggctactacacagatcagaacgttactttgtggtggtgagagacatcccattaacttatttactaacagatttgataccttggttgctaaggcataatcaagctattgacattgctagatgagccacagcaaactttcaaagtttctgatgttagactgtaatgtagtttgacatgaaactaaagctataacgatgtattcactctctctaatgctattttatgttcttttggtagaaatgtttaacgtacgtgttgaagaagttatacaggccggtttggttccacgctttgtggagttcctaacatgggatgactccccccagcttcaggttagcttcgatacacctgtacattcaatctgcaatctggttttacccctagcttcataaggtcaatgtgtttcggttcgtggaacaaattttatagtttgaagcggcttgggctttaacaaatattgcatctggaacatctgagaatactgaagtggtgattgatcatggagctgttgcaatactagtgagacttctcaactcgccatatgatgtggtccgtgagcaggtatattgaagtggtgattgatcatcatgcatgctattgttgttctcaaatttgtctgactgctaagagcctgttgttgcctctgcaattgataaagttcaaagataaagacgatgactaagatcaatagagggaaatcattttaaaaaaaaattatttctgaacagaagatacaatttttagactaaatatagttgtaggttaaatatgtattgtcgagtatattgttcccctcccatagttcagttgcaaatcttctgtattcttggacaatcaggttgtttgggcattaggaaatatttctggagactctccgagatgccgtgatatagtccttggacatgcagctctaccttctctgctgttgcagttaaaccatggagccaaactttctatgcttgtaaacgccgcttggactttatctaatctttgcagaggaaagcctcagcctccatttgatcaggtaagttttgaaccaaactgagttttgttagatccccaccttctctttcactctcaatatatggttgtccagcatatttaagagatattagtcggatttagtccaaattatggtgatcaaggcctgtttagcactggaatatttaatactgtaaaaactctggaaacaaggtttgattcttgggtgaggacaaaccccaagaatattttttttgtcatatgatcattgtaaccagggcacctgaaggttttattttggcattaataaatgcatctgaaaacctttcacgctctctttatggtttcttgaccttagctttgtgatccacactgctgtagtgatcctgctaattttctttgcgcgttttaagtaaacttttttctgattggatttgatgaatgtcgtattcttttagacatcttacttattaccatatgctcacaggtgagtgctgcattaccagctcttgcacaactcattcggttagacgacaaggaactcttggcttacacgtgttgggcgctggtgtatctttctgatggttcaaatgaaaaaatacaagccgtgattgaagccaatgtttgtgcgcgacttattggtctttcgatgtgagtgttcaggactttagctaaccaaaaaaatccagagtcatagattctgatggccgtttgctttctgaacagccaccgttcgccttcagttatcactcccgctcttcgcaccattggaaatattgtaactggaaacgatagtcaaactcaggtaaatatgcggccagagataaaatttagtattagtatcgctttttaatataatccctgctctttttccattttgcgctggatattctactgttactgttatctttgtcaactaaaaattctcagagtatttgattatttatcacaagtgagttctcagaacttttgttctttgtgattttcttagcatataattgatcttcaagcgctcccatgcttggtaaatcttctaaggggatcctataacaagaccatcaggaaagaagcttgttggacagtctctaatatcacagctggttgtcagtcacagattcaggttagccaatataccgtctctaaacttctctttttaatcgcagtctaattaagatgttgctctgaatatatgtctgcacttgtttattatctttccataggctgtgtttgatgctgatatatgtcctgcacttgttaatctgctccaaaactctgagggcgacgttaagaaggaagctgcctgggctatctgcaacgccatagctggaggctcttacaagcaaatcatgtacgtagaacaaaactcaatacaaaaccaggaaccatatagaccatcaaatattcagtagtataaatgtagtcatgaaaagagttcaaacagcagaactaaatcttatgggtctcattccattgaagctattacaactttttttggtagagttttcagcaggtcctttgatgcgatctgctaatgtcttgacaggtttctagtaaagcaagaatgcatcaaaccgttgtgcgatcttcttacatgctcagatactcaactcgtcatggtttgtttagaagcactcaaaaaaatattaaaggtgggagaagttttcagctcaagacacgctgaaggtatttaccaatgtcctcaaacaaatgtaaacccacatgctcagctaatagaagaggcagagggactggagaaaatcgagggcctgcaatctcatgagaacaatgacatctacgaaactgcggtgaagattcttgaaacatactggatggaagaagaagaagaagaagatcaagaacaacaagacatgatatatttcccagttgacaactttgcaaacatgccaacatcctcaggcactctcagtgagatgcactgcggaccttaagaggtaacatatatttccttctggtaactttacttggttttttgcttactcattatggactagataggataacaagatccgaccattaaggagtagacgttttgttctagatcagagagtctggtttggttttgtttaggctgagagaaacttaccaaaactcaaaccaagcaactctgtttcggctgggtttaatgagttttactttagttcggttcagtctcatataaaagcttcagctcttatttggtgtcttactgatgatgcaggacaagtggtctaggcaaacatacactcacctcatctgttcataacatttactgcaaatggagattagaaattacattgcttgctttatttggtaatgacaatgttggtcagtacgtagtattatagtggcctagtggataatgggctatttaatagcttgtaatctggaacaaacgttacagttctatatgatctcttctccacagattcttaaaatcatggttaatatattctttacagtaaataaatccattataaactcgtaagaagccaacttacaaacactcaatacaaaagtgataatgttttcctatgtaaacgccataagaaataaaaaagaaagcagaagaggctgcagtaaaagccactgagcgagatagacaacacagttcgtttttctcttcaggacattttgtggacagaacactccgcaacgcaaaaattgtggtgttcgcgtttcaaaagaattaaaaaatgagggatctccttgtgtcacaacagaatctccttgaggattaagagtaccagcatgatgaagcagagaatgacaagaacagacgcacacatcaccatacctccttgtctctgtgtacgttccgcctgtggagattcacaagcaattccgcttaaaaatttaggcatgaaatggtgtgagagagtatacacactgattgtaaagagaaatttaccttttgcagctgtttgagaccatcgtcgactgtactagcaacgttctggatattatagtcaatccgatcaactattgtaccctgtcacgacaagtttgctttcaagttatagaatttctagaatcagtggctcagaagctagacaacagttacagtgttgtacctggtctatcacaagcgctgacagatccttcatgatctgagcaagctcgcttacggattcaacaacctgcagatgaagcagaacaagaagaaagtgacaagattatgattgtgtatgaaataggtaacaattaagagcggtaagatctgcaaacattaacctgttgaatctctttctccctctctattgatatttcctcactcttttttatcttgctcatttgatgctcactaaatacctgtagtgtcatatattgcattattacagaaatacataagatgaatcatgggtataagattgggacaaaggagtcataccatatcatcaaagtcatcatcttctgctttatatctgcttccgttcagattcatctctaaatccgctccatcctgatgatcatcacagctagaagtcaaaacttcttgggaataaacaaaatgtaattgtcctcaaaatcatagaaataactaacaatagaatgtatgaaactcatgaaaccaaaattttattagagtacagctgcataacagatccaaaaactcgagagcaactcagtattacaaatagtgaagtcttggacataggaaatgtatagtgcgtcattgcatacctctttttgtagtctcaaacgtttcaaatatgtagactgtttcttgcgtaactccatagaaaggttttggagatccgtagcaagagatcgctgttataaaacacatgagattttaaagttgagatgttgatgggaaatgaaaggacatgcgtttaagagacacatcaagtcaagtacaccaacctggacgtttttcctgacatttgaatcttcagaaggtccagctgcagaaagcctctgaagttgcttctcagatttcttcaataggaaggtaacctcttgtgtcaaagtctcgatttgatgttgatcttctttaccatccccaaacgaaggcatcaacgctttcgcatgagcctttcccaattcagccattttggttcttgcacgttgaatgtaaactgaaatctcctcagatacatcaacccaatctggtggtaagcccactgttattgtacctctactaggacattggaaaacaagaagcaaaactttcaacttcaacaaattgggccacagaaatatattcaagtactattctcttaatactcaatcagtagctgaaacaacaaggctgaacatcaagctaccaattccaaatccataagagacattattgctcaggataataccaaattttctgctaaatcaacaacttacttcaaaaattcataatccaactcacactagcagctacatgaagtgattaatttctaatgcaatcaccaaatttctaacatttcaatggcagtgagagatagagaggatgagaagtacctcgaattcccaggatcctcggtactgactggagcataagaccgatttggattcaatagagacgtgctcgccatctcgatcaccgggcctaatccggatttagctccggtcaacgaattgtgctccgtcaatgtcgacgacgaagacgaccccattggagcacgaacgctcctgagagagtttctgtacttcctaaacaacagcgtacgattcctagtcgccataacagctcaaatataaaccctataagaatctcagtgatagctaaccaagatctcggcgtctagatggattttagcttcccttccgatcgaaagctatagatctaaacaggatcgcggtttcatcatagacaaagcatcgaaaatcgcgcgaaagaaacgaatgcgactgcggaaaccggccgatctccggcgggatcaaattctccgacggagaaaaacagcgcccagattcacaaattggaaatttaactataatttcgaaaattaattaaaacatccaatcgataaataaataaacagttgacccaaaaaaaaaaaaaaaaaaaaaagtcacaagtcagaaaaaacataagaacggggctaaaaatctcctgctattgcgtgcatctttaactgcgaaatcttataaataaaaccactgaaaacacgccacgtgtctaaaagacaacagcatgacgttttatttggaaacgtcatgtttctgaatgcaattatacgtcgggtaaaataataaaaacggcatgcattttcgtagactttacaaaaagagtttatagagtggcccaacactttcttgtttttctatttttccgcgaaatatttgattcatcactgaaagcaaacgttttaatttcttttagataaaaaacataaatttaaagaaataatttatagaacttgtctcctctgtctctcactctctatccaaaattaattaaaacgaggagaagaagaaaaaaagaaagacaaaactttgttaataaaccgacccagaatcgtggtcttcataatctgtctttaccattttcgttggatttcttcagacagtaatcagaatcatttactttcgtatacagattcattttcttcaaaacgttttatttgttaaggaaaaaagtacaaaactttcgacttttgttttccgggttttgtcaataatggattccgattcatggagtgatcgtctcgcttcagctacgaggagataccagctagcttttccatcacgatctggttagtttaaatgatatgaattttttctccctctgttctaaatgattgttatctgatcttttttttcgtctgaaaattgatgggcgaaggtagtttaggtgatagacttgtgttttctttccgatttagaatctctgttttgaagattaagaaatatatgagaaatcttcgatcttgttttgaaagatttcgtattttgtcattttttcatcgccttaggctttgcttgatactagcaaaaatgaaggaaagggggcttttgtaattgatttttattgactgatgaaatatggtttgattctggttttgctcgattcctgagaaaatggatgaaaattatccaaagttgcagtctttgttagcattttaattactcctgtgatgctactatgctcagtgtttatgaacatgagaaagtgaagatattgttctcctcagaagaggagaatatgtttcatatactgtaacctcagaggtagagtaggggtttagtatatctgattactctctttgttttcttatagctttgctgtataaatatttggttgatgtgtttttgggattgcagatacattcttagggtttgaagagatagatggagaagaagagttcagggaagagtttgcttgccctttctgttctgactattttgatattgtctctctctgctgccacatagatgaagatcatcctatggaagccaaaaatggggtaactttcttatttcttttttaaaacaaccatttgaagcataaagatgcgtttatacatttctgattcatcacatgattctcaaaagtttagactgagcggtgttggttcctcctctgttgttacttggatgatatgacaaagaaaactgagaataatagcatgtttatagccgattcacgaaggaatagtaggatcagctgtatctattgcatctgatatttgggggattttgtttggattctatgaaaacttagcgtttaatctagtgaacattgttattgcaggtatgtccagtttgtgcggttagggtgggtgttgacatggttgctcatataacccttcagcacgctaatattttcaagatatcctttttttctttctcccaagtcatatataacaatcaatcttttctatcagtgtttctatagtctgttattaagttgtgttcttgacaaaatattacatgcaccgcaagagaaaaccaagaagaggcgggtcatattccacattatcgatcttaaggagagagtttcctgatggaaactttcagagcctctttggaggatcttcgtgtatagtatcgtcttcctcatcatccaatgtagctgctgacccattgttatcgtcgttcatttctcctattgctgatgggttcttcaccacggagtcatgcatatctgcagaaacgggtcctgtcaagaaaacaactattcagtgtttacccgaacagtatgcttacttcttctcaatcattttactttgcctaacctcttgttagtaaaaatctggtatttcaagactgattgaacctagatgattctaggttattttaagtgtttggtctataactttccattggaacatttgcttcaatgttttacttttgggcacacttgggatttatgagccaaactgaaactctttgatcaagttgagttcttatacccatataggacatgtatggatcactgatgaaggttttgtggatgataggaatgcgaaaaaaacttctctttcagctgaggatcacaagcagaagttgaaacgcagtgagtttgttcgagagctattgagctctacgattcttgatgacagcttataatggagtatcgcttctggtaacttgtcagcaatgaggaaactccatgttctgtctcagcaggacaaagtacgaaattattgtttgtggggagcaaataaaggagagagattatgaatgagtgtaacctaagaacacattagcttctgcggttaacgccccaattgcttgtaggtcatgagaaaaaaaacaaaaatgtatgtatttcacgtattcgcgttcaattattcgtttccagttgtttactaggataagaatgaccatatatgttgaaaatttgtcatggaaacggcttcagattttgtagaggcacattcttctgcaatcagatttatagctttattatagtttctgaagctcgttagtcgttaagctggggtatccccaaactaatcaacaacgagacaaaattacaccatttactgattgtgattatcgaaaaacttagacactgaaaagatatggtaggggctgcgcgaacgcaaacccccgctgccacaaataatgacgtaggctcttcctctagggaagaccttaagcatagcaccctcccggtatgtgcaatgggagtcactagcctaggccactcgtcttcttgatcgcgagttgaccccgtccaggtaagtgatttgctcaaagtcatgactctcttatttataccctgttcccggagcttctcttgtttcttattaccgatgtgggactttttgctaaactccacattttcgccgttcttaggttttagattctttaatgggccgatctctttggtagcccaaagtcaattatttagtaagatgtagaatggacccatgttcggatccaactaaaatcgaattatcaagttttgcaatgtacaaagtaagatgtagattgtattgggctttaggctaagatctgaataacctaaagaaacgagtatgatagataagtcagtgagtgtgataagcaataatctaaacacgtaaatgagttattgaagttatctaaatgcagcctttttttgaaagaaaaataaaactgtatagttctttcttctcagcggttgtaatttttcgaccaaacttgacacacttgatgattatgcttttttgtgtgttaaaagaaattttatgtttgccaacgatccaatcgaacattgaggaaaggaagtgacatagctaaaagcaaatgttctttaattcctttactgtcgtaagcaaaggttctttaattcctttaataccataaacgtacacactcgacttccacttgagtgtccttagttcatgtattcaagtggaatgcatatgtagctctacttcattttaatactttgttatttcgtgcatattcaaaagttgggttgtcaattttcttaagaacatagaaaaatatagttggtgattagtcagtaatcgtgttttttggaagcttatgaacaagtggagccaatgagtgacttacatattaatcgcataggagaataagatgaacaatatctatagcgactgtttttttatatatattttcagaagaaaagcaaaatctctttaagaaagctaatgggttattttatatatcttagtgttgttaatcttcttttatataataaggttgtaattaggtttatggttaattagtgtcaaaactaatttcatcccacagagcagctttagtattgttatctatacgtgtctagaggagacgaatcagactgacaatttttattcttagtaaataataattattcatcgtagttaaaatctacaactaatatgaaaaccattttacatgtagaaatctttgaaaaagactaaaaaatgagtagatcgaatatgtatattatatataccaatatacagtagtaaaccaattttgaaagttcttcatctgtagaaatattttgattgtggaatgtagctcaacatcaatcaattacaaaacaatagatctacccatcgtacgttgactatcatcttgcatcctcatctacctttggtggcaggttgaccttttaatgttgatatataacatgctttgatatctctttaatgctttagaccaaaacatactttttatttattgataaagtgtttagcaaaacgtacattcatgaaaagtactatatcgatcgatgactacaaattcatatcttcaccataaaacatttctagttttgctttgagtcttatgattcgcattttgcagtctagctatattccctacattatttgaaaataagctatttaattatgttgttcttttgccaactacattaaaatcgttgatcacaaatccataaaaagattgtgctttagatatatatttacgataaagcaataaactaagactagaactgagctttctatatgtcagtgaaagtagatatttttgttagaagatagtgtacgtactactgtactatagtgcataattcaattaattattgtgtttcggatgaaagaaaagctgctagtgggatatgcttaagcaccagtgcacgacgtataaacaaaagcaagcactaacgtaaaccctttttttttctttgtcaagcccgtaaaccaatattctatttttcaatttaaccttattttatttctcttagatttaattcagttaagttcaattcaacatctaatataaaccaaattcttaaattaggtaaaggaagctaatccataataatcaagtccaacactaaaagcaaaagcaatctcttacaaatatataacatgtattataatgtctccggaatgatatctatagagcttaactattagttgtctaatttcaatcataaacacgtgtacggtcgggttcacaaaataactagaactatttaaagaaacataacaaaagaggaaacaaaaggacaaatgtgtgaaaaacatttgaaaacctagttaagaataacatcctcaacaagtggaaatgctattgcgaaaatatgtttggtctatttacagaattatacaaaggttgattctggcagactttatataatgttttggtagggaataagtcacgagcttataatagcaaatattggcatgtcattgttgaagatgtcagattgttactttattttagttttaattattttattatttttgagtggtgatcctttttccatatgacgtatatgcacatttttaatttaaaagcttacaaggaccacaatcataataataaacgatgcaattgacaagccaagcactactcttacctagtggaaaaatatcaaaaatcaaaaatgaaataaaaatggatttaagtgggatcattgtagctttttaaaacaaagcacgtcaagccaacgctatagttaaaaaccagaccaattatttttagttgttttacatttatatctccaactccaaataaagtagaaaattaaaaaaaaaaacagagcagcataaaagttgaaggtgattggttgataaagctatagttgtcatctacatttgtaattcatatattagtacgtctctctcttctctttctctctctccctactaaatactaatgtgtgtgaatgaatctctgtttcttgttttggaaccgagatggcttcctaacaattgggcttttctctgcctcttcctaggaatctgaagctcttctctactctctactctatcactccatctgtgtaagttttactcaacctctttctctttttttctttgctttattcttttagattcacataggttttcgtgtgtttgattttgaccaacatttgggattttattttacttctttttggagtttgtttgctattggggatctctagtctgtgaaaaagatttcagttcttgcgtcttatcttctcgtttcacacaatctttttttcttactttagacaacaagtctgtctcttgatgatgattcacatatgggttttgtcattcgtgtggttttgcgtaatacccaatcccaaagttctttcctttctttcttacaagttttctaaattgggtttgaaatttgacaaagatttcacatccaactcttattattactttgttgacttttttttttttgttatcttccacaggaacatatctttcttattcttctaggcactatctatttttcactttttgtaattggaatttggagatggctatgcaaactgtgagagaaggtctcttctctgctccacagacttcttggtggactgcttttggatctcagccgttggctccggagagtctcgccggcgattctgactcattcgccggagttaaggtcggatctgtcggagagacaggacaacgtgtggataaacagagcaactctgcaacgcacttagctttctcacttggtaaactcttaacttcttttgccctcaaatagatggttctagtgaaaatttctgaatttgtcaaaagtggctttttttggaaagtgctagtacatgttttactagttatttataggtatgactgagagtgaacagaactgagctaaattgtccgaaaagagaatctaagattctacaagatataaagatgtttaaaaagatatctttatggttcaaattctggattgtaaaaatgttatttgttctgtaggtaattgtgaatctaagaatgcgtttgtgatctgatttggaataattttcactatgtatgtattaggtgatgtaaagagtccaagacttgtgccaaagcctcatggagctactttctcaatgcaatcaccttgcttggaacttggattttctcagccaccggtaaaaacttttccgcattgaaaaacatataatgaataagcctatcatgagtttcctttaatttgtttctgagtatttagtgtttgttggctgtttactttggtcatttagatctatacaaagtatccctatggagaacaacaatactatggagttgtttcagcctatggatctcagagcagggtaatgcttcctctaaacatggaaacggaagatagtaccatctatgtgaactcaaagcaataccatggaatcataaggagacgccaatcccgcgcaaaggctgctgctgttcttgatcagaagaaattgagtagtagatgccgcaaggtaacatatagaaactagtttgatacttttgtgcaaatgagattttattactgaattagtgtgtttgcttttgttatgtatgttgcagccatatatgcatcattcgcgccatctccatgcattgcggcgtcctagaggatccggtgggagattcttgaacactaaaagtcagaacttggaaaatagcggaaccaatgcaaagaaaggtgatggaagtatgcagattcagtctcagcctaagcctcagcaaagtaactctcagaattctgaagttgttcatccggaaaacgggaccatgaacttatcgaacggattaaatgtgtcgggatcagaagttactagcatgaactacttcctaagttctcccgttcattctcttggtggcatggtaatgcctagcaagtggatagcagcagcagcagcaatggataatggctgctgcaatttcaaaacctgatcctttaccgtttcacagtcaaacggagagagataaagaactcttgccttggtataaaggattttcctttttgccaatccgctttggctgtgaacaggcaaatcatctttggctcattctctattaaggtaacttcgccgtgaggtgaaaaaagctttgatatatttatcttcagtgtaaaagtagttaaaactggtgaagaacaatgatgtgtttggtcactaaacccacttgttccaactagtagtgtgtgttttaagaaaactctgttatctgattttgtagctctctctggctttgtgtgtttctcaaacaactgtaacaacttttaagttatgtggtttatgtaacatatttaagacctgtgtttttgtatatttggtcgaatttatgttattatttgcttattatccaggacttatacagcaaagacagagtaaaaaaaattctgttccaaatctaatggttgatcaatctagctatcgatccgagatcgaaaaaaaatcgagcaacgttcaaccactcaactaagacattccatttgtcaacatgtgaaacgatatattatatatatcctaaacaaccatggttagcttttaaccgcagttaatgttacatgtattaaacgtctaaattataaatagatggcggttttttcccaagtaaatctgtagtgaaaaataaatgcggaaatggctacaaaaaacgtaaaatatttagagtaaaaaaaaataaaaacgtaaaatatttagcactctataatataataagattatacttgaaactgcatttacttttgtttaagaataaatattaaataaatttaacattggattaggtatataatctattgtagtggccaaaatctataatatctttaagttttagatagctatatgtgatatccatgatatgattaataatatattagcaaatatgaaagaaaatattcatattctattactatgtttttactgtaaaatgatcatgatttttttttgatatttatagcttggataaataatataatattataaaataattcgcttagagtattagtaatactgttttatatatttttcgtagggtgaaaacaatttttctgtaatatatatttgtgaagttttgtattattgtagatgaagaagatattgacactctatatacaggattatatgtttttgaatttgtttttatattatagatgtagtattatggttatgattgcgtttttaatttttgtgttatatgtttgtataatactaatgacaaaatctgtatatagtctagtaaaatttgggcaattatttaaatgggtaaaaagtcactatgataacgacacatcagcatgacaattttgttaataacacttgaggataaagtttattttatagaatgattatcaatttatataggggatatcaatcgattctgataattcatcttggttggactttggtcaattttggttttgtgttggtagtattgtctgaaaatattatgaaattccagctgggttgaattatcaaatgaaaacaaaaatctaaaaccgagtgctagacttattgttttgtaaatagttgattggtgaatttcgtataaataccagtactaaactcattggtccttgttcgactagttcttgttgaactggttgttgaccttgactagcagcccgattcttagcccgttttgattcattggccagatttggtagcttgggtttttggtgtcttccacctatcggtcttcgtggttcatcgtcatcattcattgtaaaattcctgaaatatagaacataaaaactaataaatcaaattaaaacaatccatatgaccttaattaattagtaatcaatattgtgattcccgtaactaatgtttagtaatcaagttaagagaatctagacctgtaccatgacttgatatactcctgtaactagaatatatggtgagagagacagaaaatacataaataagcatgttagatatatatattgattgtactatcattatggctaaaactgatgagtaccaaatttgtacagctgctagaaacaaactcgaagttcaaactcatcatgagaactaaggaatcaacacccatatctccaatctatggaacaccgacctagactgatgatgatcgttaattttatatagagcaattttacggtgtgatatttgaacattagaaatattgtgtaattttttcacttttattttgctattctttgctactcgtattttaaagtgaataacgatttgttcagctaaaaataaataatttttgaatttttcttgtatttatatatattttatattaaattaaactgaaaggatcaaaataaataaatttagagagcaatttttatttaattttatttaattttgagagcaaattaagtttctctctcggcgaggagtacgttgaccctaacgaggagctaaaacatccgacgtggtttaaagtccctgaatgggatgtggacagcttcgaaggtctcgagtacaattcctctgaatataaaaatgaattctctaatgacgaagatgaaaatcaatggcgccgctttaagcgccagctcatcgagaataaggtaaccgtattgaatttgaacttaatttgttagctggataaagagtaaatcttgactagtgcgtgtgcctgaatttaggggttttatgtggagcgagagctttggccatggtacaactactcggattacaaagtagtccctaatttggatttgcctgccagtttcgggcaaacctaccgagtactttgcagagatggcttgtctctgtctcaaaaagtacaacgaagagaaaagaatcgaaaatgtcggtatattatttttggctaattatcactcaactctttacaagtgtatttatctaataaatctggttcgttttctgattgtttcaagggtttcgatgtggagtttgtggaagtggtgcgaggtatattttcagcaggatcaaggtcaaagtcgttcatcacattcatggctagggagaaacctgatggacctcctgttgagtatcaagctaaggtttggtgtacggttgttcgaaaccagaactatcccatcctctgtagacgggctctcacaacaaagcctccaagccaaaactagtaaaggtatggtttttgacccagactttcttttgctgttgatactttatatagcctgaattgttgtgcgtatttggatatattaagttttagatttagaaagataggcagattaataaccatctcagcgaattgtcttggctcatcatttctgtcactacaattatctaacttggaggatagctgaagtgcattgtcttattactatttgtttccatgctagtgagtatagggattaagggtgagaagtatcttctgactgtttagatctatttgaaactgtaaactgtctgtgcatgacttcagaataagatatctctgtaggtagacaaggagatattttcctcttctaaagtgattctagaaggccatttttattagagtcttaagttgctgacttgtttttatcactgttctctttcgtctgggactggaaattagactagcagctgatcgagaagatggaattcgctggctgatgcagaggctggagttcgcaccaggtcatctaatatgaagttgtttgtattcgacttagtcgtactaaatcacttctattgtgttgtgccaatatttatgttttaggtacttatctctatgttagctaaataactggtctaagagacttcaaattaaatgtttgtgttttataactttggaagcatggcatgtgtctcctttgatgcagtatcctcgcttttgggatttctttcttttattatgttttcatattatgtatgacacatgagtaaaaatcaaacatatccatccatatactaatatcaattacaaggatctaacaaaatgtaaaatcatggtagatagaaaacaataactttaacatattcaagtgatcaatgtagcaacctttctttcttcgatcacgctctgtacgaagtcaagggcgaatggaacaatttaattggccactctggcaatgatgtagcaatttcactgcgtggtgtttgaacacttgcaacattgtgtttactctcactttcattttgctaatacatttgctcagctaaaaataaataatttttgaatttttcttgcgttatatatattgttatttttatgttaaattaagatcaaaataaataaatttagagagcaatttttatttaatttaaagataaacacttatggtcgcacaaatatttgtgatattggtttaaatcgataagaaccgtttttgttaatcaaaaccgggccaaccctaaaaagctaaacgccggttagactaaaagagccaaccgccggataaaccaaaaaaacaacggcgtttgttttttcttctccttcttcttcaccctgcgtcgtgctctctcgaattcccaggtcagctacttggattcgtactctcaaaaaaatattgctttcgcattcctcttgtggtttcgtttctaaacgcgagtttctcccttttctaaggtctgtgttgatcccacccaaagtagagagaattaaacctaactgttcccgttttattgtagaattactgtacatatagatttaagtcgtgatctagttgtcgagaggctctgtgcagttgcgtagttcgcttaccctcagaaacgggctttgctgagtgatgtcaattagtagctagttgtgagctctatatgcgaaagttgtgtatttgtctctgattgctctatttctgatttgataaatctcagattttagcaaccagtctgaatcaattttatgaagacctaagagacctagcaattcaagaagaccaccaatcaatcctggaggcatggtacgatctgagccttgtgttctgttcgctcagacctttgttcatcctcaattggacgaatatgttgacgaggtaaccttaatttttagttaatgatacacttcaaatactgccctgttcttttggctagggagtgcctatgttggattagggttctgttttactagagtctcttaaacctggttaggaaatgcttgggtgaattactgactacttttacgggattgtcggaacaacaagtattatatgtggtggttttgtcattcaatggcagaagttacttgtttggtttcacgcttctgcggatttattttatgtttcctttaattcttataggtgatatttgctgagccagtaatcatcacagcttgcgaatttttggagcagaatgcttcctcatcttctcaagctgtttctcttgtcgggtatgttctttttttgactgtgtgttcttatatttctttctatattttaaccattgaggatcttgaagtagtaatatccaccattagaagtcttgttgaaatgcatggtcccatactctgtagctgtgatctctattgactcttaatgttaagccttttttttggatgtaaaagttcacgattggctattttcttgtcactggaaggtgaatgataagaaacctaaatttgtgtagaaaatctgaataacccaaacttgaaactgtaacaaaaaactgaactttgcagacatgatatttcgatccagtggtttcgatgaaatgtccagagtccagactctaaagttcagcttctttatcattaataaactttagtcactttcagagaaatctagattttgagtcaattcgtcttctagaaacaaaaatagtgaagcaatattgttagctgaaccacttgtagttagattttcagctaaaatgccagctttatattctttgtgagtgacttaatgtctgacaacatttcttgagcgtgggtgatgtctatggttcgttatctcaacgttgacaatattttcgttagggcaacttcacctccttcatttgcgttggaagtgttcgttcgatgtgaaggagaatcaaagtttaagcgactttgtaatccttttctttacactccttcagcgccctaccctttggaagtggaggtaactactaaacttgatttatcttcagactgatttttgtttcttttctttttggttcttggtattgattagtttggtattctgcaactgatgctggtaacaacatttgggaatggttcttatgtacatttcctgtccttagaccagagtaattggctaccataattcagattcctttgggaacaaggagctgttagctggaaatatggcttacagctgtacatactcccctagagatgtgtatattagtttatatgtaaattgctgggtcatatctgtcttcggataataggggttatgacataatagaaggattaaataacctgttgtaggtggtaaggggtttaatttgggttgagaatgaaaggagtttagagaattgaaaaccttttaattaggcaatcttgtgtgtcaaaaggcaaacgttcagcctccctctatgccaccagaaaagtgctcaatcatttacatttgcaggtttcagttccttgctttacttgactcttctcatcaaaattgcaggctgttgtaacaaaccatctggtggtcagaggtagctatcgaagtttgagcttgatcgtctatgggaacatcgtcaaagatttggggcagtacaatatcattcttgaaggtcgttctgtaactgatattgtgagttccactgagggtaatcttgaggacttgccattggtattgcactcagttaacagaacaatagaggaatgtctatcctctctagacatagtatctctccccctggctgctgtagatttgccggtggaagtaaagcgattgttgcagctgctgctaaaaatctttgataagctagctactaatgatgtagtaaataaatttgtggatacggtagtgtctggggtctcctcgtatgtcacagacaatgtagatttctttttaaagaataagaattgttcggctgtgaccagttccctagattctgggttattccatgatatagttgacagggttaaggaagatattcttgatctcaatgaaattcaagaatcagatgtggcacttggattgttcagctttcttgaatcagagacttatttggctacttcccaacaattggttgttatgttgagcccatatattcagtttgaaagagattccttatgtactgtccttccaaaactttcaaaggtattacattttctttttagctctcacacgctggtgatagaaatttctaatattaatagattaattgttgttaattttctcatttcaggggaaagccactcttttaggtttaagtttggccttcttattatgctctggccgagaaggctgcctccaatttgtcaattcgggtgggatggatcaacttgtatatttgtttggtcatgatggtcagaattctaccaccattactttgctgttgcttggagttgttgagcaggctacacgccattcagttgggtgtgaaggatttttaggttggtggcctcgtgaggatggaagtatcccatctggtaagagtgagggctactgtcttctgttgaaattacttatgcagaaaccatgccatgagattgcctctcttgcaatttatattcttcgtcgtttgagaatttacgaggttatatcaagatatgaggtactctccatatcaagaatcttgtgttgtttggcattatgttgataggccctttatgttaatattgttattaatattctgtctatcagtttgcagtgttgtcagcactggaaggtctctctaattctcatggggctgcaactcataatctgaatatgctatctgatgctaagtcacaacttcaaaagctccaggtttgtttctgcttttaatttcatgtgatttgctcgcttatacaatcagtaaaccaacaatttaacattctaactggtgttactgctgactatcaattcagaacctgatgaagtcacttggatcagttgaagatccctcaccatcagcctacgcagaaagaagtttggtttctgatcattctgaagggtggttgtcatacaaagccacaagtaaactaacttcttcatggacatgtcccttttatagctctggaattgattcgcacatattggcacttctgaaggtaaatcatttgattaaattagtcttttgacttagacatttatgcactattttagttgctaaatatgctgtgtgtcagaatggaagtatctttttcacttcttattctgtcactgaaatcaattttttttagcggtaattaataaaccttacctaaagcgtctgacaatgcacaggagcggggttttcttcctttgtcagcagcgcttctctcaatgcctgaattgcattctaaagttggagatattatggatgtctttactgatatcgcaatgtttattgggaacataattctttcatttatgttttcacgcacaggtattcttatttaacttccccactagaacagacttgatgattatgtgcattagagttgtaatagagcctgtatcttctgttttccaggattgagctttttgctacatcatcctgaactgactgctacaataatacaatctctgaagggatccgtcgatctgaacaaggaggagtgtgtccccctccactatgcttcaattttaatatccaagggttttacttgcagcttactggaaattggaataaatcttgagatgcatttgagggtggtgggttcactttaccataaagggctcatcctttacatgcgtagatttatacttatatcctactgtttcttacatacttcattcaggtgagtgcagtagatcgtttgctcaagtcgatacagcaaacagaagaatttctatggattttatgggagttgcgtgatgtttctaggtgagaaatgttttgctgtcatatctcggtttgccaaaatctgcttttgtttgtctttgtcttctttcgaaattaactggaaggcatcctgcaagtgcaggtctgattgtgggcgtgaagctttattgacgttaggtgtttttccagaggtatgaatctgcacccagggaaaagaatatacttctgctctttttgttcatcgtggtctttcacagtctatgataaacttatctgaaaagaattcataattctcattttccccccctgctttacttctgaagctgataaatggtgaaacatctcatggtgaagaaatgacaaacatttgattgtttaaaaaataatgtgtttggtggtgcttttagctaccttcacgaaatttaaacctttggttataatggacactttctgggagattagtggacgaaagtgttgcatccgtggccccctgagctggtcatgtaaattttgactataacgaaattgttaatctctttgtttcttgtgcaaactatgttagttctaattcattattgttaattcacttgtttggagttgtgtaaattgtattggagcaggcatactcgtggttttgactaatatgctttattgttctcttttaggctttagcagtcttgattgaagctttgcattcagctaaggatatggagccggcagttgaaaatagtggtatcgttgctgctttatccctaaatttactaccttggcatagtctcttggttatcttctttcaaaacctcttacttgcttaacattctcattgtcaggaatttcaccgcttaatctagcaatatgtcactcagctgctgagatttttgaggtcatagtctctgactcaactgcatcatgcttgcatgcttggattgaacatgccccagtccttcataaggccttgcatactttgtcaccgggtggttctaatcgaaaagatgctccttcacgattacttaaatggattgatgcgggtgtggtttatcacaaacatggcgtaggtggccttttacgttatgctgctgtcttggcttctggaggggacgcccaattatcatcatcaagcatccttgcactcgatttaacaccggctgagaatggtgctggagaatcaacaaatgtctctgagatgaacgtcctagataatcttggaaaagttatctttgagaaatcttttgaaggtgttaacctttctgattcatcaatttcacagttgacaacagcacttcgaattttagcgctgatttcagataattcagtatgttatctttccccataatttttccagaaattacttttttttcctttagatgctatagtcttcttatttaagtgttctgaaatgttgttctttgtacagactgttgctgctgctttatatgacgagggtgcggttacagttgtgtatgctatcttggtcaactgcagctttatgtttgagaggtcgtcaaatatttatggtaaactactgtctattctgtgatttgattcaactcctctattgctgctaccatttgaatcttaactttagacgtgatgataagagatacttggaagagtttaaataacccagttgctggataaccgttttttatatttacccttttaataacctttttcttataggttcacgatgttttcagctacttttcctcaatcgtttgatgattataggtgacactcaactaattcttttgttttggacttagcagattatctggtggatgacgatcatggatgcagttctatttctgactttttgtctgaacgtaatcgtgagcaaagcttggtggacctgttaattccttcccttgtcctcttgatatcagtcctacaaagactacaggtctggtgctttatacattattagtttcttcatcatgtatcagcaacaaatgaaatgattatataaatttgattaaaatcttctctcaaaagccatagcttctgaaattctacctttatttactttgttgagactctataattgcgggcttatgcgtcttcattatcccctctggtcattgacattttctttgctgtctaaagggaactaaggagcagtacagaaacaccaaattgatgaaggcactcctaaggctacatcgggaagtcaggtgagttacttttgttttgttcttagtagtattaatgacatgtatgttaaatgaaaagttaagctttgagccatgatggcttgttttctttccagcccgaagctagctgcttgtgcagctgacttgtcctcccattatccagactctgctcttggctttggagcagtgtgccacctcattgtgtccgcccttgtctgctggccagtttatggatggattcctgggctattccacactcttctttcgggtgtccagacgtcctctgttcctgccttgggtccaaaggagacctgtagcttcctctgcattctagtatggaaatcttacacttccgctaattattttttacttggtgtttgtgatggcatgcactctttatatcattgtgagaaatttaacatatatttccagccgaatagatatgtctcatctgaacatttgtgatggaattttgttcatgtgtattgtagtcagttaatgtaaatggtatcaacgggaagatctccatttattgtcttaatactttattcttcatgtatttctcattgcaagagcgatattctccccgaagaaggagtctggttttggaagagtggcatgcccttattaagtggtctaagaaagttggcggttgggacattgatgggtccacagaaggagaaacagatcaactggtatctggagcctggtccacttgaaaagctgataaaccatttgacacctaatcttgacaagattgcaaagattatccaacatcatgcagtatctgtatgttcttctatatcttgttaaatccagtgtttctctgccgcttttgcttttgttatcatttattcagcatgatttggactttgtcttattttcaaacaggcattggtggtcattcaggatatgcttcgggttttcattgttcgtattgcatgtcaaagggttgaacatgcttctatccttctgaggcccatattttcatctatcagagatggaattttggatcagtcatcaacaagagacactgaagcttatatggtatttgttacgcctctctaagtcgctgtctatgttactgctgctcctaaccagtctcattactctctttcaggtctaccgatatcttaattttctggctagtttattagagcatccgcatgctaaggtcacactctttgcctttacgaacatagttttccttcactttttttttttttttttttttttcaccttaaaagtattcacttcagggattactgttagaggagggtattgttcaactgcttgtggaagttctggaaagatgttatgatgccacttatccaagtgaaaacagggttctagagtatggaattgtgtccgcgtctagtgtgattcagtggtgtattccagctttcagatcgatctcactgctatgcgattcacaagtgcctctcttgtgctttcagaaaaaagagctgtaagtgttttttctgcaggagtgctcaacgttaccttatctagatcacatttatatctaatcgttttttatttatttatattaacttgtacagattggccagtctgagtgcaaaagattgtgcattgatatttccctttgtgctgaagttctgccaggtattttgtcgacattgtagtaatctatgtttatcaattgttttccatatgttattatgtttgtgttctttttataaattgctgcactacggattataaattgtgattgtttatggcaatagattctgagatctcgatgagctcttctaagagatagatagatatctttgtaatatttccttacaaaaaatatgattacgaagaaattttttattttcttacaggtgttgcctgttggcaatgagctattatcttgtcttggcgctttcaaagacctgagctcatgtggtgaaggtcaagatggtctggtttcacttttgtttcatctgttttctggtaccgaagaatctgtatctgaaaggtggtgtgacactaatagtctcagtctcgatcaactagatatgaagaaaaatcccccttttctgtcttgctggatcaagttattgaactcaattaattcaaaagatggtttgtctagtcttgcaatgaaggcagtaaacgttctgagcgtgggctccatcagattatgccttgatggtaaaaggtaactcccagactcttcataatctacagttcttgcgctcccagtttaacacgagtttgataggatttttactctgataggcgacgttgtatgtccacttatattcactgtgtatgtggatagaaaaataatgttcgcgatgccacttagtttaagttggtgtatgcatacagtttagttgatattgttttgttcaggtgatataagcctaaaaattatcaagcagaagatgtgcttagttgcatctgatgctgttcacgtttaaatacttccaactagtatttcaaaccattcgtctaacatatatatatatttaacacatctgtagtctaaattttcttcatttttccagtttggactcgaagaaggttgcagcactaaaatctctttttggccttccaagtgagtttagtggtacagacacttttagagaggaaaacattggtttgattgaacagatggtgacactgttgagttcaatgacttcggggtctgatagttccgcaacagctgagatgaaaccctatttgcatgaggtacggactacctcatacctgctttttcttgcatcatcctcttcttttgttgttttcctcttaacactgactttcatattctttttgtggatttgaaggcatctcagtcgttgctgtcgttgctaaaagacgggaatattgatgatattatctcctgcaaaggtgtttttgtttctcctgggaatcttgatatggatgatttggtttctagaaacattgaagatgatctctatcaaagaggacttgaagacaagttctggtgggaatgtccagaaacattacctgagcgtctgccccagtcatctctccctgcgaaaaggaaactaccaactttggagagctctagcaggcgtgctaaaggcgaaaactcttctgttgacatacctacccaaaattcaattcaacggggaatgggttctgtatcccttcctcctgctcctacacgtagagatgcctttaggcagcgcaagccgaataccagcaggcctccctctatgcatgtagatgattatgttgctagggaaagaagtgttgatacagctggtaattctaatgcaataaccatttcacgagcaggatctagcagtggtagacctccatctattcatgttgatgagtttatggccagacagagagaacgaggccaaaatccctccaccattgtggttggagaggctgttgtgcaagtgaaaaatcctactcctgctagagatactgaaaaagttgcaggtaaacctaaacaattcaaagccgatcctgatgatgatctacaaggaatagatatagtttttgatggtgaggaatgtgaaggacctgatgacaagttgccctttcttcagcccgatgagaaccttatgcagcctgctcctgtcatggttgaacaaaactctcctcactctattgttgaagaaactgagagtgatgcaaatggaagtagtcaattctctcacatgggcacaccagtggcatctaatgttgacgaaaacgctcagagtgaattttcatcaaggatttcagtttcacgccctgagatgtcgttgattcgggaaccaagcatttcttcagacagaaaatttgttgagcaagcagacgaagcaaagaaaatggcccctctaaagagtgccggcatatctgaatctgggtttatacctgcttatcacatgccaggatcttcaggacaaaattcaattgatcctagagtgggtcctcagggtttctattcaaagagtggtcagcaacatacgggccatattcatggtggattcagtggtcggggggtttatgaacagaaagtgatgccaaaccaacctcctttacccttagtgccacctccatcagtctcacctgtgataccacattcttctgattctctttctaatcaatcctccccgtttattagtcatggaacacaatcttcaggaggacccacccggcttatgccaccgctcccttcagcaattcctcagtactcatctaacccatatgcatctttaccaccaaggacatctacagttcaatcttttggatacaaccacgcaggcgtaggtaccactgaacaacaacagagtggcccaaccattgatcatcagtctggcaatctatctgttaccggaatgacgtcttaccctcccccaaatttaatgccatcccataattttagcaggccatcatctctccctgtgccattctatggaaatccttcgcatcaaggaggtgataagccgcaaactatgttgttggttccttccattcctcaatcactcaatacacagtccatccctcagctgccatcgatgcagctttcacaattacaacgccctatgcagcctcctcagcacgttagaccacccatacagatatctcaaccatcagagcaaggagtatcaatgcaaaacccatttcagattccaatgcatcagatgcagctgatgcaacagacgcaagtccagccttactatcaccctcctcaacaacaagagatctcccaggtgcagcaacagcaacagcatcatgctgttcaaggtcagcaaggagctgggacttcccagcaacaagaatctggaatgtcattacatgattacttcaagtcccctgaagccattcaggtttgtaatccacatccttggtaatgaatgatacgctgatttgttttgtttagtagtattacgtgccacagctgaccataattcttaaaactcctcttcaggctctattaagtgaccgtgacaagctgtgtcagctactggaacaacatccaaagttaatgcagatgcttcaggttcgatttgtttacttgtttttatgtgctttttgaaagcatcatcaacctttgtgtgttaattgtagagttactgaaataggttttgttcttgttggttgtgacaggaaaaacttgggcagctatgagaagagagagacttgtcagcaaatacatccctttggcttactagttgcttttcaatttctgtaatgtctaataacatgtacattgtttcagttaatatgtagacaaaagcggtaatcggtatcgctttctgttgttgtttagtcatattcatgtacattagctagaaaagaaactcaaccttcaagttctcaagtcctggtttttttttgtcaaagcaacaagccacgagcataagcttacatttataaccctgtaagtaacaaaacactaatttaaggaattacagtgattaaaatcattaaactttgaagaggccttaaagccccaaaaggaacatttgaaatcgaccccactaagtgacccaacaagttgttaggcgaatgtgaattggaaaaaaacacaaaaagaagaatgattgttctcaagcccagcaaatttctgacacagttcatcaactaggcgttgaaaagatcttgtaccaacgagaatactgtagagaagagagagagagcgaaggagatcgggtggagtttggatgatatcagagttgtccgtagatgcaataggattaaagattcaacgtttagtccacttggaaggagtacaccactgagaatcttaaagattcaacatttagggtactcttctctcagataaatttagcaaaataagaaagatgatgtctttctatttctagggctgagttcgttgtatactaaccaattcgtcgtaattgaaagttgcttgctttatgtactcgttgtttagtgaacttgcatttctctactcaatcgtattcatctctgcactcacttctacttctggttttgctgagtttttgtttggttttcttggtttaggctacaaaatttatgtaaatggatctcatttcttgctctctattcaggtgctgaaagacaaaaaacctcagcttttgctctatggagcctcgagtaagtatatactaaacaagcgacaattactgatttatagttttgtgttaatggaggatttttaattgctgaaatatttctttcttttctcggttttgtttttcgacaggataatcaagccgaggcttcatatacatttggtgatcgatcaagcagtgacatagttgttagactaagaaatgaagaaggtcgtgatgattggatctattgccattccaagatccttagtgagaaaagccagtattttgctgaccgtctctctgataaatggcccacttgcaagattcttgattcacgttactgtgttgaggtcatctgtcaagaatcagactatgatcatcatatcaatctcttaagacttctctatgttgtctctgatgatgtccatgaggataacttgtgtcataatgtgaaaagtgcgttggggattctctctgtcgctaaagaacttagttgccctcagattgtcactgcttgtgtcaactacttggaagctgttccatgggaagaaggcgaagaggaagagattctgcggattgtaccgaggattggatcagaagcagagccgattcttgcccgtctccaaccagttgatcagtccgctgttcttgaaatctttgtatcggcttttaggtttgctacttcgtccccgcctttgctcttgggtgacataaaatcctctgctcaagaacagattgagtatatgataactgaagatgacgatgcaccgttgttgattgctgatgaagaagtcaagcttgaagtaaaacaatgtgtaaagagcctgtttgttagattcttccagtgcctagaagaaatcactttgaaacccgtcgagtctgaggtaatcaacaaaaaggggtcttttaggatggtcctttcagatatgtgttgggtttttcagatattaacgaagatggaagttgttagagattttgttataacatgggctgacatatctgagaagttagttaaggtagttgagcagttggaaacaacagttgtagaggctgttgagataagagtcaaggtcatcgaggtgactgcaaaagtcatagaagcgattggttatggaacagtgatattaccaacagcgaaacggcttcagatggtaaaactatggcttccttttgtaagaaacacaaagcctcttgttgactcaccggttagagaagatgaggagaatgatactgtgagatataaaatcgacggagagatatggcaagctttagaatcttcctttgtatcgataattctggcattgccatctgcagaccaagctgagatattgactgaatggttaagcaagaatgggttgtatccggatttaacagaagctttcgaggtttggtgttacagatcgaaagtcgcgaagagaagattgggtttagtcgggggtgaagaggagaacggcatgtcttaactcatttgttgagctctgaaaccagagagaagaaccattctgttttttgttttgtttgtgtgtgtaggtgtcttttaaccctttttgtgtggtctctgccaaatccttcatattatctattggcagtttccacaaatatgtaaatactgttgacaaagatcttgtccttcttaaatcactaagagatatatcctactaaaagtagatctgtagaatgttgatcacttctggtttctctgctatgagatcaaagaactcaggtccaatagatcttcaatgaataacgctcttgatgataggctaaatatgtttgttgtccatgccattgtaagtgatatccaacaagaaacaagaatttgctcaaaaattgacttccatctatctctcttgattgataatatacttgtattgcaaaattctgtacctgcgcttatattattcatttctttatttagtcattacacactgtctaacgagttagaattttagactgaaaataaatggtaggggctgcgcgaacgcaaacccccgctgccacaaataatgacgtaggctcttcctctagggaagaccttaagcatagcaccctcccggtatgtgcaatgggagtcactagcctaggccactcgtcttcttgatcgcgagttgaccccgtccaggtaagtgatttgctcaaagtcatgactctcttatttataccctgttcccggagcttctcttgtttcttattaacgatgtgggactttttgctaaactccacattttcgtcgttctaactttttgaacatgcacagcgtgtcgtttttatattcgctttctgaatagcttgtcggaaaggtttaatgaaacgctttagttagattctctactgggccggtctccttggtggcccaaagtcaattatttactcagataatatcacgaatcctacgaccctcatggactgggaaatccgccacgtcacagaagacgcttgttttaccacctgcgaggtaggtttcacaaaaaggtttcgtttcttgttaccaagttccacactttccgccgttctcactttgtaaaagtgcacaagtccttttagttttgtttttctgaactgagtgacgggtaggcttacgctaatttatggtgggccggtggcccaaactcaattactactcggataaaggccacagttcgtatccaacttgataagctttttcatatataattcaactgttcttgtctttgttgcacacagtactgcatagtagtaacagtcgaacataaaaagttaaacttcttttttaatgaaaattaatcgcacttgtatcatcatgtacaatgctaaaagtaatgattgaggatcttaacaaaagaaattgaattttctaacaaatctagacaattgaagcaagtgggtttagtggagccctagactcaaccaatggggttgtcttgtgtctagaatcatcttaactacatcttctacaaatgaatcaaaacaagaatagcaacaccctttcatcaggctactaccactactgctactgctgctgctgccaggtgtcatatgatggtgagtacacgtcactggtggcggaacaagatggacttcactgctctcgtgttcaagcccacaagctgccagtatcgtgtgtattgagcacgtggaaatctcgtcgaaagtggtttgacctgaataaagcagaggaagagtacccaaaacactacaatcagagggcagacaagagttgaatctataatgtaactggaaactggaaacaagactataacgggttaaaccaagagcgtgaagagagaattggattatgtgtacctaagtcgttttgactggacaagtttttgagatgggctttaactctttcttgcagtcgttctcctgccatggaagacattgtgtttggcatgtggctgtgtagacgttgttgattactaaccaagggatcaccctgagccagtccatgatggaatcctaaatcgataggtcgctcaccaagaaatgtattattagacaaacgtctgaatgcttcttcacttccaaattcatctaactttggagacaaaagctcagggtcatgggcagaaatcaatgaattgttgttgggtagtctttcctcagagattgcatacaacgatatccctgtttcttggctcgctacaggctgagatgggtcgattgttctgccatgacctatttgtgtagtcacgaaaccatcactcgatgttccaccagttctagcacccatattaataagtctatcaccgttgataatattttgtatgtgtctgtgaagcgtccttcttctggataatgtggttgcccctaagccggatggagaagaaccttgagcatcaccattaggaatccttggagaaaataggttctctccattgaaaaatggtgtacgtggggagactattaaagacacatcttgatattgccctgaaactacaagaggtgacggtctactgtaaaagccactacccctttgttgctcggatataatatgcgtttgggaactagctgatccaagtgcaacgggtctacaaccttcacagtaccagtttccttcaggtacttccctcccaagaccaacacagtacgtatgggcagatgaatcacaaagatcacaaagcaacataagcccatcatcatcaccttggtgacattccgtgcatattatattttcatagggatcgagataactcctcaactcttcttcagtaggttgatagacctgcacacagtaaaatcccatataagaaattttatcacacaagaagtgacatgaaacacatcacaaccacaacataggttaacaaaagtcgataaggtctcatctatcatgcatctaaagcgtctaagtgagaacactgatgttactggcaactattatgtactgacattttaaaccgtgacaagaaggaatgtctattaggacctcaaatatggagtgttgaaggacatactggacgcatttggaaagaaaaccaacaccagcattcatgaggataccagtataagtgatagatcaactaaagacactataggcgtaaaccaagaatagtcaaaacaaacctgatcacgttcaggtacaggtatcacaacttctctcaaatctactccaggtgtagatcttgcaggcttactgattgttctgaaccgctgcttgcagagtgggcagcgagattctactttcgaccactccattatgcaagtgaaacaaaagtaatggctacagcagtccaatgttcccttcaatctccgcatgtcttcctcagacagacaaatcccacaaacgttttttatcacatctcttttcactagctctaccttcttttcacctttcttcacaggagacttacgaagctgtggcaaatccttattgaccgtggtttgtcttatagatgatgcatggttcacactacttttcaacaaactaccggcttctcttatctgctctctttcctcctccgagattgtatactcatagtcggattctccagacgatgcaacgtctgaatctgatggaacggtacaccgacgccttggccttggccttgatgactttgtcttcgccttctttcttgcaggtaagcagtcatctacaaaatcatcatcatcttcatcaactcctttctttgtgtttctcacacgtctctttcttccccttgttaaacgggtttttgcaacagagcatttcttccttcttttacgcccttctccagatcttcgctttcgcttgtttcccttacaaaccttcagtgcatttttgttacatgcaatgatttcttcctcctcttcctcatctaatgagacatcttcatctgcggtaaaatcttcatcgccatcatcatcctcatcctcatcctcataatctccatcatcttccttttctgtctcgtgtgacacattgtcctgctcttccaatgccatcttcccgtcttcaccatcatgcaaagaatttgaatccacattttccacatccctctcttcctcttcatcaccatcctcctctggatagtctccatcttcatcctctatctcatagaaaactctccttcgctttcctaaacctatcctttggtgtttctctccatccaaagacccacttttcccaacagcattccttgaattccttatctcatcatcttcatcatccgcatcatcgagatccacatcctcgttgtcagacacaaccacctggttcgtctttcttgacttacatcccgtgatttttcgattaccacgaggaccagtcttcacttttggccattcaacattcctcagcatcacatcttcctcttccacttcatctaattcctcatcctccaccgcatcagacccattaaaaccatcaaaggatggctcaccgtcaacagatgaggcatactcctccttgagatcagcctcagactcttcttcatcctcgtcggaaatcacataatcctcatctgactcatctgaacccttatccttagatctaacctttctattagaatttctagcccaagacgtgtttctctttcccatatgctcctcaaaataagatatagaaacaaaccactaaggcactaatctaaatctaaactcatcaaccaaaaacacaatgattccttcagctccgtcttgttctaaaaacttatatagcctagaccaaatcacccagaaatctcaaacctcaattctcgaattcagagcacgagatctgcaaatcaacccaaaaacaaacaagaaatcaagaaacgtaattgaaaatcagaaaaggtatcgatttgattccgaccatagaaattctacagttacccaaaattactacttaaatgctagtgtttaaattccgatcctataatagaaatcaaaatctatccaaatgcagaaatcacccctggaaacacataaatttaatgaaaagagagaaaaataaaaagtcaaaacacgaaaaaataataatacaaaattaaattacagctcctataatacatacacagaagaacgagagagaagaacaattagaaaaaaaaaacgaacctccgatgaagaagacgaaacacttatgatttttccactaattttgtgaatcgtgatccttttccccgccttatttttctctctatttacaactattttttttttttttggtaatgagccaaaattggggaaaggtattttgatttggttttagttaagaggctacgcgttggggaggtgagaactttttgtgtaatgactatattaccctcgaccgcttctggtggtagttgcagctgctattgggcttttttgacttttaatatttggtatgattgcgtgagcacgtgagacagctatgctctgtggtcaagcgtaccgtaatgttttgcatcggacggttataatctgatccctggatatttttatttaatgatgaatcagtgggaaataaaacgattatgaagttactatttttagcagatgttgatttgaatgtttcagatgaaaatgtaacggccataaatatttattaaaaaaactaataaagaagaccaaaagaattacatactacaaaaccaggtaaaattttctgggttaccttttcacattttcagttatcttaatgcattttctagtgaaagtttattttatgttttcaaaccagcgatttggagcatggattaagagattccttacctagaataatatttggacgatactaaattttgtaggttttgacttgcatttttgctttatccaaaatttccattgctgttttctattagaaatcatcaaagcccatgttattattcgaccatctgttgttgatgagggttggctcaatgggtacacaagaagagctttgggcctaaggccgacaatttactttaacgaaatttaattaggattcatttcatcggcatatataacttctgccgaagaaaaaacatgaggaaaacgtttcttgatgaattgacggcaaagtaaaagatcaactaggcccgattttatgctatttaaatgtaataatctttactttgttttgcaaataagaaagcttaaaatcagggaaccgaagaaagaagtagcaatcatgatcgttaggtgcattccgaattgggctttcgttaattaaaagtgaaaatacttaagttaggcccagtcatgaaagacgtcggcaaagaacgcaaacatacaagaagacgaagacatttcatggaccataaattatgggaggtagtgcttaatggacaaagactttttactactctctgttcaacgtcaagaagacttggtaaaaatacaagctgagttgattttaatctttgtcgagttcagagtctattattatgtatataaagagattggcatgaaaccatataaccatcacaattcccatttttgctctttcattttaaaggagaagcaaaacctcatagaagtcaatgagtctcattcctattactttttattttctcttcttgttcttttctaattttcgaggtgtttttgctgttcctaatatacacttatgtcatttcgaacaaagagatgcacttctcgagttcaagaacgagtttaagattaagaagccttgttttggttgtccaagtcctctgaagacaaagtcatgggagaatggcagcgactgttgtcattgggatggtattacttgcgatgctaagaccggggaagtaatcgagatagaccttatgtgcagctgcctccatggctggtttcattccaacagtaatctttctatgcttcaaaatttccattttctaaccactctagacctttcatataatcatttgagtggtcaaatctcatcttctattggaaacctttctcatctcaccactctcgacctttctggaaataacttcagtggttggattccttcttcccttggaaacctttttcacctcacctctctccacctctatgataacaattttggtggtgaaatcccatcttcacttggaaatctgtcgtatctcacctttctcgacctatctactaacaattttgttggtgaaatcccttcttcttttggcagtttgaaccaattgtctattttacgtcttgataataataagcttagtggtaacctcccacttgaagtaatcaatcttacaaagttgtcagagatatcactctctcacaatcagttcacaggcacgcttcctcctaacatcacttcactctccatcttggagtccttttcggcaagtggaaacaatttcgttggaactatcccttcctctctcttcaccattccttctataactcttatttttttggacaataaccaactcagcggcactcttgagtttgggaatatatcttcaccgtctaatttactagtgttacaacttggcggtaacaacttgagaggtccaatccctacatctatttccagattagtcaaccttaggacacttgacctttcccatttcaacatccaaggccaagttgactttaatatcttctcgcatctcaagttgctaggaaacctttacctatcccattccaacaccaccactacaattgacttgaatgcagtcttatcatgtttcaagatgctcatttcattggatctctcaggcaaccatgttttagtcacaaacaaaagttcagtttctgaccctcctttgggattgataggctctttgaacttatcaggatgcggtatcaccgagtttccagatatcctaagaacgcaacgccaaatgaggacgctagacatttccaacaacaaaatcaaaggccaagtgcctagctggttactattacagttggagtacatgcatatctccaacaacaatttcatcggtttcgaaagatcaacgaaacttgaaaaaaccgtagtcccaaaaccatctatgaagcacttttttggctccaataacaatttcagtggaaagattccatctttcatatgctcgttgcgctctctaatcattctcgatttatctaacaacaacttcagtggtgcaatccctccttgtgtgggaaaattcaagagtactctttcagatcttaacctacgtcggaatcgtcttagtggaagtcttccaaagactataataaaaagtttaaggtctcttgatgtgagtcataacgaactggagggaaagcttccaagatctttgatccacttctctactcttgaagttttgaatgtagaaagcaacagaatcaacgacacgtttccgttctggttgagttctctaaaaaagctgcaagttcttgtcttacgctccaacgcatttcacggacggatacacaagactcggtttcctaagttgcgaatcatcgacatatcccgtaatcacttcaatgggacattgccatcagattgctttgtggagtggactgggatgcactcacttgaaaaaaatgaagatcggtttaacgaaaagtacatgggatcaggctattaccatgattcaatggttctgatgaataaaggcttagagatggagctggtacgtatcctaaaaatctatacagctctcgacttctctggaaacaaatttgaaggagagattccaagatccatcggtctattgaaagaacttcatatcctcaacttgtcaagcaatggtttcaccggccacatcccatcatctatggggaacctgagagagctcgagtcactggatgtttcccgaaacaagctttcaggagaaattccacaagaactagggaacctctcgtaccttgcgtacatgaacttttctcataaccagcttgtcggtcaagtaccaggaggcacccagtttcgaacgcaatccgcttcgtcttttgaagaaaaccttggactttgtggtcgtcctctcgaagaatgtagagttgtccatgagccgacgccttcaggggaatcagaaacattggaatcagaacaagtcttgagttggattgcagctgccatagggttcacacctggtatcgtgcttggattgaccattgggcacatcgtgctttcctccaaaccgcgttggttcttcaaggtgttgtacatcaacaacagtcgtagacgcagacgaactcgttctgaggtaccttttcccttaacgttttgttctctataacttgaaacctttcaatagaatcaatcgttgcactatcagaattgaattttgatcatccttcttaactttgatttgcaaataagaaatcctaaatcacggaattgaagacgttcgttcgagaagaagaagatggaggaataaagcaggaggatcgttatgtgaattcgaaattgggctgataaaatgggcttgcttacataatttaggcccattaatgaaagacgtcggcgaagaaagcaacgttgtacggagaaagtaataattacaagaagaagacgaagacattcatggacattaatcatggaaggtagcgactagcgagcgcatgcttagtggagagattcctgtaaatttctatcttttttttgtatttttgtattagatgttgacatattggaattgatatgtcggttactgtaataccaaattctcaacatggtttaaccactacatatagaaattgttcaaaaccggttgtgtaatgaaaattcacgtaatttttgctatgcttctatttttttttccatttcgttaggaaaaacaacataaagaagacataccaaaaaaaaaaaaaaaaaaaaaaaaaaaaaaaaaaaaaaagacataccaagacttgtaatgttgacaattcaacgcagagacttttactctctgtatccaacgtaaagaagacttggttgaaagacaagttattgagtcaagccagtgaatttatctttgtggagtagtctattattatgtataaagagatgagcatgaaacccaatattaccatcacacacacatacacacacaaaaaaaaagagttaccaatttccatttttctctgcttttttttgtttcattagcttgaagaacgatgaaagactcttggaactcaacgagtatcattcctttcactttttcttctctcatattcttcttattcacttttgattttcaagatgtctttggggttcctactaaacacttatgtcgtctcgaacaaagagatgcactactggagctcaagaaggagtttaagattaagaagccttgtttcgacggccttcatccgacgacggagtcatgggcgaataacagtgactgttgctattgggacggtatcacgtgcaatgacaagtccggggaagtgcttgagctagaccttagtcgtagctgcctccaaagccggtttcattccaacagcagtctttttacggttctaaatcttcgttttctaaccactctcgacctttcctataattatttcagtggccaaatcccgtcttgtattgaaaacttttctcatcttaccactctcgacctttctaaaaactatttcagtggtgggattccttcttcaataggaaatctttcacaactcacttttctcgacctttctggtaacgagttcgttggtgaaatgccattttttggcaacatgaaccagttgaccaacttatatgttgattccaatgaccttactggtatcttccccctttccctactcaatctgaaacatctttcggatttatcactctcccgcaatcagttcacaggtacccttccttctaacatgagctcactctctaacttggagtactttgaggcatggggcaacgcttttactggaactctcccttcttctctcttcactattgcttctttgacgtctattaatttgagaaataaccaactcaacggcactcttgagtttgggaacatatcttcaccatctacactaactgtgttagacattagcaataacaacttcatagggccaatcccgaaatccatttccaaatttataaaccttcaggaccttgatctttctcatctcaacacccaaggcccagttgactttagtatcttcacgaatctcaagtcgctccaacttcttaacctatctcatttgaacaccaccactacgattgacttgaatgcactcttttcctcgcatctcaactcaatctattcaatggatctctcaggcaaccatgtttcagccacaaccaaaatttcagttgcagatcatcatcctacgcaattgataagtcagttgtacttgtctggatgcggcatcactgagttcccggagctcttaagaagccaacacaaaatgacgaatctagacatttccaacaacaaaatcaaaggtcaggtgcctggctggctatggacactaccaaagttgatattcgttgatctttccaacaacatttttaccggttttgaaagatcaacggaacatggactatccttaatcaccaaaccatctatgcagtacttggttggctccaacaacaatttcacgggaaagattccctctttcatatgcgctttgcgctctctaatcactcttgatttatctgacaacaacctcaatggttccatccctccatgtatgggaaaccttaagagtactctttcatttctaaaccttcgtcagaatcgtcttggtggaggtcttccaaggagtatatttaaaagtctaaggtcacttgatgtcggtcataaccaactagtcggaaaacttcctagatctttcatccgtctctctgctcttgaagttctgaatgtggaaaacaacagaatcaacgacacattcccgttctggttgtcttctctcaaaaagctgcaagttcttgtcttacgctccaatgcattccacggaccgatacatcatgcctcgttccatacattgcgaatcatcaacttatctcataatcaattcagtggaactttgccagcaaactattttgtgaactggaatgctatgtcatcacttatggcaaccgaggatcggtctcaagagaaatacatgggagactcttttcgatattaccatgattcagtggttttgatgaataaaggcttagagatggagctggtacgcatcctaaaaatctacacagctctcgacttttctgaaaacaaattagaaggagagattccaagatccatcggtcttttgaaagagcttcatgttcttaacttgtcaagcaatgctttcaccggccacatcccatcatctatggggaatcttagagagctcgagtcactggacgtttctcaaaacaagctttcaggagaaattccacaagaattagggaacctatcgtaccttgcctacatgaacttctctcacaaccagcttggaggtctagtaccagggggaactcagtttcgtcgacaaaactgctcttctttcaaggacaaccctggactttatggctcttcacttgaagaagtttgtttagatattcatgcaccagcaccgcaacaacatgaaccgccagagttagaggaagaagacagagaggtgttcagttggatagcagctgcaataggattcggacctggtattgcctttggattgacgattagatacatactggttttctacaaaccagattggttcatgcatacctttggccacttacaaccctctgcacatgaaaaaagattgaggagaaagcaataaaccaaagtgcaactatggattggtttagatttctgttattgtttattgttcagtttggggtgttcttcatttactctgtttttagtcaacttttttttgtgtttacaattagtagaacaactctgtttagtcaacttttatgtaattgagtaagtctgtttcgtacctcaaatacattgacacgaaatgtattggcactcaaataaagaacaacaacgtgtagagtcaaacaaattgcaacgaatgaaaactctaatcatcaaactcgtaaaccttctcgcaaaacgagctgaagaacaatctaattgcagagtgtgaaatgcacttaaaaaaaaagaaaaaaaaaagagggtaatctaaaggagatatgtcggagaaaatctgataagcttggagaatcggacagcgaatgctttcatcttcgaggataagagttgaacaaaagaaaacacaggaaagtttacttcttctgaattggtgatacaggcgagggagagaagaaggtatttcgaagaggaagaagaagatgggccaacccgacccggatttggatccgtttaacatagctcgtggtcaaccggtctggaatactccggtacaatcaagagagaaccatgacatgtctcagcactctccatcacgtccggttagttggcaactttcatgtttatagtataatgggcctccttggcccaatattctcgaaacattggactattggagtttctcgtcatcctcaaagcaagttattgggaggtgactcaaaatcacgttcttgaaaaattttccgagttaaaaagttaaacctttatttaattctccaatttgattttcgtttatatttctggctttcgtcctaatgaatatacactagatctcacttgtttttcttcatgtacgtaatcatttttgggggtggcacgactaatcattgcttgagttgatcttgatccaaatcttaggaagataatgcgcaattaattgaattttcaaccaaaaaatggacaaaaagactatcgccttgtaatgattgcaattatgatgcttctagtcttctagatactgtatcaagtatcaactggataataaactatttatcattttcttacaactaacaaccaattaaaagccactcaacatactaacatttccatagtccactccaatgattattgattattatgattaagatcagatgatgttctctatggattaaaaaaaaaaaactagcaataaaataacaagaaaaatggtcatgttgggactgggtgggagtggaacgagaggccacggcacacaaagtcacaaagaaagtgtcattatccggtgcaccgtcccacatgcgattgctggtaaccacgcgtcaatcagacgaatggcatgatccttttttagattgtgctcgctaacatggaccctacaaggaccgaactaatcaatgtggttctcacgtgcctcttttgccaattttaacttttctaacgaaaaaaatattactctgaaacctccacattcaattgtgatatgaccggcgtctggccctcaaaccgaaaggctctcctctgaatcctttgttgctctgtcccacgtgccagaaatatcatcttaaatatggtggtctttcgcaaccctgaatggcatttgtggtaattagttctaaattacgtgagacaatgcaaagattttgttttgcaccatcgttgccgaccacatcaaacaggtcatcgctctgggtccactcaccgctagtccgctatacacttgtgggaaaaggcttcttgtagtacagtttcgtcacggcgtcttattaattgcaaatctgtgacgttacggttttcgattcgggttactattttaatggaaatcttttgataatagctagagcctagagtatgtaaccctaaggttagatggtaataccgaatctacctaaatttttgttattttcggtttttcatgagatatatagactgcgtaatttaaaatctcaaaatttggtttcactttatttttatttttttttagtttcgaggtaggtatacaagcatggaccttttgacattatttaaaattttcataatttagaatcttcatgttaaacgtgtatggctacgatcttcggaactttattcggtttgtatgctcaaaggccaacgccatttattttctaattgattttttcccgttacggaaacaatctttttgcattattgaacttaattaccaaagtttatgaaaagaaacaataaagtctaaattggcctattttgatatactgatcacttacgcgaaaacatctacattgttatctactagactagtcattaactcgaagatagaatttcatttcttgaccaaaaaaaaactcaaaagatagttataatcacagattcattattgacttttgcttttaacactgtagccatttatgtactatttatacaaatacctaacttttcaaatttgtgatatttttcaccctacattttagcctataggttggatcattttgtcatattgcatcactgtttactagtaccaaacttaaatatcacacgagcagtaaatttgctatcaattttttcgttttcacaaacatatatctagtttccctaaccaataattaagttaaattgcattaggaatttaggatttataataaatagatatataacccactaacgacaaaagactatgtcttgctacgtctctgcctttattatcatgccacaagaaaataagaggggaacagagggagaaccccataaataaataaatttagagaaatatctaagtttggttcttccctgtgtctacccaccgtgatcatcataaaatggattgtgatttctgatttgtgagtctatctttctctactccattagcttcctctcccttggatggttacgtcactttctccgagcttacgtcatctatatccggtcttcacttctttttccttccattcctcagcagcattgcgtaatctatctggtgtgtgtgtatcacgtcacttcctcctagtccctctctctgtacgttcttgttgtgaaattgatttactttttgaaaacatttttggtgcaattcaacaatatttgtttcacagttcttattttatttttgtagattaaaaagcttaaatttcaaaaacaagaaaatcttgttttcacaaaaattaggcaaagggtttccaatttccagattgtttaacttgattttcaatttccaatttccgaatcttgcaacttgatttctataatgataagttatctccaaatatgttttcttaaaagagaaaactcgatttgacttcaagttgagatcatatccattattattctctatattacgtacaagttattatatattttataactctagaggaatgttagagcttgtgttaatggaattccaagtcagatatgaatattctcttataatcattattgtccttataactgttttaaatacctcaaatttatattttatcccctgtttttttcccgggaaaacgaatctcaaaaaacgaatttcctactttgacattattttatctccctcttgctctttgatataatgcaactatctgaaactctatgaatttatcatttacagagttcaagatcatatgatattttcactttctggacaaaatgggacatttctcttccatgttcaacggtatagctagatccttctcgatcaagaaagcgaagaacatcaacagcagcaaaagctacgctaaggaagccacagatgaaatggcgagagaggcgaagaagaaggaacttattttgagatcctctggttgcattaatgcagatggatctaataacttggcttctgttttctctagacgcggtgagaaaggcgttaatcaggactgtgccatcgtctgggaggtacattacttctacaaaaagttatcttagagctgggttatttggaacttttgcagtctttggcgtttacttagcacaattcgcttcgtgtgcgtgtgcctctagcttgttttggatgctcctctgtatctagggttattatcaccagtccaaagatcttaagtttaacgcattatatgcttctaccgttgattttaagttatccgatattacggtctttaaacactgatttgcgaatatttgttcatcatgttttgacaatttctgaaacagggatatgggtgtcaagaagacatgatattctgtgggatattcgatggacatggtccctggggacactttgtttctaaacaagtcagaaactcaatgcctatatctttgctctgtaactggaaagagactctttctcagaccacaatagcagaacccgataaagagctacagcggtttgcaatctggaaatactcattcctcaaaacctgtgaagctgttgatctggagcttgagcatcaccgaaagatagattctttcaacagcggtacgaccgctctaaccattgtgagacaggtaaatggagcatcagattcattacctcatatgaagaaaatcttgtaaaaaggctactctgttcattaatccttaagtggtttcttgctacagggtgatgttatttatatagcaaacgtcggggattcacgtgcggtattggccacagtttcagacgaaggaagcttggtcgcggttcagctcaccgtagatttcaagccaaacctgcctcgttagttccataagcataaataaatcatgtaaatctcagtgcatttagctaagcagttctgaatctttatctttcaaattttgtttcttattaaaacagaggaggaagagcggataatcggatgcaacgggagagtattttgccttcaagatgagccaggggtccaccgtgtatggcaaccagtagatgaatctccggggctcgcaatgtcaagagcattcggagactattgtatcaaagattacggattggtctcagtgcctgaagtcactcagaggcatatatccattagagaccagtttataatcttggccactgatggggtaagaacatttgaataagcaactttgttttgttagtttatattggcagcgtagtcatgtaattgaaacattataggtatgggatgtgatatcaaaccaagaggccatagatattgtttcctcgacggcggagcgggcaaaagctgccaagcgactggtacagcaagcagttagggcttggaatagaaagagacgcggaatcgccatggatgatatctctgccgtgtgcctcttcttccattcttcatcgtcgtcgccatctctatagcaacatcttctccatgccacgacctgcaagtaggtactagtacttttggaccgggcaagaaaagaaaaaatgctgcaatgtagatagacttgcgtaaaatcgcattgaatattactttcttgccaaaccagagtcctatcacaatctaaagaacacaattggttacttgtaattttaataatcatttaaaaagtgggaaacttcttaagttattatgaaacatgtgatgaggaaacaagcttttggaacaagaatcaaacatatatcaactccaaagttgtaagaacatatccgcaattgaagatgtattgtacagcttgaggcacataaacattatgatttacaagaagtgtatactatacacacacatacctctgcgaacctaggaagcaatcaaatgaatttcttctttctatataactaacatctctatacataagtaacgtgtgagcttaggtactctattaactgattaaagagaactgggcgtacaataaatagtggttagtggaagacttgaggagcagtgtagaactcagattcgttgaaacctggtctgagatcttcttgatcacacatgaactgtaatgggaagcacacaaggttccctcttgtctccttcagaatctcccacgagtcgctgccgcatgattctagcctctccggtgcaatgccaaggtcgatcgtagtgtgacccaacttgtctttacaaagagccatattgtgtctcaatgcagctctgtgtttagaaagacaaagtcagaagcagatttgatcatctctcagttgcgtttaaaaagccaacgtagttacgtatctttaatcactaaagttatggagatttagttaaaaagggatgacgtatgaaccttgagcgtatatgttcattcgggatgcacgagaagacttggttgtagatgtccgtgtttttcttagctgttgccatccataagtctttgtatgttgcatctttgattggatcttcgatcttctgaatctaaacacaaaaaacaaaatcaacattttcaaattttctatggaggtaacggtagttaaaagaagctttcagctcaaggaatcttatccaacggaaataggataccaagactatcagagaacagagcaaaaacaagtaaaaatactaaaaagttttcggctatatatactcaaatgaaaataaaggtttctgaagtcaaaaatgtatagtagtaggcgtttctagaaattttttaaaattacctctccggcgtgaaggccgagatgctctgaccacaaggaacatctaagactgtaagagaacttcccggccatccacttcattccgttcatcgaagattccacgaattctttgtcttcaatcacaacaccgatctgaaacatgattgattcaaatgaatacataactctgttttgctgcaataaagaatgaattggatttttgaaagtacctcagagtctcgtgaacctagtaagctcctatcgtttatattagaagatccgatcactgcgatccggtcatcaacaatcattaacttgctatgcacgtaaatctggctagtggcaattggaccgtcctcaaacagccgtccgtacgatctcaaaccatagaaagagatgtaatcttgcgtcttgggaccgagcaaagcgttaaggttgtcaagaatcgaagttccttctctagagatcgtacggtattgccaatgcatcagtgctcgaaccgtggctgctccgaagtcatcaatacctccctgttttatgtcgacacatcatgattatactctgttaacaatttgtcaatttgtaattgagaagaagcaaacagtacctgaaatccagggagtagcggaataacgatcacaacgcggaagcacttgttctcttcatgagccttcagaatgcgtctgtataacgcttctagaacgcggtttaggatcgtgtcctctttttctagcccggagatgaagaattggttctgttaaacaacaagattaagagattagaatatagaaccaatctgaggtgtagagattttgtataaaaatgtttgaatgattaatttatacctctatgtagataaaatgttcagcgttctggataagcgaacaataagctctatgaatgctatcttcaggctggctcgtcccagcagaccattggctaacacttctgattatttgacaccggcaatcactctgcttcccaatctgccaccaccagtcgttcacagcctcgtccagatcgctttcctctgaagtttccccaggatcttgtcttgcaccgctgtctaacttcagatctcctctgccggcgaaatctgcatcggtttcttgtgggagaagcaaagggatttcttggggcggtgaggcagaagagaaagagtcatgtctggcaagaacgacaggtttgtcagggtcttcctctggtttagccgctgcgattatatcgatctctctagttcccaagtagtgaggaagaaccatgtggtggtgaggcatcaacaatggaatcgtctgttcattaggtgccttgtttctctaatataacaaagactaaaatatatcagaaccatgatttccaaatgcaaacactaaaaactgaaatctctctaccttagagtggttccaccgctggacaaaatgtcgagccacatcccgacaaggcggtccccatagagcgcagtggacatcgtgccacggcattcgcgggtactttctcctgtctaactcatctttcatcgtttcttcccacgaatttggttcagattctctgacaatagaagcaatttgtgagaaagatgattccttttgttagaaaagataataaaaagttcaggatattacctaggattgtagtaatcttttccaggccatatataaggagggcaatctccaatcttgtgctccgctgtatcgtaccgcccaaaacagagatctaaccctccaatgaaacaaacttggtaatctacaatcactattttctcgtggtgcgacctgaaaaaaccacagaattcaaatttagttatagctaagtagttgttaagtaaatccctgaaacgatgaaaactgtaccagaggtaaatgccggaggagagatggtctggataacgaagaactttgacgttcttgtgaatgttttgaagccgtttcttgctgtacaagctgttgattttcagcgcgatttggacttccttatacagaagaatatatatctgcaacaacttttaaatttttagtgtacgcttacataagaaaacaaatcgaatcctttcgagagaaatgtaagctcattacgcataccttaacgccctgttttgcttttgtctccagcaatgcatcgagccgcaatgatggatgatcttcaaaggggcgtttgagatatagctccggacataaccaccaaccagtcataaatatctgtagacgaaattttagatttaaaactaagatattatatggtacgattctcaaatacaagttgaggcaaagaaatggaacctctgatgttgcgttttggattgcaaacgcgatagcttcaaacgcagtgtgaccgtctacgaaccactgtgcctggcttccgtccgatgtcaagcctctaggtggtgcaaacgaaccaaaccgatgtggactgtaacaaccagcttcgtccacggccttaacccactctttaactttcctgctgctcgttgttctcagcctcacggttcggtccccactagtaactttaaagccaaaacgcaatgggttgtgttccttcacctgttcagccaaacgcggttgttcagaagactctttagtaccttgcaaccccaatgtgtcgaacaccattatatctagaagctttccgctgaatggatcttctagtaacgccaaaaatcctggtttcagaaccgcccaaacctgaaaacattcaaaaatgcagaaaatcattcatctgagcaagaaaaattcagaaactttacaaaaaccccgagttgattttgaccaaacctttgtccagctagttccgaagaaaccgagacagtgtgtaggaagacagcatcggacaccatcagaacctgggacgtccctcaagtgcttcactgtgacatacccttctttcatcttggaaccgtactctctagcaaatgagagtctagaaacttctaggaacttgcagacctgtgaatacgttttaagtgtgacgcaagaaatctaaaaaccacaactagaaaagtcttagtcatcgccagtgaaaaatctcaaacctctttggagtttacaatgtccaagttccctagaaagagactcaagtagccttgcattgcggttctcccacgatctacaactgtctctgaccggcctatcgttggacgaatgattggaagcgctgcacgggaaggaacattcctgcataacataaatagctactgtttcagaaatttaaacgaaacaatttttactttgaatccacaaaaccgaaaagttttatggcatttaaaagcacctgttcttgatactatcttcagtatagtgcagaggaagagcaccatcgtcaggttcttcatcatcttgcacaactgatccttgcatatcaaaaatccccaagctgtgtagccactctctaacctgtcgaaaaccgcatctctggagttcaataattatttgtttggcttgtgttagtagcaaatctgcaaagcctgaacattctgacctgttcttgcttgtcgtgaagttcttcaatgatcaaacgtttcttcaacgcaaaatgtaagtacagaacttgagaagccttcttttgtaatgtccacttgaactatacatataccaaaaacagagaataccaattaaaaaaggtctttgtttgttactaataaaaacagaacataaacttttagagaaacaaccactagaaatttcatatatgcatgaataaacttctttagcaagaaattgaatctcttaatggcatctctttgtcataaatttcgtatacatagacaaaatcaaaaccctaatcacaatgtaacagagaggaaatcaagttcttttaaaactacaagtcagacattgtaaactatatatatacctgtttatactgaagctccaaggtgtaagaaagaagcaagggactaaaatcggtggtgtcaggtctcgagaccgagacgatcgcagccttgggaagctcgtcgaatatttgacttccaccgccgagagaagaagaagctgccgccgccgcagcatcagctctggtcattctgatgactccgtctgacttaacgccgttaggaagtagtaatttatccgtcgacatcgattaactccccaaaccgtcgtcgaaactcgccgttcacgattgcatgtccgaaatactcgagattccactgatcaataaatcgacgttatataggtgtctattgattttagattttatttagaatataaggtttaaatcagtctgtcaaatagtacattcaacggcaaagggagtggttccgtcacgttaggtttaacgaatgaccgggttgcgtttcgagatgatgacacgtacgattattgtcacgtgtacgtttaagatcgagggtatgtattaactcccgtctaccctgccgtgtatatgcaacttggttacatcgtctccaaattggacaagagctctggattgtttaattttttaactgtcccagactaagtagccaaatgacgattttacccttaaacttttccttgctaaaaataacttttttctctttttcgtatcggttttcagaaaaatggattaaaaacgatgtttcaataaataagaaaatcattttcgcgttggcatgaatttcattttaaattatttaatagatgttaagattgaataaactaagaaaaaaaattgaataaactttagaaatgtcatgtaccgaacattcgccggtaatttccggttctgttagtatggactatggagggataattttgtattttgctgatgcaggagttgctgatgtacgaagtatatgccatgcaagcatcagacgacaagaatatcccaattttttggtgctttgccagatcagaatattcccaaacacacttatttaattcttacaacatgtgtgatgagaaaaaaaaatgatttgagtctccatctccacttttcttcatcccttaagtaaaccataacaaaaaatactagtcaatatgattttctttcaactatttattttacagatataaagtacagtccggacaattaaaatatagcttattcaacatagttactaaactaatctgtctacacaacatatatactacctttccatcaaaaaaacggaataacaatttttggatctcgtaaaagttgttgttcatctaaagcaattcgcaaatacaattaaattatatttaagttcatagatattagtatcaaacgatcaaccagtataaaactaatgtatattaaacagaacgttcagtgaaattattatccagattaagatacttggtacgaaaatttctacaataatttggttaaaatgtttgtgaatggtactccaaaatggcacaatgttgcctatttgttataatgtttgtgaatggtactttctttattcatgcccataaataaaggttggaaatcgcaaacccaggtccaatttttaattgggctgatatttcaaaaattgggccttaataactaatatgttggctccacaaaaccatgaaccggttcaaagaataccggagctccagtttctacaaaggcaatggactttagcaagtgaagccatataatcatcagacctgaaacaaatttgggatgaaaagtatcaaaaacactagaccatcgaatcactttataactgctaccaatatgctataggggttcaaacctctgcccatatggagatccacaagccgcggttaaatgaaactttgcgttttctgatttaccctacaacaagaatcagacaagtaacttaaacaagattactcaaggattgtttgtttttgaatagcaataggccaatagatgtcaatggagattgtcttggataaattcaagatcaagagcttacctcagcttcatagtagagccctgcgtacagagaagcatagaagtattcgcttgcttgaccgctagagaagtcatttactaactgtatttcaaaatcagagtattaagatcgtttgatggaaataaatcaatgatatcaattatcaagaaacatgtctcaaaaccttttcaggatcaccaccattcttgaatagattataagcttctcgcatcacaggccgagaatctctaccaacctacaaagaattctttctaaaatctcatatccggctttattactgatcatggaatggtaagctttaacataaggaaaaacaaacctcgagaaactgtgttcgtgcaacatcaacaccatggagcctcgcctcgcagataaagcaccaaatggactcctctgtgtcattaggattctgagcaacatctatccggaactgctctgcaccttcttcaaacctgttggatatttcatcacttaatatgagaccaaagtccacaatagaaacaagcactttttaaaattttcgacagtggattcacagtcttctaagaagaaactcaaatcctaacaagagtcagtgagtaggagcttgtacctatctacatagtaaagagaaagcccgcgttgccaaagatctgtcatgaagcaaatgttagtgttcccatgaagcaaaaacaataaagattcgactgaaatttcaaagctttatagagagatcgtgttatgagataaaacgtacatgccttttgcctgggatccaaaatgattgctctatcgaactctgccaccgatccagcaacatcaccctttaacaaaaagcatctcgaataggatggtcagattcaaggatccaaaattaaaaaaagagtcccttatgttagaaaagttctgtttgtcggaattttccaatttacctgtctgaagagctgcattccgcgtcgaaccgctgcgatggcctcacgagggttcgaatctccgccgccggttatggcatcccatatagaggaaacagaaggaaggaagagtctacgagacagtgcgtgaggtgggtggcgggaaaattggggacttagggttttaaaaggcgagatcgccgtgaaacgccgtggaattgtgcgagatggatatatgattggattcacgatctgggttagtgacattttccgcggaagcagaagaatttctccgaatcaccgcgacgattacagtttctctagggattaacggatttctcactttaccagtaatcgcagaagataagatgacaaatgggagggaaggaacgtagcggtaaaatccggataatcccggtttatttaatcactttgatgaaccaatgggttaagaaaataacaagaaagtaataaaccgatgtaaactccaaaagctcaaccggttgttctcccgtcattctatcggtttacttgagattgcgtcggtttcaatctgaaccgggtaagattagataatactgtaactgtaccggtgaaagctatttggaggctaggagggtgtgtaaaagtcgctagaactagaagcagaatctagtttagagagcattgaatgagagatttgaacaatgaagaaagaataactttggcttgagaaaagagtaacaaaagaaggtaaaaaattaaagtttgaatttgttcctacagttctcaaagaggcaaagaacatttcttcaccaacaatcaatacctaaacttccctagtttttttttctatatatggctttcactctttcatcttttctttttcttttgctaacctaaacaaaaaaaccaaacttatcaggaaaatggggattaccaccgctcttctcttagttatgcttatgtccgttcacacttcctcgtatgaaaccacaattttaaaaccatacaaagaagataactttcggtctcttgtcgcgaaagcatgccaatttatcgatgctcacgagttgtgcgtctctaacatctggacacacgtcaaggaatcgggtcacgggttaaacccgcattcggttttacgtgctgcggtaaaggaagcacatgacaaagccaagttagcaatggaaagaatcccaacggtaatgatgttatctatccgttcgcgtgagcaagttgccatagaggattgcaaagagcttgtaggcttctcggtaacagagctagcatggtcgatgctggagatgaacaaactccatggaggaggaggaatagatctagacgatggctctcacgatgctgctgcagcaggaggcaatcttaaaacctggcttagcgcggccatgagtaaccaagacacgtgtctagaagggtttgaaggaacagagaggaagtacgaggaattgatcaaaggtagcttaagacaagtcactcagcttgtgagcaatgtcttagacatgtacacgcagctcaatgccttgcctttcaaggcatctaggaacgagagcgtcatcgcaagtcctgagtggctcacggagaccgacgagagcctcatgatgcgtcatgaccccagtgtcatgcatccaaacacggttgtggcgatagatggaaaagggaagtatcggacaattaatgaggccatcaacgaggctcctaatcatagcacaaagcgatatgttatatatgttaagaaaggtgtgtataaagaaaatattgatttgaagaagaagaagacgaacattatgcttgttggtgacggaataggacagacgattattaccggtgaccggaatttcatgcagggtcttacgacattccgaactgcaaccgttggttagtattgatattttagttaattaaatcagtagttaattaattgattgattaaccttttttgtacttttcttcctttttggtttttgtcaaatttttatatatattagtgtgtctgaaaattagaaaagcatatatgctttctgcaatccgcaggctttcaagctttaagttatagtttttttcttctcataattcattcttttcttgtgctacaatatctaatccattacttaattgattgatcaatcttttcattaccttttaatattgttttggtcaaattttgtttactattgtctctgcaaatcatggaatattatatgcttttgctttctggaatctacaaactttcaagatttttacttttcttataaattatccctttcttatgttacaaataactactttttcaatatgtttttgttacttatgtatctaattaacatgattgaccattaattttggtttgatcagctgtttccggaagaggattcattgcaaaggacataacattcagaaacacggctggtccgcaaaaccgtcaagctgtcgcattgagggttgattctgaccaatccgccttctatcgatgtagcgtggaaggttatcaagacactctttacgcccattccctccgtcagttctatagagattgtgaaatttatggtacgattgatttcatattcggaaacggcgccgcggttttacaaaactgtaaaatctacactcgggtcccgctaccgctccagaaggtaacgataaccgcgcaaggaagaaaaagtccaaatcaaaatacagggttcgtaatccagaacagttacgtgctggctacacaacctacttatcttggccggccatggaaactttactcaagaacggtttacatgaacacttacatgagccagttggtccaacccagaggatggcttgagtggtttggtaattttgctttggacactttgtggtatggagaatacaataatattgggccaggttggcgatcatcaggtcgggttaaatggcctggttatcatatcatggacaaacggactgcattatcgttcaccgttggatcgttcattgacggtaggagatggcttccggcaacaggtgtcacattcaccgctggtctagctaactaattcaaaaaattttattttaccagaattattttagaattatgttattaatttaatcggttgtcatctatataatattcttgtttgagtagaaaacaaaaatcatgaatgtatagtgtatgtcagtatgtgtgtttaaatttataactttataaaaataaatggaaattatagactgcctgattatgcatctctgtaaatcatttaattttattcgtatctgatttaatttcattgattaatttcgcagtgatcgaaaaatatctccaaaaattccctgtcattttatccgtagatcttgtttgaaattttgagctgatttgaatcggacggatgaagaattataatatatgggctattggtctgccactaacttaaacgacttatttaattacgagtatccacgtacatcaatgtatttgtcattttcacacaaattaattcaaaccttacgtccggttaccaaaaaaaatatatatcaatttgaaacgaaaaaccaaagatcatgtataaatacacatacaattatacaaacatctcgaagtaaacttgtaaacatcaaccctgattaggacttagaggtcattcattacactttcctttttttgtccactctttctcatttttttatttttttattttgaatggatgggtgattttgctttgaagacattgtattatgcggagttcaaaaataccggacctggttcagaattatcatgtgattaatgaaactgaacctgtttggttcactgtctcgaactttatagttggagatagcttgttgccgaatatgggaactttttgtgtgtttatgtctctacctctgtgatctatatgaatgtggttgtgatcaaaattagaaagaatggtacatattgcataaaaataaatatatctcttctaaattgactagttaggtcatactatttgtcaagattcgtcaagaattaaatttactattcagtgcggtgaaaacggacaatattttcagtgtatacaaatgatttattttattttattttaagaccagagattgtttttaatcataatctaccaaaaaatcattataaattcgcacattgatgtatctagaattttaatatcgagaaaagggttttgataataagcaatgggaaaatcactatctttcaaaatcacaactgtaccgaatggtatgttaattagtagttaaaaaaacaaacacacaattaagacactgattaatccggtggagaaaagaacaaacaaacaaacaaacaaacatttattgaatccctaaaataagattaattattttccctaattagaaactcataaggaaacagagaagaccataaaaccacaagcctattttttgtcttttcaacagtttctcactagccggatttcccgccaagccttagaaaacagagcaaccaaaataacgaactcttaatttgtcataaccgttataaataagccatctagacaattatgaaaattgcacactcccaaggaggctacgtaaccttcgacggaggagtccataaaactcacattctcatttttttctcaaaagaacaacgaacagctcttatatttttttacaataattcttcagagctgtttaagttcaacaacaatttgattaagagaaaaccacataaatattaattagtgtaacgaaaaacacaaaacaaatatgtcgtacggatacgacgatgaatccaagaggaagaggaggtacattgttatcaccatctcctctgttcttttgatctcgatggtggttgcggttaccgttggtgtcagcctcaataagcatgacggtgactctaaaggtaaagcagaggtaaatgcttccgtcaaggccgtcaaggatgtttgtgcaccaactgattacagaaagacttgtgaagacactctgattaagaacgggaagaacacaaccgacccgatggagttggttaagactgcgtttaatgttacgatgaagcagatcacggacgcagctaagaagtcgcagacgattatggagcttcagaaggattcaaggactaggatggcgcttgatcaatgcaaggagcttatggattacgcgttggacgaactaagtaactctttcgaggagcttggaaaatttgagttccacctgctcgacgaggctttgatcaatctgaggatttggcttagcgcagcgatcagccacgaggagacttgtcttgaagggtttcaaggaacacaagggaatgctggagagacaatgaagaaagcgttgaagactgcaatcgagttgacccacaacgggctagcgatcatcagcgaaatgtcgaattttgttggccaaatgcagattccggggctgaacagtcgtcgacttttggctgaaggattcccttcgtgggtagaccagcgtgggcgtaaactcctacaagctgctgccgcatattccgatgtgaagcctgatattgtggtggcacaggacgggagcggtcaatacaagacgatcaatgaagcgttgcagtttgtccccaagaagaggaacacaactttcgtggttcacattaaggctggactctacaaggagtatgttcaggtgaacaagaccatgtcgcatcttgtgttcatcggtgatggtcccgacaaaactatcatttccggcaacaaaaattacaaggatggtatcaccacctaccgtaccgccactgtcggtaagatatatattttggggatttttactcgttagattacaaagtcttagaagtcatctatgtaaaatgatgaatgtaatgtttattgcagccattgttggaaactacttcattgccaagaacattgggttcgaaaacaccgctggggcaataaaacatcaagcggttgcagttagggttcaatcagatgagtccatatttttcaactgtagattcgatggctaccaagacacgctctacactcactcccaccgtcagttcttccgtgattgtaccatttcaggcaccattgatttcctctttggagatgcggctgctgtattccaaaactgtacgttgttggtgaggaagccactcccaaaccaagcatgccctatcacagcccacggtcgaaaagacccaagggaatccactggatttgtgttccaagggtgcaccattgccggtgaaccagattacttggctgtcaaggaaaccagcaaagcctatctcggtaggccatggaaggaatattcaaggactatcatcatgaacactttcatcccagattttgttcagcctcaaggatggcaaccatggctcggggacttcggcctcaagacattgttctactctgaggtccaaaacacaggaccgggatccgcccttgcaaaccgggttacttgggctggaatcaagacattgagcgaagaagatatcctcaagttcacaccggctcagtacatccaaggtgacgactggattccaggcaaaggtgttccgtacactacaggccttttggctgggaacccggccgctgcaaccaccaccccaagcgtctcagctgctgctccaggtttctccaccttcacggatacaagtggcgctgactcaattgctccaacagcttccccagcagcttccccggaaagttcaattagcatggcttacacggggacagcttctccggaaagttcgattaaggtgtcttcttcaacggagacggcttccccggaaagttcatttacggaggcttcaacggcttccccagaaagttcaattatggtggcttcaacggagagctctggttcgtttttttcaatgtttacctaaaagattgattaagatggcataaaatgtgttttttctttactctaattcaagcaaaacctgaaaggaacaaaaatatttgcacaaccttgaggacttcaggattattggtattccaaattgttgacattaatgtttagctttgtaaactcatgtttaatatatcagtatattaaaatgctgtttataaatctattattattaactagtgcatcttgtaaactcatttatatgtagaaattagttcattactatgcgcgagctgttccaaagaatttcatgtgtcatctagtactaacaatttcctatacgaaattaatattcttatataaattattgacacaaccctcaatatataatatttatatatgaattgggacaagtttatgaaaagagaaagttggaaatagaagaagcagatcaatagtgaaaggtagtaaaagaaagtagttacaactaacctcatttacttctctgcattcattttagctccaccctctcatcttttaagctatagccaaatcatcttattctatacgtccattggaaaagttagagattcttttaccccaagttcgaatccgaaatctagccattaaatttgcatatgtactttcgaaatccgttgctattaagttttatatttcttagaaaaagttgatcagaaacaagttctttttaactctaaataaatatctgaagatctaaaattctaaatatatactcctatttgttatcataaagtttgaggcaataaaagaaaggtggttcccaatatatgcatgcacacaatcgcaactacccactagactacatttacttctctttacctccaaatggttactcgtcttcaccaattggcaagctcaacattatagatatacatccatctgtttattagttttgaaaactaaataaaagcagcgttataattgtcttttacatattgtgtttgatatttatttttgtgctgggtttcaatcaattttccaccaacttatcttaccatttaaaactagtattcatgctatctaaaaagataggtaaatagaagtaatattaaaagtaacttccctttggattctctatttatatcacttccaaattgattccatcacacatcttaaaaagtaaaaacacattcatctatccaacaaaaaaaaagaaaggagaaatggaaggaatcgatcatagaatggtgagtgtcaatggcataacaatgcacattgccgagaaaggtcccaaagaaggacctgtggtgcttctcctccatggattccctgatctctggtacacgtggcgtcaccagattagtgggttatcatctctaggttaccgcgctgtagctccagacctccgaggctacggagactctgattcgccggagtctttctccgagtacacgtgtcttaacgtcgttggggacctcgtagctcttctggacagtgttgctggaaatcaagagaaggtgtttctggtcggtcatgattggggagccattatcggatggtttctctgtttgtttcgacctgaaaagattaacggctttgtgtgtttgagtgtgccgtatagatcaagaaaccctaaagtcaagcccgttcaagggttcaaggctgtatttggagatgattactacatttgtagatttcaggttttgcatcttgatctttctttattaaccgaccgtactaatcaagtaacatcgacgaccaataatctcttatccaataaaataaaaccattcaattgacattgtttggttatgtccaatataatttcaattttgtttaaacaatgtgaatttgcaggaaccggggaagattgaaggagagattgcaagtgcagatccaagaatatttctgaggaacctcttcacagggaggacactcggtccgccgattttacctaaggataatccctttggggaaaaacctaaccctaatagcgaaaacattgaattgcctgaatggttttctaagaaagatctcgatttctatgtctccaaattcgagaaggcaggatttaccggtggattgaactactacagagccatggatctgtaagttcttagtatatgaatgcgtattttagggtttgggttaatttgttattggttaatatatcaggaattgggagctcactgcaccatggaccggagctaagattcaagttccagtgaagttcatgacaggtgacttcgacatggtgtacaccacaccagggatgaaagagtacattcacggtggtggatttgctgcagatgttccaactcttcaagagatagtggtgattgaagatgctggtcacttcgttaaccaagagaaacctcaagaggtcactgctcacatcaatgacttcttcaccaagcttcgggacaacaacaaaagcttttagagttctcgtttggttctattatgttggctctcaaaacaagttggttcttgcatgtgttgtttcgacaagattttgaataagacttggcattatgaagctcaacgtgtgtaggaacaatcgattctggcgaaaatagttagaaggctggattgaagatttcaaaagaaaaccaattttttttatagatttcacaatgattttataagcaaactaaatgaaccagaaataaccaagtgaaacattggcagaacgcatgctcgggcccaacaacataataggagggataaaagacaacacaggcccatttgaccacagaacccagaagacccattaggtccaatgaaagcaatcgcagtagagcacctacagctagctgattcagtctatcacattattccaattcatcctaactacttttagcaacgtaaaagaagtgaaacaatgacagaaataatgaaagaatgctaaacaccaagaaagttctatgatgtcttgagatgtcaagaccttagtagaaagataatgaattaagtttaacatagtaaagctgcaagtgtaataaccacacgatgaatccagtagaagcaaacttagtagcatgtctgaaagaggaaagaaaaaacagagttccctaacaaaaatccgattacaaaagcaaccaagaagcaacagtactccagaatcaagtccaatggcggcaacaactttcttaaaccttgaatccacgactcttcctctttcctctggccttctcgaacttccttcccttggcccgaacatatggcttggagtgactgtgtggcacaccaggagcaggtccgaaatgcttcactgcttcacgtgaattcttaggtcctctaagaagaacctataacacaagaacacacaactatcaaattaaatatagtatccttaacaacttgaaaatggagaatagcagattggataagagaaataccgtgttctggcccaatggagctctgagagcgagctggtcaaaggttaagcattcacctccagctttctcaatgcgagcccttgctctctctgtgaacctcaaggcagtcactttcatggctggaatctcgtgtaccctcaaatcatcagttatagttccaaccaagacggcaatcttatcttcctataatatcagaacaagaggcaaaattcaaaatccaaagcatagacaatgtagagaattttgaatcaattatcgaacaccgccatgttacagactaagttcacattagcagattcataaactggacactgtatctaggaaatgtaacagattcaacatgacctaaaactaatttaaccataaagatacagtagagagagagggtttcaacgaattagtaccttgccagtcatgaactccacaagcctagatagagaaagaggagctttgttgactttgctcatgaaaagcctcttcaatatcacaccattgaacttgctattagttctccttaccagaaaccggtaaagctgcaaaatttcacaaacaaaattcagaacaattcactaaaataaaattaaaaaacctcttcaattggataatataaggcaaaggacaaagattgatgtttaaaattctgaccttgacagtaagcttgaggtagacatcatcagactttggagctgtccttttggtcttcttactcttacctccggcgatcagatcaataccctgcaataacacaaccaatcaatctcacaaacaagcatgaaagcaagatccaatctcaaaaaaactaagagagatagatcgttcacactctaacccgagactcaaatgtcagaaaaacaaacctaatacactatacaacatttaaaatgacaggaaacacccacaatctcttaacaacaagatttctgaacctttgatatcaaactaacaacagaaaatacttgtagaggaaagacagagagaaatgaagattgaacgacagaggaggagagaagtaccattgtcgtccggcgttgtggtgatggaaccgccgaccttctacatgaaaatactgatgctagggtttttataccaactcaattttagggttctcttacttcctccacgaaatgggcttagttattttcttccttcacgagatgggccttgaatataagaccacaataagtttggacttaaattctgtaatatattggcccatttatataatttttatttgtcaccatagaaagcctttccttttctttttctgaccaacatgaaaaaaaagcatttctgatgtattttcttacaaaccttttatatacgtaactataaaagattagttatattgatacaagaaatagtttaatcattgatgcatgccgtctagaagaaaagaaatattttattttgcttagaaaaaagaatgaaccacatattaggtgtagtatacttcatacttgttatcatgtatgtaaactactaatacataggtaagtatacttgtttacgcaattttaacctattattgttgatttcttgtcacagaaagtgttatgaatcaactttcaaataagttaaaatttactcgcccaaaaagaaagaaaaagtatcaattaatgttactaatcactgtctgtttatataattaggatggtgtagtggaacatgatgggaacccatttacgaattctaagtattaccctcacacgtatacaaatataaccataaaacgaacttttcaaaagacgcggtttctcgcccgacaacaattacttgaataatttatttaactacaaaggaaattagtgtatgtaaggagctttgaccagttccaatgagaatcatccacgtctcattctttttaggctggatcttcttcttccatcaccgtccgtccactaccccataattcttgccttagaaggtttcactaattacttcgtcttcgtttttctattttgagatttgacaacttccccttttaatcatgtttttagttctgttggacaataccaaatcaattgcactggttttgctttctttatccaatcattttttcttttgtagttcattggatccatttttacatcatgtagagtagccattgttacaataccaaacaaagttagaaattgctaaatataattgttaattgatataataatcgtatatagttaaaactcaacttgttccatttctaatcttaattatgtttttttggaccgacatcattctcttaatgtaatgaatagccatttaaaacagagttgaaatataaattccaaaaatttctggcagcaaaagagagagaagagaaggagctattatctgcgccatctgtttctccaattaataatctccttaaatccggatttgttattaattctaatcttttccaattgatccactttcctcctctgagtttttaagactaatagagagatatatagagagagattgcttctggttttgccttccccctttgtttgacctctcttttctttcttcccccctttgtgtttcccgcattttctcgggaaaatctaaaggaacaaaaacattaaaagtttgtgattttctgattatttctttatttaatcgagacccattgtttctcgcctgatttggcgcaaacccttttggattctggtgaaaaaggttgggatcagaggaagaatgatgacgagtatggaagggatgatggagatgggtgtattggatgatattataaggagattgttggaaggtaaaggaggtaaacaggttcagctttcggaggtcgagatccgtcaactttgcgttaacgccagacaaatcttcctttctcagcctaatcttctcgagcttcatgcccccattcgcatctgcggtctctttctctttctctccctctctttgtggtgatgatgaaaaaatattgtggctttttggttttgatgatttgggtttgagtcgtattgcacgattggggttaaaaagatgagatttgtaattgggggcaaatttgtgttgattagggttcctctttttttcttaatgtcgaaacgtgtgtttgaagattttagcatctgggtgatctaaaaagttttgattttgatggatttatgttaaagtttctgcaaattgtttctaaatctgctgatgctttgttttatgaggtactaatggtttccgttttgatctctaattcaggtgatatccatggacagtaccaagatcttctgaggctattcgaatacggaggctatcctccttcagcgaactatctcttcctcggcgattacgttgatagaggcaagcaaagtcttgaaacaatatgtttactcttggcttacaaaatccggtacccatccaagatatttctcttgagaggaaaccatgaagatgctaagatcaacaggatttacgggttctatgacgaatgcaaacggaggtttaatgtacggctttggaagatattcaccgattgcttcaactgtttgccggtagctgctctcattgacgagaagatcctatgtatgcatggtggattgtcaccggaattggaaaacttggggcagattcgggagattcaaaggcctacagagattccagacaatggtcttctttgtgatttactttggtctgatcctgatcagaagaatgaagggtggactgatagcgatcgaggtatctcctgcacgtttggagccgatgtagtcgctgactttttggataagaatgatctcgatctcatttgcagaggccatcaggtaaatagacttccatagtgatcaaaactagaaccaaatggtccaactctgtagaaatgtttgacatttgttgtatcttgtgaatatgggcataaaggaaaagacttttatgagaaccttccaagatattgacttgtgagggacgtgtttgcaggtagtggaagatgggtatgagtttttcgcaaaacggaggttagtcacaatattctcagctccaaactatggaggagagtttgacaatgccggtgcattattgagcgtggatcaatctctcgtttgctcctttgagattctgaaaccggctccagcttctagcactaatcctctcaagaaggtttgtttccaccaagaactttcaaaagaccaagtagtccttcttttgataataatattggttagctcggatataccaaaatctgaatccaacaagaccaagccttttggacttgatgagtcatgacaagttttgttcttttggaaacttcacgtcataatgtaacacatgtttctctctatattttctctttttgatcaggtaccgaaaatggggaagtcttgaaacttaatacagcttattcccttgagagatttggtttcacaagctcaagctagcgctctgtgcatttcttcagatgtaggcaaactgcaatggagaagagaacctcaaaaggctactttacttagtcatcaaagaagaagcatcagtagaaaaaacaaaagagagagagagagagagaaaacaaaaggtgttgtccaaatattctgtgtatagttgcagaaacatctcttttctgcttctctagattttcatctccttttggtctgttttcttttatttggttattcttttaacaccttagtttaacttagagtgcctctcctcttttgcttttttctttctttcctgtatcatcaaattaccacatttcttaatcttttccatatttgaattgacttccatggtttggctcttacttttgtgaatcatctgcacagtaaaaacaatttccttttgatttagcagtacatgtctctctgtgttttttctcttccagcagtaatacatatactttttacagagcttacttttacacaatggcacgacttgttctctctgtttcggaattggttcttcttgaaactgattctccctctctcgtcgagttttcatagtagcacattttattctcaggcttttggtttaatttcataggaagatggttcaatccggtttactattaaaccgaaaaatctaaaaactagatttttcggtttatgaaatccacaaaccaaataatatagctgcataccaacccaaaatctcggcaaatcaatgttttccgtaaataaccttttctttatcgatgttgtcaggaacattaagggtaacttagtaatataacaattgcagacgttttagcgagcagaggatccccaaagccagacaaatcctcttccgtcgccgccgccgccgccgcaagtctcgtcggttagtttctgaatctctcgtttctaaatctctgatctttcgttggattcctgtgtttgaatctcagcttctctacctgggtttatgtctcagctcttgaacttgcttgatttctgcatttcttgttattttcgtttgtctttgtctctcgatccgtgtgttaccattactgtatatgatcgcataattcatctgtgttttgctttgggtttattgatctaacttaatctctatttccttggattgatatgtaatggtggaatttctaaagatatataggaaggaagttggagagtttctagcaatgtttatgtttgattccaatgttgtggttctcaatggagaaaaacattatagaatctctgagaaattttatattgaatagccaattgctacaggattcttggttcggatctttcagtttcagaatctatatgtgttttagagttgttttttctttgagctgaataggtttagagagccaatctttcacttgattttcgaagcctatatctagttcattggttcgtagctaaagagtgtttctgaatccttgctgtaccatctgtgttaatagggtttgaagtctatgtttgattctatctttattctagagagcttagatgttactttttaggataagccttaaatggagacgcagaaaactcaagctgaaaacccgccaaaaccggccacgtcttcatgtcgaaagaagacaaaggatgatgccaatttcctagaagacgtcaaggatcacatcgatgatttcattaatgcttccatggatgatcacaagaactgtttcaacaaaaccatcaagaaggtttgtctttcttcatgatttactaaacacgtaatagatcttgatcactgagccactacttgtgattttgctaatagtaagttattttgcctttttcagatgtttgggttgtcaaaggctgttgcggataagcagcaaagtgaggctaaaggaggagtcgagagttatttgcctcttcagacaacagtctcagattagagaaactgatgatagaatcaagctaacaagatcttgtttcggtttactttttgttggtttgtttcggttaccattgtttagggagatatgcccatttataacagtaataaagatgacaatttgttattggtggatagctaaaacataacatgtctttactttgttttgttagtgcccatcttcaattaccaaagaatgttctgaatctaataattttgcagtttttcatatatgcttttcagcatccaaaaaaacttttaagtgccaatagaatcgactttgaaaatcctttaaaaaccctcatgaaaacaaaaagaagttggagaaacttcagaacaacctctggagagagttagtgctgttgatacattatttgcattctttatgcccctatttccccttgacatgtttctcaagtgtgctagggtgggtgttcctcaagtgtcgagactaacttctctttcgtttcttggggcagatggcaccacacgggccaaatctccactctgacaagaaaagagatcgaaaaaacatggaattggaggagtatcttcagcgttcattaccattccttcgttttttatatgccagagaaaaaggtctcatagggaatgttattctcgagaatttgtttatataggcagagataagaactacacaatcatatttggctaaggtattcacaatcctaatgtgcgtcgaaagaatattattttcaacaaagtttcccaaattgtgaaggaaaacagattctaatcgaagtaatcctgcaaaaatattttaaattgaaagattatcttcgattcacgttcgagttctttaatcctcataaaccaatcattccatcattatccaacttttttaacgacaatctgaaagaacgagatccatatgagctcttaaagtaagataaccaacaagagttaactggaacaaaactaaataacatctgacaaaaatgacagaagggaaaagacaaattgtattgaataccgagtagaaaccaaaaaacagaaacatggaatagagtatacttctaaaccaaactggattctgaggtttagtcttcctcctctccttcgttctcagcaatgttgaagtacctcaactcatagaggttacggtccttgtttgctgcaatcactctgagccaatcccttacattgtgcttcttcaggtacttctttgtcaagtacttcaaatacctgaaaacacacatcaaagacaatggtaaataaacaattgcacttggaattgcttcaactaagaaaccaaaacaagactcattgctacttgtcttagacactgttagataagtttggctatcacaatcactatgtatcatatcttaagactaaacgagcaaagatcaatactaagttcatgtgttatacctcttggagaattggccatctgcagtgacagtgatcttgctcttctcacgtgtgattgtgacagaatcaccaagtgcaccagctttgccaccgaccttgatcctctcctgaagaaacttctcaagggaagcaatctccatgatcttgtcatcgacaggctttgaacaatcaatggtgaaggaaactcccttcttctttcccttggcaacagctgcacctccacgactcattttcccaagacttctctgtaaaatccaaaaaacaatccataagactgtgtctatagatcattgacaaatcatactgatacaaataaagaagcctatattctctatatactttataagccattttctagctactatgactaactcaaaacctggaaaatgggaagtgagatctgtatcgcagattcgactttcaatctaacatagtcaattacactctaagtagatgaaaaatgaagctaatccaagaggaaatgaagctaaaaactcgtttcttctcattccatcttcacatctcgagagacaagtctatcgaatctactatatcagaaactgaagcccgttccattaaagggagatagtagcagcgtgtaccttgaacaaaccctagaaggtgaaattctctgaagagacgagcggcgtcttttttgctttggggagaatgaaacagatggctagggtttttgcccatttaaagtggtcttgttgccctaatttatatttctataaataaccacaagatccccaaacttttgttaaatccaaaaataatcccaattgtttttaaattgtaataactcccacaactcgttagacaagtgaggatatttattcttttgtgttccaccaacaaatgctagttgttcaatttaatcatggatttgttttcagtacattatctcttagaagtctgtatattgtgtgcaatctacaacacatgacaatccatctgaatgtatcaaaagaatgatatactgtaataagcaaaaatttgtttttgtcaattacatgaaaatttccctgaaaggtctacaaaaattctctctagctacgagaccttgtaccaaacagaaaacgctgcaaccaaccattgcagcttaggagtttagagtttttagtctttgtgagataaattttccggtggcagaaacttcggatagcggttggtagcttcagttttgtggtcatagtactccaccacggctgctccagccaaagcagctaaagtcagcgcctgagcgtgcaacctgagaagaagctcggtgagaaaagtgcttcgtacagtaccatgtgactggatgtctcgaacaaatgatttggctaagaacataaaatttatgtcgataacaactatagcttacaggcaagaacagagaaatgtacatgcttttgggacatggagatgatgatgttgctcaactataaatgttcatggctacagaaaatgtttcaaaatgcaaatgagactcaaaaactttacaaaaaaatcattcaaccatttataatcaatcaatccttttgattagaagattcacctggcgtggatgatcttgacactggttttcatggcaggttgggaccagttataggcgatagaaccggtaataccacttagccataaacaacctgattcaacaacggtcaaattaaaacaatacaggttcagaattagcagaaagaaatatcaaaacaccaaaaataaagtagatgggaatgcattctctaatatctttgcatgtcaaagaacattaagaattgaggaccaaaaatgtctcagtggaatcaagaggaaatccaagacggtaacagaaaccgtaacaagttaataatcaattctactatatgacattaaggcgatgaaatctaagatcacaataaacgacccaagagaaaaggaatgttgagaagaagaagaagaaacaaggataattaccgacggtacgaagtttgtgatcggagacccattttctgatttcttcaaatttggtctttgattccaccattgtttggaaaaatcaaaacttggaagaaaaataaagcctttcgccggtaatttatataggctgagataaaatcggaggaggaaagttctaccttttgtttttgtatccctcaattttactattaaactattttattattttgcaattacgacgctgaattagaagaaaaaaggcggccttgttgtaacattatagactatagacaggtcttggtcatttgactttggtttggactgttcgattttgatgtcacgtatagactatagtcttggtcatttgacgtcaatttttatgttgtagggaaaaaacaaaacaaaagaaagaccatcaaaatttgggatagtaatatgaagaaaaactcgacagttaaaatttaacataaccagatagaagaaagaaagtttcattagggtaataacttggatacccaatgtcgccacattaaaaaacaaatacccaaagacctctttcgctcccccgattcatacccagacctcgaaccgcacgggggtcacaccaccgactgggggaggcagtctctctccaaaccattacataccattttgtgtttttagattatcaattcatcacataacttgagcatgcagtttttcaggttttctcaaatatcaaattcccaatgttttttttttctttttttggttttttgtccatcatgagaattgcccgaccggtgagaatctcgaacgggtactgactcagttcttaagatgatcctcctccgccaccgtgcctctgatggaagcttcctgatccttcattaaatgaagatgtccaaatgtttggttctctgtccatctgattaaccgagtaggcttgttgtgattgcatataaggatctctctcccatatgttaaaccggataaaaccactcccacctgcctgatctgaagaagatgacgttgatcccatccctgaagctattcctctagcgggcctccggccagatgggaatacaggccctcgagagactataggcgaatccggctggtgtgactgtgcagaagactgttggtaataggcttgaagagcctgcattctgtctcgggtccgagcgttgcttcctggaaatggtggtgtcctcggaacagatgccaccgagctacccgctctaccactggaactgcacaaacaagccataagatgtgttttaacaaacaaaaaaatatgatagttgataaaaggtctaattggtaaacctgtggtatcacgaaataacgggcttttgttagtcacgtttatttgcagatttgttcattaatttattccgcaagatgtctaaaatgcaaactaaatatgccattacacaagttttcacgaaaattgactttttcctacttatttcaattccaccattccattccgcaaaactaatttatttccacaaatcaagagtgtagttaccaatataacaattcagtgcttcaattttgagaaatctttgcacaaaaccaaatttgaattctgtgagcactttagtttctttatgtgaagaaattctcaacacatttgtaattaaggtcatattttatgttcattagtgatatacctctaccaagacagaaaatgtttacctgtgaccatgaaatggacgcgtgaaatgtggcggtctgggtctgatcatatctgagccgttggctcgagaagtcctcgcagcggctggtggaggcgtgggctgagttggactgcccacatgagcgccagaagcagagaaatgctgtggcggtgggggtggaggcggatgataatcccagccgtgatagtgcggatccacagggaaaccataaggagttgggacttcaccagaaaccgaagagccagtgttccagtgactactgaaacttgaactgtctgaaacgcctgcagcaccaccactgcttgaggaaggcgagtgaaccgggccaaaataggttacatatggacatggatgacctgcggttggcgctgctggttcagtatagtaaccttgctgtcccaaaagatcgtgatctgtaccacaacattagaattaatagatcgataaacccgaattccagaacataagaagaagataatgaggacaaaaatggaataaccgatctgacaaatagtcttacatgaactcggtgaaaattctccatccctacaaagtttgaaagagattcatcagcaaagaagggaagagaatgccagttttgattgccaaaagtagcagaaaagagagttaaatggatgttatgcagttgcttactcgaaagaaggaagacgggctgagcttccaaatgggcaccagtgaactccaaaagactacaaatatacataaacacaaggtattttcgagatggaacataattgaagcaatcaaataaaatgaacagcaatctttcaaaaattaaaaactcagcacatgagacaaagaagtgaaaagtaatgcagaagcgcaatggaatataagaaggattgtgttatcagtttcttaccatttcagagtatgctccaatatcataaatatcttcttcgtgaacccaatcctcgacattgaattcgggatatgaacgacaaccgtttgcataaagccactggcctttttctactttccgacagttggggcattgcatcactccctttgcattgaaagccgaaccaatacaatcttaaaaacaaagaaaacagatgtgaagttagatggctttgtcaaaaacataagaaaccaaccatgaagcataatgaataatccctaatctgaggaaaatttggtcggcttatagatacaaacacacagatactgctatctagagattctgagctaataaatgtactaatgaaacacatatggcacgaacattctgagattatgagccaatacatgcatcaaacaaggtggagagatcaatctaagaaacttggcagttgcaatgaaatagtgatgctatacataattgatgctatgtccgtaacctcacataataataataattcgaccagatcaaaactatatcaagcatgaagccattagtttcagagcttaataccaaatcatgagagccacatcacacaaacaatggtagtcgaaaaaaacagaatgtaacaggttctttattcataaatcgaatcaaataaggatagatctgggtgattcaaatcaaaatctgaagcaaattctttactttttttcaaacaatcgaatgaaaaagaacaaaaaaaagagtatcgtatcagaatccacaaactcacctagatggaactgatggtcacattgaagattagcccatgctcgatcgccgtttttaacaaccgtctcgagacaaatcgaacacgcaaccgaaccaaaaccatcaccttcgtcgccatcggcaccactagcttcgtcggcgagatcattatcgccgaaattgaatttgttacccttattgcctaaacccataaccaaaattcgaaatcaaaataacccaaatctcaaaacccttttttttttttgaatcaaccaccaaattcgaacccagaaaaatcactctccccaattccttacgcttcgattaatttaccagaataattaatttaatccttgtacgaatccgtgaactctcttcgatcgtcaccaccagagagagacccaggaagaagaaaaaaaatcgctctttgattttttagagtttttttttttttctgtagcgttatgttttgtgtgagaaagattgggttacggggtagaagcaatgaccgctgtccaaagactagaatggacggctcagatttattctgacggatttgtctactttacccatcagctgcttccccctaagctttttccatttttatttatttttttccttttccaattttttggatattaaatttaaattaatacccatcttggtattttagctttctatttttggttctcataaatgactttgggtttcaatcgattattctgtaaaaaaaaaagaaatatcggatttgagtaatttgaccgtcgatgatgacaatgccagtaatacaaatttgttcctaattgtttgaaaaactaaagaatttattggatctcatcttctagtacatgtgaactaaaacatattggaaaacttacaagtaaataatagtatagtaaaaataagttttgaaggtcaatagtagtcaaagtttttagttagtccaatgtgacgatgttcccaagcgaattattgcgtccacatgcctaaagtgtttattcgcgccgacttttgcagctctgctccccctcctagttaccaatttccaatttcgctcttttacttttactttttacggtgttaatacttttagagtttaaccccaaaccgttattatatttaggtgaatggaacatggttttcaaaaagttggttcttggcgatttcattaacccgaaaaacaaaaattacatagttttgacaaaaatgaacctcaagaagaccggttagagttacaaacttcaaacgtgttgttgaaaaataaattgtgacatgtaaaacagtaagtttaatgtatttccctggttttataccaatatacttttactatttagtctttttccaaaaatcttttttgtttaagtagataaggaacggctctaatttaacaaaggaagatttcctttttcttatatgaaaaaatacctaagccgagaaaaacaaggaatcaagacgactcctaatgtcaattcatcatctcaccattatgaactctataaatagacttcttctatcttctcttcttttcaccaaattatcttctgctctctacgtttactctgatcaaatcagcgaaagaaaaacaacacaaaaagtctcttttaactctcttcaaacatgttggtctaccaggatattcttacaggtatattctgattctggttcatgtagtgaattacgatattggttttcatgatttgcgttaacgtttcgttttctaggagtttactcgtgtcttgtaattattcaacctcaatcatcgtcgtcacttaacatactgattttgtatctatctatgatctatcccaaaaagaaaaacatacattgatatgtatgtattgcttgtgtaagaagctaaagtttgtctctcttttttgatcaaacaggcgatgagcttctctctgattcctttccttacaaggaaatcgagaatggcatgttatgggaagttgaaggaaaggtattattcttaaataaagctttgagtttttttttcttacgatcaaagctggttgaatttaaattgatgtatcattgttattcttttttgtgttcattagtgggttgtgaaaggagctatggattttgacataggtgcgaatctgttgattttgtaatcaaacaatgaatttgtactaagggatttagacaaattcactcctctcttagctcacaaataatcaaagggaaagaacaaagttgtttgaacagaaagctagggtttgctctataatcgtagtctcttgtattaggttaaagatgatcctttggggagtttgacccccccctatttatacaatgggtcgaacataccaaaatatgataaacttctaattatcttaggtctaaatctccattacttccattcttcatgagattcccctcttttaaatggaagttttcccttcacacgacctcagaagccgcctatggcgatctcgattgtcgacctaaatcttctggcgagctcatgacttaggcccattaacaggctaaccgggattccccggttcaatcgaattctcgattttattcatgttattccttggtttaaattggtattgtcggaggtgctaattcctgcaccaacagaatccatcgggtgaggaagggggtgaagacgaaggagtcgatgatcaagctgtgaaggttgtcgatatcatcgatacgtttaggcttcaggtaaactttaaaaacctttttaatcttcttttctttgagcgcaagaaacaaactaatttgggacaagtttgagattaacttttgggtatttatatgcgatgttctggcaggagcaaccatcgtttgacaagaaacaatttgtgatgtttatgaaaagatacatcaagcaactaagccctaagttggactcagaaaaccaagagctgttcaagaaacacattgagagtgccaccaaattcttgatgtcaaagctcaaagacttccaattgtaagctcttctcttttatcttctttcttctattttttttttgaagttaattttgtctaattggtgaattattttcaacgaatgtgacagcttcgtgggagagagcatggaaggagaagaagggagcttagtgtttgcttactacagagaaggagccactgatcctacttttctctacttggcctacggcttgaaagagatcaagtgctgaatacttcaaagctacagattttatttttttattttggagttttactttttgttagtacttttggttaatcttgagagatttttctatttcaagtgaagttaacttttatgcaatttccttaaattgagagcttgaaaggattagtgcaacgaaaaaggcctgattagttttaaaaattcacttgatatacgttcaaaatactatgatatatacaaaatattagagattgataagtgaattc

SEQ ID NO: 1270 - DNA, 87045 bp, Arabidopsis thaliana
gaattcaattttccacccccaatattaaaacgcaatgttaagacccaacatttttttagttttgaccatttccaaccccatactcatgaaaatgtggaatgtttgcataagaataccgcaagctcctcctcccctcctttgaagattccgaccaccacaccaccccacccttgtactacatttcttcctccaacaaccacttctaattcctattcacttagcttcctccttcaatatctcccatgaactttctttttactggagatcctttatgtgcatgtgtagtggtttttcgcaaataatctggtgaggcttcttaatccggttccaatcatctttcagccacttatcttgaaatttccctttctttcttgtgtttgaggtctttaataatttataaacttcgagagcctttgagtaaagttccaacttcaaaaccatgagtgatttatgtagtaaatcctttatctttcgtgaatggtgctaacttaagaaggactctcaagcctttgggctttgtcaatcttcacaacaatatatttttgacttttgagaatttattttacttaacttcttgtagcattatgttatctatccctcttgactcttggtaagaaaaccgtagttaaaaaagaaaaaaatgacaaacacgttcaataaaaagcactgtttgatagggataattatcttatgaaatgggctctgaaaagaaagtatggaacttgtaagatgggcctttaaaggcttatacacgagagacaatggcgacgtcgcgaatctagtggatgatatatagataatgtaacgatagtataagtcaacgaaattgtactataaatagattacaacccccatggagtagtatcacccaagtttctgaaaacagtagagaaacacttatttaagcatacaaagaaaagaaagcaaaaacttccaaaatggcaaagaccctcaattccatctgcttcaccactcttctgctcgttctcttgttcatctcggctggtaatttcggttctactctttctaattaagttgttcatatgcaatgcataaattcatacatattattttgaacgtaactttttcttcttcgatctcaacatatatagtcaaaatttggtgtatatatattaatttgaatgaatgttggatatttctacagagatcccgacggctgaggctaattgtgatacgtatttaggcgaagtcacagtgtattacccatgtagggaaagagactgtgaagcccaatgctatgagcattacccacactcatgtaaaggagagtgtgagcatcatgaccacgtagtgcatcatgacaacgaagaagagcattgccactgctacggtcgttgaaatattttacgaaaaactcgtatccaataacaaataagattgtatctctataatgtaagtgtggtttcgttcctatgtaagggtatgtgtatgtgtatgagttagtttctgttaaaaacagtaggacgaagctaatgacggcttctctctgcttctataataagatcatgttgtatgctttttctttttaataataaaattgttttgtgttttgtctacgtaatttgtctattaaactatttagatcaaaacatacaatcctcgtcttgatggtctccgtacacaatacaatttgataattattcctccatttcttaatgttagatgttttaggaagaaattgttccacagagataaatgttttctattttctatgtaagaaattaaatttatacaaaatcaatattgaaccaatgagctttatatcaggcaggtggttgcataatattttttattaagtatgaaaactgaaaagtgtgaaacaactaagagtttaaaaacaggagtaacaatgttacacctcctgatataaagcttgtttagtgagtagtgacactacatttccaagagtaagattatctttaataatcttctttggcgatatacaatgacactatacttgtttagtgacactacatttctaagtgtgatcttaaaacaacaaaaaaaaacttctaagtttgactattcttttttttttttcctctacgtcaattaccaaaattaaaaaaataatgattgaaactacaaaatgacatacgaaaatgaaagtatcgatgcatcactcattcacttggtttatttttttaactaaagattgaggcaaacatctccgtccaaagatatgccgagcaaaaaactcctattgtgattgtttacactacactcatttaggcatctcttattttccaaatcgaaatttacaaaaaggtcttgtatattgttgtactaattgtgttaaaagtttttaaatattaatctttaggtagtcgagtttatagacgaaacaaaagaggagaaagatttgacttaagaagctctcaaaagatttccaaggataatatgttagaggtgaaatttgagacattgatgaatagtggaccttcaataaaagaatcaagtggccatgtccccgagctacgaagctaaagttatgggatcaagtgacctctatagatttaggaaaatgacctcttttcagaatttaaataaatatcagaaataaaaggttcaagtttactcgttgaattttaaattttttcccccaataaaaagaaaagttgggaccccaactttcttcatttgtctttttaatttggacccatatattcaacccgcctatctatatcttcttacgtaacaataaaagcaaccggattacattgtaagaaccagaaatcaaaccggcgtttaattgaaatcaattgaaccagaaaaggaaaaccgatatcatggaaaccggttgtcaacagaatcacaaggatcggagaagattattgaatcgcaccttaagctggacttgagcctgaaagcccatatgtaagaaaatgaaacggtagcgtttcgtaaaattggcgggaaaatgaattgttattgcgcggaagggctctaaaagttcagcagatttattaatcgtcgtcggaaaaaatcgataattccgttaccggagtggagcactcgtctttgaagatgaaggatcaagatctcgaattggagaaagttcgattaataagcctagctacaaagctcggattcgacgaagattctgcgaagaaatgcttggatcgattcgtcgatctttacggtaccaaaattcaaatcaagattttagaaacctatgctctcgtaatcgattgcggtaattagtgtttttttttttgtctgtgtgtttggtcttaaaaggtgatgatggtcgggatttcatcactgttgagttatgtggagatgattttcttgcggcgttagctgattttgaggaaggaactgaggaatgggatgatatacaggctatagagtctgaagctcaaggaaatttggctgaaatgtttgataaatctactaatcctagtgataacggattcgatactgatgatgatgatgatgattcaagagtcgaagttcatgttattgaggattctcctgagcctaagaaaaagccagagatagtggagttggattcttctagtgatttggaagatgttgagacgcgttttaaagttccaaggagatcacaaacatgttccagatctatggtaagtatcaacattgcagttatttttttcatggaatttggaagaagaaaaaacacaagctttttgtttggcaaacactggtgagagatatacatatgtatgtataattatgtgtataaacaaaatatatggtgagaactgagattaatggtatacaaaagaacagctttttttacaaagacttgacctttcattgggtttggtgcctatgaacaagttaaaagagatttattgtgggttcctttttgttctgctttgaaggactattccatggaggattcagtttcaacaatttcaggcagaaaaccttctgtccagatatcaaacaaggaccatgaaactccgagttacgaagagttgcaggcattggatgatcttgaatttgcaaacttggtgatttttgggaacaaggtgtttcggcccctgcagcatcaagcatgtagagcttctatggaaaggaaggattgttttgttctaatgccaacgggaggggggaaaagtttgtgttaccaggtcatgatccttacctttctctgttcctgaaggggtgatttgaatcttgtttaggaatagttagtccaataaccaaaagtttatattgctacagtctgcatagtaaattttgtctctttgtttgttttacagcttcctgcaacactaaaagctggagtgaccatagttatatctcctctgttgtccctcatccaagatcagatagttgcgcttaaccttaagttcgggataccagctacttttctcaactctcagcaaacatcttctcaagcagcagctgtattacaagaacttaggtgaagatcctttctacatgtctttcattttcacagtatccaagtatcttatgcatcatttatctgtcttttcctttaatggagattgtattgacatttttgtttgcagaagagataatccgtcatgtaaactcttatacgtgacacctgagaaaatcgctggaagttcatcctttttggagacactaagatgtttagaccgcaaggtagcctgttcagtttttcttgttgttgttacataattcgataacaaccaaattctagctctaagaaaaatgtttaacattttcctttattaaccacagggactgctggcaggttttgtggttgatgaggctcactgcgtgaggtacaatactgttctacccttctttcacacattatcttgtggtctacactaatgttctctgattgttcatcaccaacaccttaatatcaaaatagatttctgcctgcacctgaagaatttttcctttgtgatttacatgaacgtgttgttttttctttccagccaatgggggcacgacttccggccagactacagggaactgggatgtcttaagcagaactttccccgtgttcctgtgatggctcttacagcaacggcaactgaatcagtctgtcaggtaataaccatcaccatgattagagatagatcctcttaaaattgggaacagatttaaatgctctgagcttttccattgctccggttctcaatttatcatatgttgtggatctttatgatctgaacactggtatattgccattttgatcctcttttccacacacaggacgtactaaaaagtctgagaattcccagggctccggttctgaagatgagctttgacagaatcaacttgaagtatgaggtgatcgtcaaaacaaaggagccgctgaaacagctccaagagctgctaagagatcggttcaaggatcagtctgggattgtttactgtctctccaaaagtgaatgtgtggatgttgccaagtttctgaacgagaaatgcaaggtgaagacagtttattaccatgccggggtgcctgcaaaacaaagagttgatgtccagaggaaatggcaaacaggggaagtccgaatagtttgtgcaactatcgcatttgggatgggaatagacaaagcagacgtggtaagtcaagcctatgcatagctgtttgttgcaaattttctgccacgatcctctttcttaaatcgtattagctgcagcgttttgttatccacaacaccttgtcgaaagctgtggaaagttactaccaagagtcagggagagcaggaagggacgggcttcaagcgcagtgcatttgcttgtaccagaagaaagatttcagcagagtcgtttgcatgttacgaaacggacaaggcagaaacatggatagatttaagtcagccatggctcaggcaaagaagatgcagcaatactgtgagctcaaggtaatatcgttaaaacgcgaaatgggaaagcaaactctgttaattaatcgtatgtttccattgtagattatatgttccaagattttacttcatccttactaagtcttaatctatgaatgtttcagacagaatgcagaagacagatgttgctagagtactttggagagtcattcgaccggatgatttgtaaaagcagtttaaatccgtgtgataactgtgaaagaagctgatatcaaatcttcgatgacttgacctgttattgataatgtatatagctttcttcacatgacctgagataatagtaaaaccaatttgtgatgttgtaatagtaagttttatttttctcttccttatgttatatggtaaattcgagcatttccaatgttaagttctcattgcaattcttcaaggttatttttggtttttgtcgtagaatattgatatgtaccaaaagaaacaaaaaagaaagaaaggaactattgaaacaaagcattatgttaaaagatactgtatctgagttttcattattgtaattgaaacatatatttatgaatttagataagtgaaccgaaactccaagtaacgtaacacatattggcaaagttttcaacgcgattaaaaaccagaggtggctcattagaaggcccttcgaacgcatctttgcaatcgccagctttataaaatgcgtcagaaatagccacaagtgcttgcgtgaaagagttactgctcaaaaacttttgagctttctcaagctctttgattgcttggccataactagccacgcatgactcgtaagatcccttgagttgctggtccttcccagagctttttgctaatttgctcatcagtgcttgggtttgcaggccaaactctcgagtttcttttactctgaggcttataaagccttggacgctgattgattttgttttttgatccgcgttgaaccatttggcgcaaaattgacgatcgaacatttccaaatttgaacagaaattgttgatgagctcttttgtgacgatgtctttgaaggacaaggaagaggacgaaggagttatgattagtataataagaagaagaagaaaatggaggatataatatccgtttcttgtgatgcaagaaatacccattgcctgctttggatgtgaaaaaattgtgtgtgtagtaaaatattaagattgtattagtgaattggaataatctaaacctttatataataaagttaaggtctcatccaaactcaagtggcatttctccttgtgatatgtttcctctttcatttttattccaatcccattatttagggttttaacaaaaaaaaaacattatttaattttcttagatttagttatatatatcattatttttaaaaaactataataaagagacacacatttcttacttttcctatgtttttttcatcaatacaaataaatataaacatgaaattattttatgttaagttatctcttataataaagtaaaatttcttccaaactcatgaatgttctaagaagttgacatgtgacatatctccttgtgatatgtttcctcttttcattttatcttaataccactatttagtttttttttttataacaaaaacagaagaaaacccattgtattttagtttcattagatttggttatctacttatctgtatcatttcttttttaaactatagattataagactcacatcacttacatattttctttgttttctttttcatcaatacaaataaatataaacatgaaagtactttatgctaaatgatcttatataattaagtaagattttttccaaactcatgttctaagaatttgagatatgcatgttaacataagaattgataattcgttaattctttgacttcattatttggatgtgaaatgtgtatacgttactaagtttacttcatactttagttttgtaaatcaaatgttcgactacgatattgaagcattgtgtatgcgatccgagttaatttcaactcttgcaacttgttagaattcttgcaatcggcggcgtaagtaacacacactggaagtagtctgttttagcattttagtttaccaaattctatcaagttgagggtactgcacaaaatctctttcactctttccctccagttcaaggacaagattattggtgcaagacagagcagggtaatgatgatcaaagttgtaaataagttttttggtggaaagcagaactacatgtaaaaagcttggaattttttttataaacaacaatgcttcataaaagcattgaatcattcccaaattgttgttttcttttctctcccgatttcgatgcttcttcttgctggttgtgttgcaatgtgcctcctaaattcggtcaacctgaggatcaggtgaaggtacgttcatttgttgagatggtgggatagcttgcggttcaagaaacggatttgcaatggcattctggttgtagtctccaaccgccaaatttgcatggccaaatgggaagtaaagcgagtatggtaatgatgggaaagggacttcaaatgttccggatctggcccagaagctgtctgctactatgttgttatagttggtctctaaaacttccggatcaaaatatagtttatgtctcctgaaaaatatattatgaatcatttcaacaaataagtagctagaaacagaaccaaactggtaaaatcagggaagtaaaagaaacctgcaaaaagtagaagggtgatcttgaaaaaaatggttgatctgttgccatttatctaggacactctttaacgactgccacgtggtaatatagaagttacatttttagtttagcgataaagataaaagtatttaaattgatggaaaattttgggctttgtgttttttggtccataaatatcaaaaaaacttttcttattctcggttttgtctgacataaacattaaattcggttgaacagaaaaaatgaaaaacattaaaaattcatatctgtaagccaacaaagaaaaagtcttgttaatttacagaaaacaatgtcacatttaatttacagaggtggaaaattcaaagtctctttcttgtcacatcatcaattcacacacacactatgcatctcttcgttttcacaagctccctctccgctccgcttcttcttcttcttcttcttcttcttctttagttctttaggtttctctactcttaacccaaatccacaaaactgcaaatgctaaatcaaatctgttttcatcgtcccccaattccaaatgccaaactctttctcttcttctgacccatttctcaaaattctcaacttttccttcttttcactgatttgttttctcttcaattcttttaggtcagaaattctcagtgagagagagacgaaagtgaaagactttcgttgtttttagggtttcaatcttcagtatctcagattttcacatctgggtattcgtcttggtgcctacattatcttgttgacgtttagactatttcgaatttggtactcttctaatcatttgatttgtctgtattcattttttatcctgttgtagactgttaatgttactgtcgaaagttcggtctttttttgtccttttgattgaaaaaccaaataaaaattccatctgtaatagttggctgagattgagtacatatttagagtccatagaaataattcaattgctgtgttatgtagatggtagaaatggaggctgttgagaggaaacgatccagaggaggttttctaaatatgtttgattggcctggtaaatcccgtaagaagctcttctcctctagcagcagcagctcgaaactctccggtaatgtctactttaatgctctatcagttttggtttaagttcaaatggttcttgtcttgaagcccttggttggtttctacttgatatgttgaattttttggtgtgtgtgatctttgatgcattgtcctgtatatatctacgtggatgaagatagtccacttcttgtttcaaagaacttcactttttatcgactttgggttcttgttcaatagactcaaactcttgtcttctttgtttgtatcagaaggatcaaagcaagagaaacaaaatgctcaaaacccctcaaagtcatggccctctctggtaaggcttctcaatgatttcagtgagtgacaggatccaattgtgttttatctgatcttttgtttaacagattgagggagatgagattggaaagaattcaacttacaatcccagaagtgactcgagttgttcaacatccactcccactagtgatgatggacaaggttccaaagctccaagtgttgttgcgaggctcatgggtttagagtctatacctgtaccaaatgccttggagccccggcgtaatcctgattttgatccatacttcctcagatcctcacgcaaggcaagcacatgggatgcatatgagaatttgggttatgtaaatctccgcagtgactatgatggtatttcttgggaccatttggattcaagaatgaacaaggagtgtaaccggcctatcgaccgctttcaaaccgaaacgttacctccaaggtcggctaaaccaatccctgtcacccacaataggctcttgtctcctatccggagtcctgggtttgttcagtccaggaaccctgcttctgtaatggaagaagcttcgagaatgattgaaccaagtcctcgggtagttgctaaaacacggttttcatcatctgattcctcttcatcacttccaatgaaaatcagagatttgaaagagaaactagaagcttcacagaaaggacaaagccctcaaatctcaaatggcacttgcaataataagtgcttcagaggaaagcaagatgaaaagagaactacattaccactcaagacacaagagcgaaataatttattgggagaaagcaggtttggtggttcgaagggtaaagtgaagccgccctctgtatctgcacatgcaaaggccaatactattcacaagcgagacagttcaatgctctcaaatggctacagagaccaaaagaagaaggtggaaactaagaaccgcatagtaaaaagtggtcttaaagaatcttctgctagcactaggaaaaccgttgataagccaaataaccagaaacagaaccaatttgctgaaacgtctgtttcaaatcagagaggcagaaaagtgatgaagaaagtaaacaaagttttggtggaaaacggaactacaactaagaagcctggttttacagcaacatcagcgaaaaagagcacttcttcatctttgtcccgcaaaaagaatctttcccgcagcaaaaaaccggcaaatggggtgcaagaagctggagttaacagtgataaacggatcaaaaagggtgagaaggtgataaaatgtaacatcaccgtcgatggcgggttgaagacaggggacgatgatcgaaagaaggacatggatgtgatttcgttcactttctcatccccgatcaaaggtttatcatcagattcgcaatactttttaaaaaagaatgatcaagatgcagagtcagcactttgtttcaataagatagatagtgattctctaaattttctgttggagaaaaagctcagagaactaacctctaagatggagtcatcttgcagtagtctgacccaagaagaagagtcttcgggttccattacaaaggattgggtgaatgggacaagatcattgccgtcagatgatcaggataacggtttatcagaaagcgaatctgattctgactatagtagttcattctacaaaaagaaaatattccaggttagttagtcatatggcaaattcctttctccgcacaaggatatgtctacttttagtagcttatcaatgttctataattcgctatatatgtttccgtaaggttttctgactccactgacctttgaaaatttcatattttctatgacgcaggcagaagatgatgaggaagttaacagtttcagcactgccgaaaatctccaaatctcctgcagcacgagtttctcaagttcacgcaatgattatcaccataacattgaagaaaccgaactctcagaatctgttgctttatcagaagctgaagaaggtcatgactgggagctcgagtacataacggagatcattgcctctggccaactgatgattaaagaattctccttggggatggctactgatatattacctctgagcttattcgatgaaaccgaaggcaagagagatgctcggggaaagatcgagagaaaaacactgtttgacttggtgaatcagtggttaacactcaaatgcgagcagatgttcatgggaacctgcaaaggagtgttggggaaacaagacatttttcttgaaaggagagagattttggcagaccaagtgttgaaagaggctcagggattgaagaagatgagagagatgatgatggatgagctagttgacaatgacatgagtagttgtgaagggaaatggcttgattacatgagagagacttacgaagaaggaattgagattgaagaagagattgtgtccgaattagttgatgacttaattaatgatcttatcatgtgttgttgacaccaatcctttggtcttcttctctccaacatgagagtgaaattgttttctataggataaaaacaagattaggctgaactaaattctgtcacaggctgaactaaatttttatctctgaaatcgaaaatacttaaaagtcttctgatagcacatgaacataaaagtgtcttatactaaaaataaaaaaagatggggtgttccgagaatcgaactcgggacctcgcgcacccgaagcgcgaatcataccactagaccaaacacccgatttgttaaatcgatagaggtaaacatatttatacggataacatatcaccaccgtctttatagggagagactctagttgtttgttcatcggagacggaagaaaattcgaatcatcagtgtttgtttcctcctctcttaaagcttagcccttctcaggtcattgttcttcaatggcttcgagcaacacggtaagcatacggtagtttctctagttttacttagggtttattgggatacgaatctgagattgctttctgtgtttttgtagactactggggttgataatacgtttagaaagaagtttgatgtggaagagtttaaggagcgtgctcgtgaacgcgaaaagaaggtttcactctctccaatttcacaatctctgatctgttaatttttcgattttgaaagctaaaatctgttttattccatgatgcaggaatcggatcggtctaaatctcggtgtagggtttctacttatctgattttaagcttatctagatgaaatttaagtagggtgttgtttttgcagccaaaggtcctcctgtgcaaagagcccctttgaagcatagagattatcatgtagacctagaatctcgtctgggcaagacacaggtatcatttgctctcttttcattgaatagaaatttgcaagcttttctttaagacagagaatttgtgaaagtaaatttggtctacttgttcttggacatggatgatgtttctatctgggtcccttctacattacaggtctactttttaagcattgcacttttggtttgtttaatctcaagtgtgttaaaattatgcgattcatatatcaatcctgcttgataatatgctagtacctggttctttattaggttttataaacgtttggaatctcagttaaacagatgaaccattgtgaataccttactatatagcaaacggcattgatgttttttttttttatatattgcacgattagtttttttttattccaatcttttctaccattcttttgatatggattagtctttccacctgaggtttcttcaaagaatctaacgttcgtgtttatattaccaggtcgttacaccggtagcgcctctaagtcagcaggtaatggctcttatttacctctactgctaatatgaacttaagcaaaaacttgtaatcacatgagaatcgactaatgatctttgtctttccacaggctggttatttctgtcgcgtttgtgattgtgttgttaaagattcggcaaactacttggatcacataaatgggaaaaaacgtacgtggtgacatatttctaaaaagtcaaactcaacaagtcaagttcattttgaagccactgaattgttggatggaatatccagtttgttttcaatttgtaaactaaactggatggttttgttttcgaacagatcaaagggcattggggatgtctatgcgggtggagagatcgtcacttgaacaagtaaaatattttcttctatacatatgcttatttgctttcttggggttttgcttatggatgaatctgagacaagagtgctcctggtcttaatgcattaggtccaagagcggttcgaggttttaaagaagcggaaagcgccaggaactttcacagaacaaggtaagacttctgagaggaaccatctcttagttatgtagtttgatgtatcttcagaaataagaaactattctctggaaaaaaagctagaacaaatctaagtaggttggaaaataacattgaggttgcgacttagtcttcatctaatgcatggtagatttgggataactgaattttggtcctgatctgggaacagatctggacgaacgcatccgaaaacagcaagaagaagaggaagaactaaaaaggcagcgtagagagaaaaagaaagagaagaaggcaagtcttcatatatatatacatctgtcttcttgagctctttttcactttgattgattattgtgattggcttttcgaaatctgacatgagtctttcaaaaatttctggtttcagaaagggaaggtggtggaagaagagcctgagatggatcctgaggttgcagagatgatgggatttgggggctttggatcttcaaaaaaatcatgatgattatatgatcacttgtatctttgtcttgtagcgtttttgatccaaagtttgcaactttgtaatctgacacatcataacgatatttttctcattgtgcaagaagaggaatttgatggcaatttatcaaggttcaaaagggtgactaaccatccatgcagacaaaactgttgacacagagtattttttaaacagagaagggccgggccattgatcgaagatgagatcgagaagagacttcaaggtccaagccccgcaggctcgagacacaacttgaaccagcctaattacaaaataaaaccaaatagtagatccgaaaacagagttgtaattaaagttgcgatttgtgcactttatttacaagactcaagagaaccatcatcattgatccatagctcaacaaaaccctaattatgtctactgctgaaatcttcttgtatgttcataccattcttcaagcaatctgctttctagatacgatccagccggaggatacattgggccattgttcatgcctgaagacgtcaatttagtttgtgtatcaggtactgcatatgcttgactctcaagtatcttccctattctttgcatcttttggatctcgtcttggttcatccgataaccaaactgtgagccggtgtaatcgttttgcgtgttattataatgctcgttagccacctgagacgatggtgggatagcttgcatcccaagcaacccattatcagtgttataattcagactattgacatgactatatgagtttctttgccatccaccgttagccatgctaaagtttccttctccctctcccacgccaccaattcctatcaaagtaatgattttttttctttcttttaagtctctcactcaaataaaaaaaatgattagcgtaaggtccaaggtaatgtaccttgagaaaagtcatgttgaaggccattgttgacgttgaagccaactgtcttgctgtggccgttagatgagttgttgttttcaaagccaatatcgaagtaaagagattcatgtaccgggaaagggactttatagagtttggaccagaagctgtcggtcagaagcttctccaagttcttttgcagaactccgggaggaaaatgaagtgtatgtctcctgttatatagtaaatgtaaggcattgactcactttcaacgttactaaaaagcaaaaaaaaaaatgattcaagttaaagcaggaaacctgtaataagaagcctgatctccggtgaaatcgtaatccaattgtttccattgagtgtgttttcctgcctgtggattagtctctgtgaagaatgttggacgttttttcaactgcacataaacattctcaaagatcattagtcaaagctcataaccttcgaaatgtacaagtatctttaaatagtacctcgattttgaggattccagtttcatcacgtgaattaatactctcttcaaaagatgagacatcattccattgaatctcgatcttactcttcagcctcggcatgttagccactggttctccgaagagaaactcccataaaagtttcttctttgcaaaatagaatttggccacaatgtcatcagggtttttggcaacgaagacacagtcgccaatcttgatcgtggagattgggaaattcatagcttttagtttctcaggagacttgggaagagttgatgtctttgatgagttctctgtttgttgatgaggacatgtgtagtgtactttgaggtaactttcaatcttgttgataagttccggagtttttgttagaggcaagtttagacgtggtccctgaaaaaacattgacaataaatcataatttggtttataaaagtaagcattccaaaactaatagccaaatatctgataaaaacataactaacaatatctgagaggtaacaatcagggagatccaacgttgaagaagaagatgaccaagaaagaaacgttttctttttcgtgaatgaatcttatattaaatctaaaaccaaatatatctacagaaatttttctaaaccctaaaaccctaattcttcttcagaacagacttaaactatctgaaataattactaaagaaagaacaaaaacagaggatgaaacagaacgaagaagagagtacgagacaacagagagggaagagcaaagtagaaacagagaaagatgcagaaaaacacagagaatcgatatacctcatcaacaaatctgttatggttgccgccaccttgagattcttctcgtgatctcttcatggacatatcaaatacttatctattttctttttgttgcttaagcttttctttatcactgcgtattcagatttgcctcgctaacagaatatatataccacgtttttttaactataattttgtttagggtttttagtatttgtatttaggttaccgcccgtcaaagtccagataatcaaatggttgacgtaatttacatcatcatattattcaattattatcatttttaattataatatcaaactatttattggatcgtaacaaaaaaaaaatagatgtggccaattgagtcatataattttaaaaaagaaataacattttcttatttgttcttaaaacttacatattaaaattaagaaagaactcaattcgagtatattgttccaagccatcaccacgcgtgcatcacctagatttccaactttttttgtttactttacactacaaaagaccatgcaatcattataaattagattaatgtgattgtataatcattctagagtcacctttataaatattcgcttatggcggatgacgtgagaaaatctgaaatgtgatacgacgtaattagtccattaggtgcagataaacatcaataccgtgtgttgtgttgtgttgtgtgtaatgtactaatgtgtatcatcaaagaaagctagtaaaattcaaacgagacaatacctttttcttgtaatggttttgctatttaattgtttttgcttcattcagcccaaatagaaacaaaaaccacaacataattgtatatatggtcttactatttagttccttgtgagatttatgaccactacttcactagattgaatagtttatttacacatttttgattggttatccactcataagtctaaaaataaagcgaaagatcgactccaccatcaacgtcagcctgtcacatcttttggcttgttaggcatttcacacactttgatggggttggtacaactttttaatacacacacacacaaactctatttttttgttttgagataatatataacactgaaattcgcacgtgattttctcttttgtcaatggtacgtacaaatacatatatggatgtggcaagcatagagcatgtgtgtgcctgaaatctttgtagggtacggtctgtattgcctttttcttatggctttccatttatggaatattaaataattgtgactctttccatcttataggttagtatgattcatgcatctctagattcgctaccgtaccacacacaagatatgtgatatctatccttttgatatatacgttcaaaacgaattaaaaattgtaaaataagataaagaatttggaatttgattgattttaagatggcgtgatgaggcttttgtgatcgttatcagattttgtgctaatgatggatttcgatataaagttaagcgaaagatctataccaaaacaaaagtaatctaaagatgtcaatcttcattggacccttttctatccttgttttttctccattttatgtcacatcttcaagatttcacaaaacctttagtaaaacgaagcaatgaaggtcgatttatgcatttaatttaagaagaagaaaaaaagaaaaaaaaaagaaagtaattttaacattttgttttgacttcaaagttcaaacttcagatgtatcttctcgtactagtttaagagcactctgagcataagaagtcacttatgttaaattattgagtcaaacatcagaaaatgaaaggtaaatatatctggttttgcgagttagacctcttcaggcttaatgccacaatcttttcgtacggttttctccaaatacaagagattaacatcttcttctttattccattttttttattcaacattgattacgcaattacgtagttaatcaccttaatgttagccagcagtagatagccctccaacagagaattgaaagaaattacggtgaagagcacgcgcaatagaatgagcaatgctagtcttaccaaccccgggaggacccgcaagacaaattatcttccattagtaactcaattctaaggacatgatttttctatatagaatcaagaaacagtatatagagagaccaaccttgtggagtgcctctaagtttttcaacagcaatgtgttctattattctttctttcacattagataagccataatgatcctcgtcaagaatcttttctgcagtcatgacatcacaattctcaccactgcaaccaacattaatcaaattttacaaataattttcatgatacttcttcaagcacatgagcatagtgtatatgatttgaaccaaatcagcaaaacctgtaatttccccaggggaatacggtcaaccactcaaggtagttgcgagcgatagtaaagtcgttaccggtcttaaaaacctccagtttcgtaagctcttcatcaataacttgcaatacacgttttgggatttttagcttattaggcttaatcctttccctaaactgttgctgcagagagaactattgtttttagaaatcttatgatcatgctataaccttacttcaagatacccttaaaaaggaaatttaccaattttaatttaaaatgttgtacatatttagcagtaacaagacagttgtgtttttgtaaattacgaagatttggagggtagctgaaggtacacacgacggatgatggaacatttcattttgaggtaatgagagttagaagaagaagatcagcctacagaactaagaatcgatgataaaatgaaaacaacaatagaggaagatcccaagtgagaaacttctcatatttcttctaatggtcataattgaatgctagatcgaatatcttctcatattcatccacgaagtgaacatcaagcccttctttcatgttttccgcaagctcctcaaagtctctccgatttgcttccgggaatattattgtcttgatctgactccgtcttgcagctatagtcttctccttaacctgagagagagagagatattttgtgtattaaaatgaagtcaatagaagaaatcagtaacccgaaagctaaaacagagtcattgtagtgtgttacttacgccaccaattggaagaattctaccagttagagtgacttctccagtcattgcaagatccttccttacaagcttcttcatggcaagtgataggaacgaagtgatcatggtgcagcctgcacttgggccatcttttggtgtggctccttcaggaacatgtaaatgaagcttggaattcgcaaaaaagaggttctccggttctttctcaaacattattcttctagcgactgtgtgagcaatctgtgcgctttctttcatcacatccccaagctgacccgttatatgaagaccaccttttcccaatccttcttctacaaaggttgtctcgatgtacaacgttgagccacccatggatgtccaagctagacccatcacaaccccgacaggtgtctgttcatagatcttctcttcctggaatactggtttgcctacgtaatctgcaaggtttgattcatcaatcataaccttttcaaaggttttagctaccaatccgctctgcttagtctttgattctgttgagtccccagttgctgattcgagtatcttcataatatcagccactttcattctcttaacctctgaatcggtcttggccaaagatttagtatctttagtgtcagtaacatcaaaagaaactgctccttggcgtactagttcaagagcaacctgccaaaaaggtcaaatgattttagattctgctgattctagtaaatagtttgagattcaagaaacatgcgacattgcgactttgtagcaacttaccttacggtaaatcttctcaatctgcttttggagatttctaactcctgcttctctacaataattttctatcaaggaaagaagagctgcatcactcaaatcaacatgttcaggcttaatgccgcaatctctgcatgtctttttcaccaaatagtctctagcaatatgcattttctcatcagtaacatacccagagagatcaatcacctccattctgtctagcagaggacccggaatcatttctatcacatttgcagtgcatacaaataaaacctgcaataaattagtttagaccttacgtcaaacacaaaactgcatatcatgaatatcaatacacagagttttcctgaaccgtgatggatcaaaaaattgcaaagagtagaaaaaaccgccatggcaaaagagtaaaaaaacctttgataagtcaatagtaacattgagaaagtggtctaaaaattttgcattctgctctggatccataacctccaacaacgcactggctgggtcgccagtgtggcacctaccaagctgccaaggaacagcagacaaattattgcaaaagcgtaactggatatatatatgtttgaatagaaaaaacaaaaagccaattcaaatactaacaagctagctaccttatcaatctcgtcgaacaaaataagaggatttgctgttcccacactctttagacattgcaccatctttccaggcatggcaccaacatatgtttgacaatgcccctaaatagtgtttaagagaatcatatatgattatttataaatatttgaattatagttttgccatgtatatataatataccttaatctcagcaacatcggatagtcctccaacagagaaccggaagaacttgcggtcaagagcacgtgcaattgaacgcccaatgctagttttacctactccaggtgggccagagagacaaatgatcttccctgttgacacattttacaaattctcaccttcagaacttataaatgatgatgacaaaaagttttagcaatgaaagctgaatgagaaaggtaaagttacgaccttgtgaagtgcctctaagtcttcccacagcaataaactctaatattctttcttttacatcagataatccgtaatgatcctcgtcaagaatcttttttgcccgtaggacatcaaaattctcataactgcaaaccaaattaaaatgattataaatgagacttctcaatcagtgcacaagaaaattaatctaaaatggtgttataactctcctcgagacatgagcatgaagcatgacaaacctgaaatttccccaaggcagcacggtcaaccaatgaaggtagttataggtcaaatcgaagtcgctatagttttcttctaacatctccagctttgtaaactcttcttccatgacttttattacatgttttggaattttgtctcttttagtatcaatccttacccttatctttgctgcagaaaacaagaaaagaacagactttataagcatcaagctgttttccagtcatcgacgtacaactctaggaactataacaagttactaagttaggcctcatgaattcacaaaggtgcactctgaaaacttgaacctctctggacaatctataataaaaaaacatagaatcgaaaatcttcttatagtagtgacaagtagtactaaccagaaagtgaagatccgtcatctgtctcctgcattgggacacttaattaatacacttaatatctagcaactaatcatttgtaaaaatgaaggaatgacgtactttaatcttgttaatttctacttgttttttcaccaattccaacgtcaactctagacgtttatgaacctggatcgaagaaaccaacatgagaagctgactaagaatggaatatcatcctgtttgaggtgatctcagcattaaaacgtaacagtaatagactaatcgttaaactgcttacatccagttctgtaagaaccccctgatttttatgtttgttagcgccagagatcccggctccaaaatcagctaaatgttgataactgaagtcacctatatcctacagaaattcaaaagaaatctacttagatactgatatgttgacatattttacactcgcaagcagtgccaaatatgaagcaaacatgcctgggcatatgtctgaacttgatctctccagagtgaatttgtctttaagacttccctaagagtcgaaataacttcaacgtagcttgccttgatgacagcattgtccttgtcatatggcttatcctgcatagaaataacaaacgtgagaaggttcaaagggttatagattccagaatttcataatgaaatagaaaccccatttcataaaaggaaaggcataaaaacagaaacaaacctttagatggtcaactctgacggttagaggatcttcactcacctgtacaaaaacagaacatggttttcccaatgagagaacaataacttgataaaacagaagacacatatccttttagtagagagatatcgaagccagtttctccattaacataccatctcttctattataagtcttctgcgaccaacaaggatgacttgctcaccttggatacttgaaatctgaaaagttggcaatggttaagtcgatagagatacaaagggaaaacacagtgcttacgtgcagctagagagtacctgagcaagagtgccaacttggtgaatacggttaagcaactcttttcttcttttcttttttggtttccctttgactttaaacttctcaacaacattatcttcagtttcagagcgagaagatgaatcagtagacgcgcaatccttcaaaaggaaagcccccacatatggagattgttgtcttgtgctctcttgtaaagctgcaagaactttaggatcctagacaaataaaaagcttacacatacaggtcagagaacacaagataacaaaatccattttttcactaagtttcactaacataccttgacatggattggcatgtaaaagccaggaataagaggtttgtgaggcaacggcaatgctataacctacaattaaacaaggtaaaggattcatcgaaaattcaaaagcatatacataactctgaagaaaaactttttaacttgctaatcatattgaaacttttgtcaattgaaaaaagtgaactttgagtgaaatttgaacaaaccgttagagaatcgtcgaggttagggttagttgagagaatcggtgaagaagataagagatcgacaccgtcactgcgatcggagaaagaaacacgacgacccaataaatcgcgagaactccggttccatccggtaagctgagtcggtgccctgaagagtagtagactctgaaccggattggatccgatccgaatagccggaggagtcacatggcgggcaccgtagaaaacgcgggaatttagggttaagctttgtgtaagatgcaagaaaccgtagtacgaaggtagacgaagagtcgtgtcaaagccactcgtgttaaacccttccaaaaattagtaaaactgattaacttacaaaatttgtaacattagtttaggtaattttctggtccacttctctgttaaatcagtgttatagtaatataactcttattgattgacaaaactcgtatatttacgtttaggcatcatgattacaatcacagaataggattagctaaataccttcgtttatcatccttattatagtcgacaagtcttacgaactacgagattagatttctttctttctgtcttgtccttttgagattcattctacagacttgtatttatatgcaaagatattttctaagaatttctttatttttatcctattaattataaaactggaaaaataaacaatttttttttattatccttgttagcaataattaagaagataaggaaactttgaagaaaataaagaatttggacttgtttgttttggataatggaagaatttggagttttaattttgtctctctttcttttctttgtttcattcgaatgtttacttttcaattcacggaagccagttacaataaagttcgaaataacgaaaaccttaaatccaaccgcatatatacgtatataaattacactagttaatataatattacagaaaggacatatataatacatcaataataatggtgaaatcaatcaagaagagatagaaaatcagcctaaagacttctctaatggtcatagccaaaggctagctcgaaaatctgctcatattcatccacgaaatgaacttcgagcccttctttcacgtttctcgccagctcatcaaaatctctccggttagcctcagggaatattatcaccttcacttgactccgtcttgcagctatagtcttctctttcacctgacaaagcgatattaagagatattttctgtattacactgcttaatacaagaatttggtaactaagaagctaaaacagagttattgtggtgtgaattttcacttacgccgccaatcgcaaggattctaccggtcaaagtgacttctccagtcattgcaagatccttccttacaggcttcttcaaggcaagtgatagcaatgaagttatcatggtgcagcctgcgcttgggccgtcttttggtgtggctcctgcaggtacatgtagatgaagcttggaattcgcaaacaacttgttctcgggttctttctccagcattattcttctcgcgactgtgtgagctatctctgcgctttctttcatcacatccccaagccgacccgttatatgaagaccacctttgccttctccttcttctacaaaggttgtctctatgtacaatgttgagccccccatggatgtccaagctagacccattacaaccccgactggtgtctgctcatatatcttctcttcctggaatactggcttgcctacataatctgaaaggtttgattcatcaatcatatacttttcaaccgtttcagctacctctccgctctgctcagtcgttgattctgttggatccccagttgccaactcatctgtcaacacagtggatccttctgcagaggtctctggagattccaaatcagtcttggccaaagatttagtttcttcagtgtcagtagtaacatcatcagaaattctaggcacttcggtggatgccgctttgcgaacaagtttaagagcaatctgtaagaaaatcaatcaattcagatcctcggggtccaagtaagaagtttggaatgttcagtgtacttgtaaacaaacttaccttacgaaaaatcttctcaatctgcttctggagatttctaactcctgcttctctgcagtaatgttctatcaaggaaagaaaagctgcatcgctcacatcaacctggaaagaggtacaaacaacttgagcaaaatcttttataacattcaaaccgtaataaaataaagaaaacagcaaatagttgtgagtgagacctgttcaggcttaatgccacaatctctgcgtgcggttttctccaaatagtctctagcgatatgcattttctcatcagtaatgtaccctgagagagtgatcacctccattctgtctagcagaggacccggaatggtatctgtcacgtttgctgtgcatacaaataaaacctgcaagaaatttaattagacctaagttccaacacaaacttcctattatgaaaccaatactcagatcggatcaatggcttccggttttccttcaatttggtggatcacaaagaaagaaaattgcaaatgaaaaatgtaaagagaagaaaaaatggcaatgaaaaccttggataagtcaataggaacatcgagatagtggtctagaaaatttgcattctgctctggatccaaaagctccaacattgcactggctgggtcgccatggtggcccctaactccaagctgccaaggaaccatagacacttattgcaaagaatttcaagctttaacaaagaaacgaaactaattcattttgactacaaactccaaaaagccagttcaaatactaacaagctagctaccttatcaatctcatcgatcagaacaagaggattttctgttcccacattctttagacactgcaccatctttccaggcatggcaccaatatacgttcgacgatgcccctaaacaatgtataagatgatatgttattatttctacagatttcaatcatagttttgtcatgtgtataccttaatctcagcaacatcggatagtcctccaacagagaaccggaagaacttgcggtcaagagcacgtgcaattgaacgcccaatgctagttttacctactccagttgggccagagagacaaatgatcttccctgttgacaaattttcaccttcagaaattataaaatgatgaggacaaaaagttttagcaaagaagattgaactagaaaggcaaaaatacgaccttgtgaagtgcctctaagtcctcccacagcaataaactctagtattctttcttttacatcagataatccgtaatgatcctcgtcaagaatcttttctgcccgtaggacattaaaattctcatcactgcaaatcaaattaatatgattataaatgagatttgtcaatcaatgcacaaaaaaatgaattacaaatgctgttatatataactctcttcaagacataagcatgaaacaaatggcacacctgaaatttccccaaggcaacacggtcaaccaatcaaggtagttacaagtcacatcgaattcgctagaactggtttctaacagctgcagttttttaagctcttcttctatgacttttagtacatgtcctggaatcttgtctttaatagggtcaatcctccccctaaacttttctgcagaattaggcgtcatgatttcacaatggtacaatctcaaagttagaatttctctggataatatcaaataaaaaattcctatagtagtagactagtagtactaaccagaaagtgcagatttgctgtctgtctccccgccaagctcctgcattggtacatttaatagtcatcaaccaacaatactatacatcataaattagcagctgtaaaattagaggcgaactgaaaaccttttttatagcattgatctgctcctttagtatgatacgacgtctatcgccactaaatttttcttcaacagcttttgctatggattcctaaacacgaattcaaagagataaggattcattctatataaactaatcatttacaaagatctagtagcacgagtcagctggacagatgcagacaagtgaaggaatgacgtacttgaatcttgttaatttcaacttcttttttcaccaattccagcgtcaactctagacgtttgtgaacctggatcgaagaaaaaaacatatgagaagctggctaagaatggactatcatcctgtttgaggtaatctcagcatcaaaacgtgacagtaatagactaatagctaactacttacatccagttcttcaagaaccccctgattttgatgtttgttagcgccagagatcccagctccaaaatcggctaactttggataattgaattcacctatatgctattttagataaatctagtaagatactgatactcttgacatattctttactctcaagcagtgccaaatatgaagagaacatgcctgggtatatgtccgaacatgatctctccagagtgaagttgtctttaagacatccctaagtgtcgacatcacttgaaagtatgttgccttgatgacatcatcgtccttgtcatatggcttatcctgcaaataaataacaaagaacacgtgacaagggttaaagatttcagcatttcaaaagaaaacagaaaccgcatctcttgctcccatgcttgtatcataaaaggaaaggcttgaaaacagaaacacacctttagatggtcaactttgacggttaggggatcttcactctcactcacctgaacagaaacaaagcacatggttttcacactcagagaaccataacttgataagcagaacacacatgtgtaagatatacacagagcttctgaacaattgaatctttacttttcatgaacttttgatcctttaaaaagatatgttcctttaacgtaccatctctgttattcgaagttgtctgtgaccaataaggatgacttgctcaccttggatacttgaaatctggaaaattggcaacagctaagtctattcagacagatataatcatataaagggaaaacatacagtgctaacgtgcggcaagaaagtagtacctgggcaagtgtgccaacttcatgaatccggttaatcaactcttttcctttcaacttctctagaatattctcagtttcagagctcgaagatgagtcagatgacgcgtcatccttcaaaaggaaagcccctgcatatggagcttgttgtcttctactctcttgtaaagctgcaagaactttaggatcctagacaaataaaaagcttatacatacaggtgagagaacacaagataacaaaatccattctttcactatgatttcgaatagctaagttgatgtaagataccttgacatatattggcatgtaaaagccaggaataagaggcttgtggggcaatggcaatgctataacctgcaattcaacaacataaagctcaatgaaaacaatcgtagcgaagctcgaggaaatggttttgctataaaaggttctagcttttgcctgactataaaactaggaatgatccatccaaatttgcgtatatcaaaagatcagtatactataaacacactcaatttcttcaaaatttcgaattttccaaccaatgctattaaagtttatagttttaactttccaatcgctagaaccataaagaaaattttgccaattgagctgatttctctatgttctatgaaaaatcaaagcatatgaagtgcaccagccaagttcaattgtttctggaaatcttacattccccatgatcataaaattccccatagtcgggaaaaaaaaaagtgtgatcttgaaaaaatttgaacaaaccgttagacaatcgtccaggtgaggtttagctgagacagtagtagttgaagactttgtgtcggaatccaagtcggaggaaaaagaacgacgacccaattcgtaggaactccggttccatccggttagaagagtcagttgcttgaacaatagattcttaaccggggtagaccggaatcgagtagccggagtcacgtgatgggaagcgtaagcagtcggagtgagaaacttcagcatgacgggggaggaagatcttgagtagcgaatttgggaaattagggttaagcttagcctaataggcaagaaaccgtacgaaagtgaagaatgttgtagacgaagactggtggtgtcaaaagcccttcataaaccccttcccaagaattaataaacaaaaaaaaaaaaaaaggaagaaaacgtatttttgggaaaaggacatccactgcctccaacgatgtcgtttcattgcatttatatcttattactagtcttaaaccaaaccaggaccggtttgaaaaaaaatcggtcgttagctaaattttgggccgaagtaataaactttatcttggtcctgggcttttattgttttcattttcaggagcccttacggtaccaattggtactatctttcttctttggaattttcgaggaatttgtttatggttaaagtgaaactgaaccggtttgatgatacaacaaattaagcagatgtattttttttatgtcaaaaaataaaaaagaattgtttctttctgctaatcagtataactgttgacaaaatgaaatactaaaaacgtgaaaattgaaaggaaaaaaaaaagagaggatgttgtgtatataacttaattagtactctaattattccatattgttgttctttgtttcgcatgcaatgtacggctccgtttaataattcataagtttgatttctaacatatatcgatgtttttgacagaatattcagaaagatttgtctataaccaaaaaaaaaaaaaagatagaaaaaatttaagtgcacacatacctaatattttgttcatgaaacaaatcattgtcatcattattaatattattgtcctgaattgggataaccaaaaaataatcaatgaggataacaactaatcatttgatttgggaataataaataaacaaacagaaaaggaagaaaaaattaagaagaggatatcaaagcgtgtctgacgccaggaggcaaatctctctgtcatgactcacgtttattgcttgaaaccccacatttgcattgtttttctttgctaattggatacttttgtttcttaatttctttgctaatactttgtctttttttttcgtatgttcttacttcttactagcctaaacaaatacgaaacatatgcgtttcccaacccttaagtaacttttgacggatagatgttagattagttataatccttgacatggtataaaaatatttaaggaaaacttataatgttatttagtatgtatatatagaacttgcctttccacttataaactgattgactagtgcaatccaaaacccaattctatgcttttcgaaaaaaatcaactaaatcaaattattattttctaaaaaaaaggaagaaaagtataaagaacatgttatatgtttcacaaaacaccaaatactgaaaatcttttttcgaaaaaatagagagattttgagccaaaaaatgtggatgataaatagccacaacaaccactaagcctaaggtgtgaaggtcgtgaaataaaacaccatcacatgcatcttctctttttcctattcttttccttttttttttgttccttctttaaaaaaaaaactcattagctttttttgtttctttatgttaaattttgtttgatagctatttgttcgatctattggttatattgccaccaatcattgccctccacattattacatcaaactcctccattccatcgccaattttgttcttttcacaactaaaaatctacaaactaaatattccacgtcataacacaaatttacgccgctcaccatcataaatagatatgtaaaaagtttcaagtttagtctatgagtaaaatatctgttcaaatatctaattttgcaacgaagatagatattttcgttcgacgtcgaaagaagaaaagatattttttgttcctgaatcatttttctaatctaaaaatgcattaagttcaaactgaatttttttcattcaccagttcaatcataattggccaatgtgattttagacgtacattattattaaagaaaaataaataaaaaataatggtattcaattcgaaaaacccaagaaaatatagaaaataattgatttaagggtggcttctccaatctctcccaaatgtttatatatagagaattagatatcccctccaattactcaaaattattatcaaaataagaaagagctcaacattgttctctgactctataaataactgttcttggaaattttccaagagaacaagaaacaaaaacaaaacgttgtttaagtgtggttctatagatttcttgtgaatgtcttctgaacaaggaaatggatcgaatccttccacgtcaccggaggtagaagggactaaaacaatcccctttcgccggagattgcaaagaggacaaagagttttcgctccaaagctgatggaggctctacgtcgatcaagggtaagctctgaagaagctccggtaaggcatcttagtcgtagatggagagccacaacggcgcagaaggtatattccctaaagctctacgacgctcttcaacgatcgcggcggagcgcaacagtccgggacacggccgacaaagtccttgcgacgaccgctcgtggtgcaactcggtggagccgagccattttggttagtcgattcggaacgagtctgaggcggcgtaggaataccaaaccggcgtcggcattagctgcggcgatcaggggaagtggtggaagtgggaggaggaggaagttatcggcggtgggaaatcgggtccgggttttgggtgggttggtgccgggttgccggagaacggcgttaccggagcttttggacgagacagcagattacatagcggctttggaaatgcaagtccgagccatgacagctctatcaaagattctgtcggagcttcagccgtctactaatctcggctcggctttatagccgagtgtataagccgatgaatttgtttcaattaattcttttacgattttatcgtgggaatgtcttattgtttttaatgatttgtttgccctggaaaaaaaaaattgtcaaaatcatcacgagttggacgaaaatactatgtttttctaaaaaccttataataggattcgaaatattttggtgtcgtttcacaagtttgaattgtaaatattttctaagaaaatgaaatttctaaaaaaaaatttgaatataataagtgtttcaaatatttactagaagcataattccagaaattaacttttaaagtttaaacccaacgatttgtctttagtccacatatgtgctgatgctcatgacaactttgtatatttaagataaatccgtaagtaaaaaaattccatcgagaatttaaatgtgtcaatttggagatattcctcaagaatctaggttccaccagttagatataaacattagaggttattctaaaataatattaaaaactcatttagtttctctctaaatgtgtatctaatttataggtccgttgtacgtatcggatattaaaatcaattgttcattcacctaataaaattttaaaagctatatttaagaaaatgtaatttcgatatttataagctatatgccaaaaaatttgaattttaataaaagtataaatatagacggagaaggcatgtgcatgacgaccctacggtccgactcttttgctcaaagtgcgtcgcatgtgagagacctctttatctgaatttagtttcttctcgaacagttttttttttttttttttaaatctttaatttgtaagaaaattaaattcataaagaagatacaataagttaaaacgcctttcgtgtgtcctacaacttaaccaactttgtgaaacaaaatgagtgcatatatcatactttgtcctcacaaaaatggatcaggattatctttagttatagctaaattcgtacatgatgaataatatttagaccaataccagccaaccagtttagtttggtttatggttcgctaattacttaaataaatctgaaagtagataacatttttaaagttctgacgatatgaatttaagttgaatgtttgttagcctttgaagaaatggttaacgtacgttttgcgaagttaattctcagtcaattatcaacaaaagaaaacacatatttaacctatgatatttggagcaataacatatgaatgtaaacaacattagggcattaattaattagtagataattatgaaaatctacgtccatataacgatcgaggacatggccgacgtgatacgtaggagcaaaaattcatataggcaaccaattgtggctatcaagtggtatccatccctttagtttttatgcaaaccattaattcattttaagtgacaaaaggaaaacacggctttatatagctagattgcaaaattatttgcgatgaatatatcatgattgatataagaaaaaactaatatacgtacgatttccaaggacattccactgttagaaaaaaaactatcgagaatctaagtgatgatagattaacatgttagaaaaagacaataaaaagaaaaaactatcgagaatttgagggattacaaaaacaaatgaaagagaggaaagatttgccattaaagaggtgacacgtttgaagagtaaagcctcaagaaaaaaaagagatgacaacgaaaatggatggagacgtgagagagaaggtggcataataattggggtcaagtgtgagatgtcttctttgattccttcaaggcttaaggaccacccaccaccactttctcacctccccctcttccttttttataattatcctcgtgcttccgtaatcttctatactacatagggattagtcagttgcgaatccgaaatgctatatttcgtgaatctcaagcctccattgaaaacacaataccaaagacaaaagttgcatactgtttgatatatgtctcactgattagggatgccatttaggtcaggttcggtctcaatccaaaaaatatatattttgtagccttatttcggtcttgcttcaacaatattgatcagctctatttttcaaataagagttaattttgtggatagatattcatctagtgcacatataacaaaatgaaaagaagacaaattgatgaacaaaacaaaaaactgatggttccacaatgcaacatgataggactcgaccaaaaaacttgggacttacggattttcccaaaaccacttaagattttcttttttatgattcaaaaaataaaaacttctttcaactctttttcttttccctttcatcggaatttttacccttaagaaacatccttacttgtggctaatttgataactagaaaacttcacaaaatccttgaatatatgccatttttgggatccgcttgtaacaacaactatcatatataaataccaaaaatggcccctacgttaaggaggagtggtcattttcttatagcatcggcaaattaagaagtgtcattctcagagctgctgtttaagcacgttgacccgaaagaattgacccatcagagcttgagagcatgatctgatatttgtctctttgtttaccattggaccccaaacgcagccgaccaatccggttacggcttttgccttttgggttttaagtctcaaggtttttcaaccaacaagacaagatatcaacttttctacagtcaaaattgttgactgatcaagttcacaaatccaatggtcacatatcttatatacagctaaatcttatttttcacatgctgatgactttgttgtgccttcacaatccaggattttagttttcatgagtgatctcgtttactaatttacaaaattaactagagaggaggcttattagaagccactttcatatatatagagaaaagttactacatctataggtttctcaaggtaaaacacactttcaatctagaccaatggagaaaaaaaactgttacatttaacaaggaaaatgtcactaggtttgtttctcaaacatcaaaaccaacattacttctactgtctattttgtccaatactgaactggtttgacaatgatcattcaagtactagagcttattccggcagtcgagagactcacagttacaacatagagacttgatcaggccttaatagcgtcagctctaggtttccatagccctaacctgtatttctggccatacttcagtatcagtttcctctgcaaaaccaaaattcagaactgtgagatccataaggtaggagacttgaataactgagccaacagaacatatatagtataaggcggtgttattccataaccccatcaacgtttatgtgacaaaataatatcaggatatatatgataaagttggataatgaaaataagaatacagatatatccatcccttcaaagttgaagagcttaaatcattaaccctcgaacaaattcaattttaatggactacctaaccccctaagaacattggcatacaattatggtttcagatagtttaacaaaaaaggccaatgaatattcaagcagaacttggacttggtacttacatgtttgcaaggaatgccaagtttcttgagtctgagagtacgcgtcacaagaagcttatgaaggtcaccaatctcagtttcaattttggcaatgtgagtctcagctcctcttccaatcccacctagaaactctggaatccctaccttcactgcaataccatatacaagaatcaaacctagaaccagattaagatttgaaaccatatccaaatcacattgtctgttaagtgattcagggattgctcgaaacaatccaaaatttccaccaatcattggctggatctgaaaattttggcctttagaaaactcaggtactgctaaagctctaagcactgaaaaccaaacgaaacctactaagttctcctgatataatccaagcaatcaaagcctaagctttactcataaaaacctccagatcactgaaacttcatagagactagagatacacgcaaatttcccatctttatttctcggaaagcactagagatacataggaagaggcaaatccaaatgaatagagagcacgcaccgaaataagtggctggtttggaggagtggaatctagggaggccaagagtcgagcacgattgcgctgtccctagagctgctctcgcgctctgaatcaatcgtgtccacgccatcgtcggtgctcttcctctggtcgtctgagccaaaacctggatttggccgtttgggtttttcttaaatgaggatgcgatacggtgtcgttcctgtgggaaataaatcaatacttctctcaattattagatttatgaatgggcctagcccattaacccactattttgagaaaataagaactttttatacgctcgcaaagtgtttgtcaaaattcctgtatgggattcagttttgtggaatgctattcagtttcctgctgaagcggaggaagcggttcatgcatacaagaagatctcgaagacgagtatattatggtttcaaatacctttttagttgtttggtaagaaaaaaaatggtggcagaatctgcttgcaaagtgttcgaggaaatactcatgagagtaagctttctccaactcgctgaaaacaaagctctaagaggagtttatttaagttttaattgcagatttctgttgaaactgatgacatggtttaagaatcctgctaaacttatttctcgttggattatcattagccatgcccattagggagattaagtgcagcactaagtactcactcttgcttggttttcaagttagtaataataataaatttgatttttagttatgtttcatctggttagggaagtaagtcagagatatgacataatttgtagaaaagaactactatatagtatatatatacagatgttgttgcactattaatttggttaacctgtataacacatttgttgcaacaggaagttgttatcctatgtctgttttctggacaaaaccaatttatataagaatctgagactttgctgcggctcgtgaacatttcttccggcctgatttggtgagaacgcagacgcaagactctagaagctcaagatcttcttcccagaacaaggatgatgctatttcaggattctgcaatagctgttttgaagttaagaaaccagcaattgtccatgtctggtaaagcctggactgttttccaatgaacttcccgtctcttgtatcgtagtactctggccatcgatcagcttggagcctcttctctgccaaggttactgctttctctgctaactctggtctacccatcttgatgcatgctagtgtgaactaacaaaaatttaaatacatatgtgaattaatggaagacagatatatgtgtcgtctgattaaaagctcatacttacttgccagagaagtgttggccatgacccaccattgtggtaagaccaaggcctacagaacacatacatgtagaaaatatcactgtaagctacttcagcaaaaagtatcaaagcggaagagaagaaaactcacgtgttctttgggtcactcccggttattatatgccactctgaagattctaaagccgggtaacatatcttaagcggcatatgcccaacgagatcgtcccatttctcttcaaccaaatttaatatagcttggttctgttttggtgttcctagtgaggagatgattgaccagaggtttcccaaggtgaagaacctgaaatccatgtgagcaggctggaggtttcctatcaggaatccagagtcaggactttcaggaacccaatccattagccatggagaaacctgttccgggtagatattgaacttgttggtggcgtccatagagtactcctctgtcttgtaacggtaaatttcattgattttgtttttgtcaacccaatagttttctctgatgtgaaatgataatgcgctgagcctgttgctaattgtctttattatatttttggagctatcatttacagttatcatctcacgagaagaccgtagagcggaatagaacaaagcctgtgccaacagaaccgtcatggcatgttagtcaaacttttctttttaaagattataagtaagaaaaccttatatttgggagttacttggatctcaagagggtgaccgtggatacccatacgtcgatctatcatacaagagccatcagtgaccaacagtgtgggaaacatatcaaacccatctgctaaacacaggtttgcaatcatctttatccctgtctgcacatctatcctctcttgaagcgagtaatctcctgtgattttcccgtatgccctcaacaagattatccaccataaacctgaaaattttctatttagaccagcatgtgtgaattaaactgttcaattatatgttgccaagctgaaagaatcaacaattatgtatgacaatgaatcaacaatacaatcttttcttactctatttatggaaaatgcagattgaagaagcagaaaagtactgaccagaatcaacgggagcaacacgacctatagctgcttcgccaaaatctggatccagaacctcttcgaacttgtcctcttcaagcggtaaagttctgactttgaaactcgcaggcattaacccttgtcctggactataacaatcaactgttttctcccaactctggaaccacaacacagacaacaacactaattttcatatctttgattttacttaaatgtttaacttgcagtaaaaaaaattcttagttatcctttcatttaaatgcaaactctttgcttttaaacaacattttgtgttcgtttcagtgtataacatcgcgaatgggcatcaatacctgcaactgcaacgtgtggagaaggaagtttcgaacaatttcgctttctcccttcaggagaaaagccaaagccgaaggtacaaaatccctaataaagacctgatcgtagtttgatggcgttgtatcagttggatctttagcagccaccgttcctacaggagaatcgcagtatgtcactattgaatccctcagcaatctccatgcctcttcctcgacgtcattacacttaacaccctcgaaaccatctctctttacgccttcttcatcttcattgaccgcctcttcatctttctcatctctttttaacctctcgacaactaaaggtttcacatttaagccgttcttggtgtaaatctgatccaaggtcgtgtcatttgcgcatgtggtggaagcagagtgacttcttgcctcagaaacaacctgagctgtaacagagctctgcctgtcggtacaaaatggcacagcatttgtcggtctgatgattctatctgaatctgcattcctgtattggttgatgcagcttgagaaccgagaaggataggatcgaaacgaggtgtctcggatgtatttagatggagagattcttgtaaacgctcggagaatacattgtgaaggtatcatcgttgaatttccaagaaaagtgatggcattcataatcagggtccaagacctaagattacaaaaggctttcttgtgttcgttatttatctgaaaattttgtgataccagaaatgggaaattctgtattaggaagaaaatgtttgtggattatggaactagtttaccgctaatttgatcgcatcaagcattatggtttctattaatacaccaaaacttcattttcgaaaattcctatttctgtacaagtttataattttaatcaagtatttatacatcgtatgtgtaactttatatgcaacgtagtgtccgacgcgtggcagagatctaacggatagcaagcatcgtctttcacggattattacggcgttttggtcaaaagacgagagaacacggcttcggtttttgtctttatctactccgaaccaaaatccgaacgtggggagaccacttgtaaaagccacgtgagcgtccgaacctaaaatgagctttacatttgcatctttctgtctctttttcccatccacacatgtcccttaatcacaagcttaacttaccaaaatccaataaataaactaaattaatacgtattatacgtttataacattttgttaccaaataacaataatgatgcacatgttcttcttatattatagtttgaaacatgaaaatgtatcacatataactatgtgcattactatttacttaaaatcaaatgcttttgcacgtcctagttgtgtttgccgaggattttggagggaaagtttgattttttgaagttcaaactcacttttctgattttcgttgtctccttctctttctctctctctctggccaaataagccaattcatttatttctcatttattggtaatgcattcgctttgatttctctgttcttgtaagatacttatatagaaaatgagatattaaatttagattcatgccataatcagagagatctgattttgaaaacttagaagacctttctttttgaagcttcaagtcatagctcatgtaaagtcacgatcattgttttgattattattatatagatttgaattgtgaaagactcttcatttaattttctctgtattaatggtcaactaccattgttcacatgcacccgcaaaaaaaaaaactaattttttttcttttttcttctcctcatcttcagagttttgagatttgtgattgcctccatgcaagagctgaattagccgaatctggatgtcttattctgaaaaaacgacggtggatccacttctgagagatttggatgagaagaaagagagtttccggcgaaacgtggtgtctctggctacggagctgaagcaagtgaggggccgtttggtttctcaagaacaatcttttcttaaagagaccattactagaaaagtaagtcttttttttttttgaaggaatcccatttattctctgagtgattctcttccttatgttcatgtaattaaatggtggggtcaaatattatttggttgctggttttctaagttttgtaataattgaatcagattgaaatgaatgatttggtttatttctgttgtttgtttgtttgttcaggaagcagagaaaaggggaaagaatatggaaatggagatttgtaaattgcagaagagactggaagaaaggaattgtcagcttgaagcttctgcatctgctgctgataaggtttatccttacacatcaatttggtctcttcataattatgaatccaatctattattagactatatcaatttacttctaaatacttgatcagttcaaagagttatttatatggttcttgaatcctatctagatcaagtagacaatatcttatagctctttgagtcttttggaattcgattcaactagaggataaattatgcaactttagctgtgatccattgatgtattagtgatataagcttaagatttattagtcctaatttctggtcgaatgcattgttacctaacaaatttatgttattgtaatgatatatactcttagttagacttacttaatttgtatcttgtttttgaggaaacagtttatcaaagagttggaggaatttagattaaagcttgatacaaccaagcaaaccgcagaggcaagtgctgattctgctcaatctacaaagatccaatgctcaatgctaaagcaacaacttgacgacaaaacacgttctctcagagaacaagaagaccgtatgactcagcttggtcatcagcttgatgatctacagagaggtctgagcttgagagagtgctcagaaaagcagcttagagaagaagttaggagaatcgagcgtgaggttactgaggccattgcaaaagcgggaataggtggcatggacagcgagctccagaaacttctagaagatgtgtctccaatgaaatttgagaggatgaataggctagttgaagtaaaagacgaagagattacaaaactgaaagatgagataaggttaatgtcaggtcaatggaaacataagactaaggaactcgaatctcaggtacatccatctttttccatttgaacaaaggccattgcacgtttgtgtttgatttgtctaaattctgagtgaaagtttcattctttatgaaacaacaataacagctggagaaacagagaagaactgatcaagatttgaagaagaaggtattgaagctagagttctgtttacaagaagctcgaagccagacaagaaagctgcagagggtaagtatacaagtccataactctaacattcgtgtagcttcttgtttgtgaatcaatagtgttcttatcagttttattgttgttgctgttttgttatgaatggagcacagaaaggggaaagaagggacatggagatcaaagagataagagatcttatatcggagaagcaaaaccttaacaatgagtcttgggataaacagaagttctgggacaattcagggttcaagattgttgtatcaatgtctatgttgatgttagtggtagtctccaagagatgatgaattttgtaatgtataaatttagttgcagatagttgatgaggataatctaactcatgtatgtgtcgtcttcaggtctaatataacagccatgtacttaacataccattagtatatgagttactctgttgacataacagccatgtactttaaatactctgtgacgttatatgtttcgtattcaattctagtataattacataaacggcggacgtatatcaaacagctcccgtagctcagttggttagagcgttggtcttatgagccgaaggtcgcgggttcgagccccgccggaagcatttttgttttgttttccacaaggcccattttgaagctcaatttcaatttaacaaagcctaactctaacatgtaaacgttttcttctcggtagatatgtttcgcattcttataaatggtcggcgaaaattttcaaaatgtttactttttttctttccttgcatctcgacacgtggccccggttcatcctgtaatctttttggaatattccgatatcatatatgtgtatgcatgtatgtatgtatatttgatttctctaattacaaaactacccctactttgtcgtgtttcttactgtccccacttcacagctttgtccaaatattcaaaatgacccatccttctttaattattaatattcggttctttctttcgattaatttaagaactaattataaactatatatatatatataaatatttggctggaaatgtgattatatttatggctgttggttgttgaactagatactcataattttatagcagacaattgtatgacatttaggaagtaattattggacctatgtaagaagttgttcatttaacaaaagcacagattagaaaaaaactgccaaaatgtgatgtaatcaataaaaaataaagttcaatttagtccatttagctaagcaactttgacattgcgagtattgacttctttatttaaaaagttaggaagaaaatggttctgcgaatgtagctactaaaaagaatcaataattcccactaaaataaatgaaaaattctttagattagagtggcataattgctaaattatttatggttaatacataatatgtcagtccaacctataacaacttagtagataaaaaaaaagcagagaagaaaaacgtttaagtaggtataaaaatacgaataaagtgggagggggggggggcaaaagaagtttgaatggtcaaaactcgaaaaagaggaaaaaccaaacccaatgtactttcaaactccaatttactaactcccaagccaacactatctaatctatccccttttttattttattttatttttagatttaattttacgatatgactgtcaacagcgcattatagcaaacgccactcttctcatcaaaaagcagagccacatacattaacattacattagcttcctcatttttattcttattattattattcatcagaccaacaacaaaaaggagataaagagaagaggattcatcatcatcaatcaatccttcattttatggatctactcatatcttgattcttccttctatctctcccttttcttccatctctttttctctgggtttccccggtatgtttcagcaatctcttttttgggtcttcttttaaattctgggtccttcaaagttttgcatacaaaaaaattgtttctttttggtattttagtctcaaatccgatttcatgttagatttttcctctgtttagatcggcctagatttgtttattggccaatatgagatagatagatttctcaatgctctgtgtttttaacatctcttatcttttgttgtttgtgttgaaatttgctatcctctatggattgttccatgatttttttcttatttaggatgctataattttaaattttttggctgtctcctgctttttttttcgtgataattgttttaaatgtctcgttaaaatccaaacttttgcatgttgatagcttcaatatgagttctgggatcacctttattgagtttcaaatctgtgtaattgcctcagttaaactgattgtcttgtaacaaccaagtaattgtaattacatatgtatggtttatgaatcaagagctaacgcttactttgcttatggttaatgttgctgcaggattgagttttttaatctctgattgacagatttgaagagcgtgacaaaggaagaatcttttattaaaacaaattcttctgttttaatcttgggatggcctcggtgggcatagagcctagtgccgcggttagagaatctactggaaacgttactgatgctgatagattacccgaggagatgaaggacatgaaaattcaagatgataaagtatgtttttgtaaaaaggtttcttatgatgtttctgatgctttcatgattttttatttttcgctgacttgattaatgatcactaggaaatggaagctacgattgttaatggcaatgtgactgagactggccatataatagtaactactataggaggaagaaatggccagccaaaacaggtttgtgttgttctaaccaaaacagttacatggcggattagttgagtttcgataaactaagtgaatttccttgtatgttaaatttgcagacaatcagttacatggcggagcgagttgttggacatggctcctttggtgttgtgtttcaggtgagttttggttcttcttctttcttggagtagcttttttatgaaactgtgtctgaccggatctttcattttctttcaggccaaatgtttagaaacaggagaaactgttgctataaagaaagttctacaagatcggaggtacaagaatcgtgagcttcaaacaatgaggctacttgaccatccaaatgttgtgtctttgaaacattgtttcttctctacaaccgaaaaagatgagctttatctcaacttggttctggaatacgttccggaaactgtgcaccgcgtcatcaaacactacaacaaacttaaccaacgaatgcctctcgtttacgtcaaactttacacttatcaggtagattaatatccacaaagtgtgcatacaattttacatctcttattggaaatctttgtaagactctactatgtttggcagatttttaggtccttatcctacattcaccgatgtatcggcgtatgtcatcgagacatcaaacctcaaaacttgttggtaaatccacacactcatcaagtgaaactatgcgattttggaagtgcgaaagtattggtgagtttgatgaatctatctctttggggaaacattttgaagcagagagattcaaccatttattgatcaatgctggttcttgaaacaggttaaaggagagccaaacatttcatacatttgctcgaggtattacagagcacctgagctcatttttggagccaccgagtatactacagccattgatgtctggtctgcaggatgtgttctcgccgagcttcttctcgggcaggtaaatatcttttgtaaattctcaaatcaaacacctttattctgatcaaaacttaattccgtggttaaccgttaaccaatctgttcttttgttcataccagccattgttcccgggtgagagcggtgttgatcaacttgtagagattataaaggtactaccattgtactgatttctctttattaactattccaggttataccaactcaatgtataacgatgtacttacctgtattgatgaaatgtgtaggttttgggaacaccaacaagggaagaaatcaaatgcatgaacccgaattacacagagttcaaatttcctcagattaaagctcatccatggcataaggtttgtttgttcatatacacattgaaatgtaacatgttcagtgtcttctttagttttctgttaatttaaacatttttcatcataatccagattttccacaagagaatgcctccagaagctgttgatttggtctcaaggcttcttcaatactctcccaatctccgttgtgctgctgtaagtatctgcaagtcatctcaccttcattcattctgcaaaatcttttgtttctttgcctgattttgttgaattgtgtcaatcttgccaaccagcttgattcattggtccacccattctttgacgagctaagagatccgaatgcgcgattacccaacggacgtttccttccaccgctctttaactttaagcctcatggtactaccacaccttcctttgtcttcaaaaagtagctaagcagctcaaagtaccataagataagtgacttaaactcgtattaatttgttgtgtttaacagaacttaaaggtgtgcctgtggagatggtggcgaagttagttccagaacatgcgaggaagcaatgtccgtggctcagtttgtgatttgttctcacctgcaaacacgaaaactagagcaaagcagtcgagatattcatctcttctcttctctctccttctctgtattaatattattataatgatcatatctcaatctgatgatttagtaaccctttgtttgttgtatgagtagagaaagagtgaatcatttgtgggggttatgatattgtataagccaacaaagattattttttaaagagagtttcgtgttttctgtctcattacaccatcatatattttatagaagcagacgagatataccaatccattgtgggaagtgagtcggaacacaaaagcaaaatgacgtcaaggaacagagaacctaaacaatggaagaaagactttttgttttgtcttttctggccattgtgtttcccaacagctcaagaattattactattattttttttcttatggtcaaaatcaagaattattttctatgaactaaaaatcccataagggaaatgtttaacgtaaaaaaaaatctttcttacagattgatcactttaaaaatgttgacagaaagttgaaaagaaaaataagttaataaacaaaaaaaaagaaagtggagagaattcaaaaaaaaaaaaaaaactagcattcaagaagatagtctttacaagttgacttgttgtgaccaagtcccttgcacctactacattgcagctgccgcttcatcacttcttccgcaggcgttttcttcttcggcggcctccctggcggtctccttgttggtggaggcgttaccgtcactgccgaaccccctgaactctctcgacacatctctccttctaatagtggaaccggatttatcgactgcgcatacgttgacctgtagtacgcaacagtaaaatatttcgaacagtaatcatacggattacgtccgtaatagtttataaccgctactgcgtggtgacacggcaaacctgttaactgccaccctttgcagctacagtcacactcagccatgttcacgagctcatacgtctctccacggacttggaacaagttgttatctgctgatggtgctacgtgaaccgtttgcgctcttagactctccttctctagctttacttccatggagggagtcaaatttccattggcttcgttggcactaatccgtctcacatggatcaatcccattatttttccacggatcacatcaaccatttgagttattggtagatcgttggcgtcggaagcccagctaaagaacggttcgcctgagtgtgaagtcatgtggttgtacctagcaccacggaagtaagcgttggcccaatgatcaggctggcttttttgcacaatccaatcataagcttcaggtgagaggcctttgatgttctcaacatgcctctcgaatgaatctgctctgggagcgtaagctgcagagtaaaagtcgtcaacgattaaccgcttgatctcatgagagaatggtcctttcaagtctttgatgagctcgtcagtcaaataccgcaaacaatacgcgtgaaacgacttctcaaacacttttgggatcgattcctgcagattcttctgtcgatcagcaacgaaagttatatagcaaggcgtggacagcagagatctcagctgaagcaagaaccattcccagttatcatccgtctccgcatcgaccactgcaaaagccagaggaaacacttcgtcgtccccatccacagaagtcgcagctaataaggtcccctgatactttgatttcaactgcatactgtcgagaaacacaagtggtcgacaagcctcgagaaaaccatgaaccgaggcgtgaaacgaaacaaaaacacggtgaaaacttgaatcttccttcgttgtgaatgtagcgagactgcccggattagtttccattatcttctcgcagaacagcggaagctgtttgtaaccgtccttgtaagatccttgaagctgctctcttgcaatttctttaccacgccatgcctgaaagtaattcagctgaatcccatactcttccttgatgtcgctgacaatgtctttcggtttatagttaggaaagactttcagcttctccttaataatgctagcaacccagcttctactcgtctgaagcccattaattccacccgcaccttcacaagtatgtgtcggattcattttcttaatacagatcagctgagttgttgatagccttgaagcatggatcctccaagggcaaccttcggctttacatttaactgtcactcggtggctatcgttctttttgtagcggaatccaaactgatttgctatggcgtatttccgtagcgcttcacgaaactccccaacatttttaaaccgttgacccactcctgtgattgtgttctgccactgctgtgttcttgcctttgtgagaatatctcctttcggattcgggacttcaacaatcgatgacatcaattcggatggattaataataatctgtgcatcttcagctcggttcatgacttcctccatagtcacagcgggaggagctgagactgagattgagatgggaagctcttctggtcccattgtgtcgtcaatcatgtcgtccataggaaccgggggaatcgcttcagacaacgttgttctgcttgatctggacgaaaaaaactcttagaaacttaaaaaagataaggtgatataatgatttatgtaaaggctttgctaacctgctagctggcatgtttgaaatgtcgggagtagcttcttcgggtaagagatagacatcagcagtgttggagttctcatgaaatttgatcatccgtttcaaatctttatcgttagatatggagatgagcgttttcttgttatccgggagaaagtattttagagaaactgtcctgacatcgcaattaaacatctcaccaatttctgagataaagtctatgaatttcatctgctcgtccacatctatcgcgtgagcatcgccgcctttgtaagacagcgacccgcctttctctgtctggaactccccaccagacatacatattgctatgacccgtttccctgacatgtcctgaaacaagcagaaccatcaaatctcttgattttggtttcaagctcaatgcaggcaagtggttcctaatgctttctcacaaatcgtaataaaactaaatttgtacgtaagagtacctaaacacaacaaatctaagctctcagttccagtgaaagctacataacaagcatatggatagacatagaagatatcacaaatcacaatcactaagaaacttttgtttcaccaatcgaatcgatggtaaaactatatcatctcaataatgaatgcacagtcagagctaaaaagcttgaaactttcagattctaactcaaccaacaagcaatgagttcctgaaacttgaatctactactcacggaaaccacaatcatcatcaaattgcaatacataaagggtaagattgaattcaaaaagggaggtaatctctagaaaaaaggggcaaagctttcaaattttaatgattctatccaaattccacaacacctaaccttcgtaaaccctaagattgataacctcgaaatagatagaatctgccacctaacaccgagacatcaatactaagtaaagatcaaaagtaaaattacatccgaaatagaagataacgacgtcgaatagctcccacggaagaatcacaggatttgggcaaaatttacaaaattgggcagcaagaaccctagaaccaaaagttttttctttttgctgattttaagaatgggagatcgaattacctcaaaatcacggagaacgatggaaccctaatcctaaaatttgaagttttgtatgatcgaattctctcggaagtagcacgagaaagaagagggaagagcctgacgatgcttggcctttggattttttattttcttctttcgcatttatttttttctctcattattaaataaaataaataaaataataagtgtaactgagttctattggttatccccaaattagaaacgtaaggcaaaatttgtttttttttcttcttttatagaagaaaaaattgggtgaaaaacacacaacacgaagaacacgaaattggttgaagtctaaacaaaatatacaaaaacaaaaacacgaaattggttttatagttatagtctttccgtttccgaagatgaaaccgcgcgatttctaagactacgacacgatacctttttttttttgttggtaaacaaaaacaacatacaatgtgtaaattttagcttcggttcttttgataaaagaagacttcggttcatagatgcaacattgatattagacatgacatcacgagcttataggtcagcagcaatcacctacacgtcgtcttgaagtgcccgactctcatggacaaagcttgccgaatctccaaattcattcgaaacatcgtgccatctaaaagccaaataacgtatctcccattctacgcaaaacgaatggtttacgatttcatcaaaaagaaaaaacgccagaatcagaccagaaagcgatatatgtttatggaatatggaatatggactacggattcgttttatttttaggggtatagttatgctatggattcgtttcgtttaagacaaaaaataaaaactaataatcattgtaattgattacagctaatataactatataatcttaaagcattgcgacgaaccaatacaaaacaataattatgagaatatatatatataaaaagaaggaaatgattctacaacatgttgaagctttaacaatctgttggctatcgttcacgtacgttggttcacgtgatgaaaaagaacagttgagtggagaattttttacccttccaacataacacagttaacttttatatttaaatcgaatctacaaattactatctcatacgtttaatagtgaacttatataaattttcatcgcgtctaaaaattataagaacctttttggattggtagatgcatgagactttatttttttctgctaacaaatataataatcccaattcatgttaaaaattacgtttttgctggtcaaactaggcattgagctctggtggaggtggattacttagctgtgggattgcagtttataggtgaaagattaccaaagaagattaggataatttttatgaaaagatggcatattagatattaattactagttatatatagggatagcttgtagttgttggatatattccacaaagaagcaagaagaactcttgttgtcatgttaaaatattgagtctttttattctccaacagattctttttgactgtttgctctcctctatcactttttcatggtttggttttatataatatcatttatccccaccatattagagaatttcttatacttactctatataatatatgattttagcgtaatcaattgcaatttactgtagccatcatctctattctagtgtgtaagggattattagttccctagctagctcgcttacgttcaatatattattgttacaaactacaacgcctaacttttatattccgcaaggctataaaatatcatgcgtatatttcaagtattatatactactattgtagtttcgaaagattaaaaaaaaaaatcttcaaatcctcgtgcataaattgaaaactcaagaatgacacggatctttgtgaatttagctgatctacgtaataaatttaaattttgatcgcacgttaatgatttgagagagcttttagataattcacattcgtaaaaaataaataaaaaatcagctactcattaatcttgggtggaaaaaatacatagagtataattgttttgtttttttttggggcaaagagtataattgtttcattgaatattttagtgcttaaaatgagaagtgttttggaaaataactaaaaagtggccttagttaggcaagagttgctaagattggtggggaacggaaagaaatgagaagaaagtaagagtatgtttgaaattgatgtaaaagaaaaaattccattttagctaaaacaaataataaaacaacgtttttagaaaaagatttggttccaaaagaattatataaaaaaagaaggttgaggaaagtgtgtgaaaaaagatcaaacaaaacagagaacttggctgcctaaccaatgcttttgttttggagtcaatagaaaccaacacattacatgagctcttatgcaaaacctccaccaccatctgattgtgttaccatggtccacgtgtctccatccatcccttaatattccccaatgataatctctttgttcaaagtcttaagaaatcaacagtttaactttttgtgtgtataatacgtatacacagctacgtatcaatgacactaactcaagatggtaaaaatattatattactggttcacttgttaatattttggtgggtcagattccttataaatacataactaacgcaaacccacctctcaacttagacaccaccaacacatcaacacaacttctatatatttggaagaaaaaactctcttctctttttagtgtctctccttgttcttgtttctgtaacaaaatcaagaacaacgactaattaactaatgggtggtaaaaatagatctcacagtagcaagaggttctctctcttcagcttcttcaaaacacgaagatctcacagagtggaagcagacggctcatgggacgacttcggttacactcgcaaggcaatggctagtgatgaagacaaacgttattgggtcgctgaaccaggcatcgaccgtaaagcgtctgccttcatcgccaagtttcatgcaactcgtgtctctgagtctgagcgccagactctctctccttaccgatccgaaaaggcatgatgaatatgatgatcaagagctacctgatctgattctatgtaaattgtcttctctttttctatgtccttgtgataattcattgattgtgtcttaaatgtagttaataatcaatctttctccacaattatcattcttattgccctctcttcatcttctagctaatttaatcatatggggtgtttttttgttgttgtgatgactgtgtcagttaataaattccaaatacaaaataaccagattcgactttgtatcatgttcttcgtaaaatcgtcataagaaattatgaaagaatggaaaaaggaatactaaatcctctccagaaaaaatgactatcttttaagagctttttggattaatccaaattaatcactagacattcgtaaatgtcacatttttgccaccataatgacagaaaaaatttggagtgaataatactcaaggcttaagagttaagacgaaaaattgaaacaaatataatatatagatcatttaactttacgtttaaattttgagcaaaaaagttcgatcatttaacgagatccattcaaagtaaaacaactaaaaaaaacaaagatttgaagccagctatagaataaaaaaaactttatatgattgatattatttgcatggaggggaggtccttgtttagttcgtcctctcacataatgctgcagttgttgtacaaaaggtacatttacgagtacttttattcttctctttctatcttcctttgcctttgaggcttttcttggttcatatactcttacttttactgccaattattacccaaaatattccctttaatttaattaaatggttgtatgtctagtgatctcttagtggtgccctgcataactcatgatttgtgaatgtgtcggtctacaagattcgatcaccacaaataaaataacaatcactcacaatacatagaaaaaagaactaacaacttggctttaattacactttcttgacgcagctagttttgatgattaatgcatatacatagtgcttcgtacttttcgaagagtgcttaacgatgacaaataaatacttgtggacagtagtaacctcatattctgtatacaaaagagaaattcttagtttgatttgccaaaaaaaaaaaaaaaaaaaaaaaactaagaatcgtgaaaaggtgattggagtactatgttggaagactccttaatggtcatcagtactcatcggtctatattaattgactaaattagagtaatgagtaccatctatttgcacccccacatggatctccacccccatattgtttaacaaggatcaatgttgcaacccaaaataatacaaggaacaaaaccaaaactagaaactattatcgataatgtaaagatggagaaaatattatttctagttcattttcacatatatgctaaggattacattatgtttttaaccgttgttttatatatataattaatagattataaactaagtagtaaagttattttagatatttgtttaaaaaccaacattgaaaatataaaatgatagttttgtgaaaataaataaaattttaaaacgacattgaatatataaaaaagagagaaataaattattcggcattagaacaacataaaaaacgaatattgattaaatagttaactttaaatccatgaaatacatagagaatacatatctagggttgttggtagtaaaagttgttatcatccatcaaaggatgacttatttccttagaatgattcatcatatgatcatccagccattcctcatgttgattctgaatttgactcggattgtaaattccatcttgaaccaaaatcggatatccaaactgttgttgatattgatattgattatgactaagatgattaaaatttggattctgatcataaacaccaaatggatttatcactagagaataactttactggtcagcatcactagatagaaaattactggagaagatattaacctgatttggtcgctggattgaagagataataggcttcaaagacgagaaatcattgattagtcaaggagagttgaaaacatcgagataattggaaaggaataagaactcacttcaacaacagatgttggtgtcatggcatttgtagctcccgaagattctccaggttcaatatgtgattgatttatggttttgtttttgtggtgataaagttctttaagatattgatcaatgtacttacacaaatcttcacggtttctatcagtcaaattaagcttctccccttttccactaagaagttggaacatggcttctttcatcgtcctctccgcattatcgatcatctttttgttgttactctccatagtttttgagatgttttgtctgataaaaccttcgtggctcaccattttcttctcttgctccaactttgtcaacatctcaaaattttccattacatttttaacttctgaattcgatggccagacttcagggtttgagttgaacggactataaatcactgcacatgcttcgattccgcagagaacggaaagctcgtggatttttttcacaagccctttctttctcttattgaatgttgcttttctcattgactcattggtgatgtaagataggtttagcttcttcctcgtcatggtaatgacaacaataaaaaggaatttgtatgtctagtatcaaatatgttttgtattgttgtatgttgtgtattgtttttatcatgagtttgtttatatggaacaatcaactgttcaagtgatgatctcacaaatagctggcaattaaaaatattgtaattaaatgcaccaaagttcttaattaatatgaaataatgcatagttatgccacttggtacaaataacaaaaattattggccaaagtttttgagttggctacatcaagattacatcataaattctggttatgaatgaataatatgagaacaataaaagaactttccatttagatgatgaagatatatatattgtaattaaatttagagattgttttctatgtaagtatgtacatcaaaatacaaattataaatatttattattttagtttgaataacagctaatatgtacattcaataaaattatttacctttcgtggacaataggactaataactagatttagaaaatgtattcaatacattgcatcttctctaatgatttatatttggatatgataaaatactttttggtattcaactaattttacaggttgtcaagtatattacgtaagattttgtaaaaaaaaaattattcttttaaataagatttactagtactaaaggtatttaactggttgtaaacttgtagtgttctagtaatattgaaaataaacatattcttcgtaaaaaatgatcaaacattctcagatatatgaatgatcaaatccaaaaagagatatgtttatatccaacatgtatatatcataattaaaaaagttttaatataatccatcgtttcaatacttttaagaattaagatatcgagattagtgacatcatatgatctcttcataactttcgtagattggataagtaaaaacaaacccgttatttgggcttttaatcttaaagcccaatttatttctcgggccaaaatcaatgaaacacgtccgtctctttttctccttcgtttcgtttcgtcacgctctttcccaagtccgatcctctcgccattgccagcaaaatttctttcccggttaagaatttttctatttcgatttcatcgttcggctacaccatcgatcttcacacttattttttaggtatgttcttgttgatcttgtttttcggactttgtaatgtggtaccagttttagataattagttcttgataattacgctcaaattccgttgcttggcactgatttattctgcgttcggtactgatgatcgttcttcattctcattccgatgattctgtggagttcactgatctaagtttgattttggcataccagttgttcgattaaatgcctgaaagagaaaacattcaattcgtaaatttcatattttgtctttgttttggtttatgatatttttatctaatcttaaggcttaactttcaaatacgtcttgtatacgtgttgcacagaagagttataccttgagtttttgtttgtgtagtcttttgttagtagtctctaattttacgagtctgtaaccatctttaggcttataacagggtttttgaaactgattgaaggtttttatttatccaggaggaagctatgaaagtcaagatcttgcgtatccttttgttgcttcatctcttcttagcttttttgggggaaagtttatattaggttaagtgataaatcatcccaggacttttgatggtgatcatctgatatgataataaacatcttaagtctgtttatcgtgtattagctttaccgagttagattcccagcttgatgattcataataactttttgcatcttccattggtttatttaatagactaggtttgttcaaaatgcctgcatttcgctttgttgcacaagtaaaagaagaaaaacgaaattgttgctcttgactttctatgctacttctgtcctgcatacccaaaaaaaaaacagagtaggttcctcgtccctttagctttaacacatgagctcttacaatgcggagtttctattgttgtaactgattgtttctccctggaatagatggcatgcagttgcttcatggacatgggatgctcaagacgaaacatgtgggatatgtcggatggcttttgatggttgttgtcctgattgcaaacttcctggagatgattgccctctaagtaaagttctcttctttcatgtcttcgcttttatatatgttgcttagaacacccactatttctcttgcttacggaaacattgctaaacatttacttatggtaataactcaaaacaaaactgcatgccttagaccttatctgttttggtgttttggtgtttgggcagtttggggagcctgcaaccacgcgtttcatcttcactgtatattgaaatgggtgaattcgcagacgagccaagctcattgcccaatgtgcagaagagaatggcagttcaaagagtaagcaagttatgaggaggattagtctgcagctctcgtcataggggatgttttggaatgatctcgtgtagttgtatttggaccgttagtgttgagtatgatcatctgctgaaacgcaagatagagctttagtaatgtttttgaagcttgtccttggtttgattgcttggacaaagtagagatcaagcaactttttgtgagcttcatcatctatatggtctttgtttgtagttaatacttttttttttttttttgtatcacgtcgcctttgaattggttaatatatgattggttcttagttaatttttcattactatattaaaacgaaaaacaatatacattttgaatttacgttgatgaatcgaccgtttggttagtgactcataattttcagttcaaaataaattctatagtcaaattcagttgaattttttctttttttaatcacaagagatacattcattagtatgagtctatactaatctgcagaaggaaagtccctaaagtctaaacattcaattgatttaattcgatgattgaaataagatatagtattaagtagtcatatcaaaattgagttataagttataacaaccggtgggtgtgagtacgcagtgatcctcgtgggtatcgctaatggtgccaagtaatggggccaatttattggtgatgaaatgatagcgtaaggtataaggtataatggttaatggtggtcctgtgatccaccaaggcaacacaatttccaatttattgtaataaaccaactatatttttaaaaaatcttcacacaaagtacaaaccaacgctctcttcttttatatcaacacaacatttatataacaatgcaaacacaacagtgatgattaattaaattacttgaaacataaaaactctgatgaaagaaaaagaaacgctgaatcagtcacaaagataggagaacacgacggaacagctgttcctgcacaataaacaacaaatgtaagtaaagttaaaaagtttggtcattaactagatatttatctctatccacattagagtcttattactctcttttgtgtcagaaatttctcataatcttatcttattaataagtagatatttatctctatctgtacacattaattatgtggtttgaacaatatcttaatttattatcataataatatttataacttgaaaccatgttttcatagcataattttcgtttgctttaaaccaaattatccgaattaacatgatctgaaatgtgtaggtttaccaaacatttacttaaactttcccaatgaaaaagcttcatacaagaaaactatatcaaaaatgactctgagagtgagccaaagggtaaagagagagagagagagagagagcttacaaggagatgatgatagatggtaaatcatttggtgaggacataaatggcgtatatgatcccaggaatatacccaagtagcgtcaaaaccaaacatatccaaaactcaacctgcaacaaaattcataatttcaacttttaatttctagtgtggataaatgtaaaaaaagaaccatatttgactaaagtataagattaattaaccaaaataaaactcagtctaaatatgagaggaaagataaataccccgcaaccaaatctgagaaagacaccgagtggaggcaagaggatggcgataataatatcaacgaaagtagctgtactcatttttctaagctctttgaaagtttctgagaaaatattataaaagcttcaaattgtgttttttatcttctttactctatcttcttcttgtgatatatctctcacattatatagagaccaactttttagatatttttgagccacgtattgccttaccctttttattttatttgtttcctttacctttaagctaaatgaggactttgtttttcttttcttttttctacatacaaggcgaaagggatatttttttggcaagataggtacttaatctttcgtaaccactactaattagcattaggagcatccgttacgtgttgaaaaaatgtaaggaaataaatagcatttttagtaattattattatgctatgttgccttccccatatatcatcatctttctttgtgcgtcacaggtccgtacccgtgtgatatcgacgataatacatgtatttatcaatttcaaattttatacgtcaaaagtttatcgtaagtggttacgtaacttaaccgactacaacatattagatagatagttttttttgggtcaaaacatatattagatagataaaactttgatgtatatatcttttcatgcgtaaatatgataattattcacattccacatagtatgttttgttttgatatcaacagtaatctagatcaaaatccgatcccactgatctccggatatatacgtgttgtttgcctcctgacaatttctttcctttgtatccgtctccgataattaagtattcatcaaatttaggtaatcttttaagtttgaaaaactctatttcttcactagtgtttttccaaaaataaagatatgaccttaattaattgtatagtcgattcaactgattcatgtcaactattagatgacaaaaacgtatattatcaacattgggttattaacaaccggtggggatgattctcttgtatttctcatggaccacgtgagtacttatggtgcaaatttgttggtgatgagacgagacatgtgaccatggatttatataacgttggttttaaatttttttaatggtggtccggaatccaaacctgctcattgcaacattttaccaattgtacaaattaaacgaaataaataaattcctcacataaaccaacgattttttcttgatatcagcagaaagtatacaataatgcaaatacaacaatgagaatacaattgctcataacataaaataaatgatgaatcagtcccaaagggagaagagcacgacgaaacagctgttcttcctacacaaataacaaatgtaaagttaaaactttggtcaattccttttactaataaaaatgtaaatcaaaatgataaaatcttatagtgttattttaaccttttttttttaattgataattattcgataattttctgaaaatgttacaaagtgaatcgttataacaatatctcactaaaaatgtggttcacctaacattaatttatttttctttttatttaattttattaagaagatattcgtaatttctttgtggaaaacatatatagttaatcaaagatatttcatcttaaatctcgttctatattcatcacagctacgcatgtatgtttgtatgattagattaatatacattgagggggagagatcgtggagaaagagagcttacgaggagcaagaggaaagaacagaggagataggaaaaatcacttggtgatgatataaagagcgtaaaggattccgggaagataaccaaacagcgtcaaaatcaaacatatccaaaactcaacctgcaaaaaaagaaaagtcaaaaatctgaaaattcgagtaattatgagatttttttaaaaaagaaactctttctaatgaaaagaagcagtaaaaatgcaaatagtgtaccttgcaaccaaatttgagaaagacgccgagaggaggcaagatgatagcaagaataatctctacgaaagtggctgtactcattttcaagctcttcaaatttcaaagaaaatatttattatgctttaacactaaatcttgatgattatggactttctctactctcctatatatatatagacccgagatctctatattttatgagcctatccacgtggtggttactctgtaacttctccctttcttgtaggagtaataggttttatttttttttccttttaaaaattgcttttggggaaatctaaatgattttaattatattttcctttatctttgggcattatgcggtatgtagaacttaatcaaacaagttaatcaaagattaaatttaatattctctattactaatctagttttttcttatgtttttagttactcttatcttgaatcaaactaaatgattataaataaataaacactatatatcatattcattaatatttaaactagatttctttaaaatatcaggactgagtcacattatatatttcataaacagtggcatgaaataatataaattcaaggtaatttggaactaaagaaatgaccaactatatatagatggcgcgcacgataaataaaaatatttaataagcgtcttcgattatggttaattggtacataataattaatttgttagaccaaaaacgttagttgaaagttgttgaaatttggtatttggtttaggtttccagtttggtgatggtatccgatcacttaagcgttaatgtgctttatattttgtcaatcaaacactagtgctgtttctaatgtcaaatcccatatttacattttcgtaattgggtaatatgcagctagcaagttccaagtactaaagatcgattttttactttcaaagttccatttaagaaaatatacgtttcttcggaatcttctatttgttgatgtatagcaaacaaatgctttcgcttttcgagaaacaaaaataataaaaataatgctttcaagattaagaccagaatgaaagcttaggtttgacttaaaattcattgtacctgtaggacttgtcagaaagttaagtggcttaacacagaagctacacgtcccagaattcattctcttttacgaattcatcaaaccctaaatatttcatcaaacaccatatcgttgtcggttacacgaatgtgggccgggacaatctccggcgtggaggtcggcgagaggtacaagtctcacaccttccaccaacaggcttatgacacgttgtccactcacatgctttcatgtctgtcaacgcattacccggccgtcctctcacgtgacaaaacccatgctccataactccatagaacatgggtgcttaatcactttacactccttggtttaaattaatttattggtcggtttgcgtttcagtaaccggttattaaatattctcaaccaaacctaaaagtctgaatggggcatttccatcattttaaatatttttcaaaattgtatatcactttatattatttatgctattgatctcagtatggttaatgattttacaaaactattttactcgtaactataaattatacaactaatttaatccagaaaataatattttaattgttgacattttgatcagactctttttctataattacaaacaatacagttacactttgtactacattagtgctatattctgtcaaaatttgaatttgtttagttttcatatagactttcgttttttctcgagaaaactagtgtaaagtataataagcacccaatcaatattttaattttatcgatgacaacaaagcttagctgtctagaagaataaatctttggagcaaagcaagaaagttgtaaaataagtgatatttagaagatcgttagtgacttagtgtgaatcatgctactctggcttcatctgtcagcataataatagcatatgttctttcttcctaaagttgctttcatgacactcaacactccttcataaaaatgaccattattgagttaattactctcttttttcaaaacattatttagtgataaaatattccggccgacaccaacgcataaaccgtggcattgaattgacaccacaaaactattaatagatttactttatatatgaagtcctaatcaaagttgtaatgtcctttttattttgttataaaataagtggtaatgtcgcttgctttaatctattagttcttatcctttcgaattggtcacttctattcaaacttgactttaatatcttaaattttcaagaatttgtttcctttattttggtgtgcaaattcgctggtattgaaatattgttgacaagaaaaactttgcaaaaaaaaaaaaaaaaaaaaacctgccgacattggtcttagcatttatccattctttaaagtttttgattggaattacatctgagcccattacaggcccattttcaaaaggatcacttcaaagcgggtttattagatcatctacgatataacggaacgtgaaactgacataaactaggttttgattttccctccaaaacatcctcatggaaagttggaatcatcttactcacgcaaattcgaccgccatagacgtcaattcctgtatctgcgaagcttctcagaactttcctgttgacccgaaaccttctttatgtactttaacgatttgattggtgaaattgtgggaagatgcattgtgcggagaaggtgtttgatgaaattccaaagagaaaactcctaaaggaaaaggttctgattctgagatttcaaatgatatggttgcttattcatgaaatgtaatgctgatgaatgataaccgtaaagaaaattttcaacacacatccataacacaaaggcaaatctttgtatgtttacagatataagttataaaccacacaaagccataaaaacaaagaaaaagaatgttcttgttttttttttgttttctcccacacgaagcaaaaccaacaaattgaataaaaatacctgaaaactttaaacttgaacactttatcacttagactttgatttcttctttgggttcttcagttgtgatagtcttagagcttggagatcttccaatgattgctttctttgccttaacaagagattgtttcacctttgatataatgctgtttgaatgtttttgcttagcaggagcttctttggttgtgacttctggttgttgtttcgcctcatcgatctctttagcaacaggtgctgtttctacaacttctgctactttttctgtaattggttcctcttgtttgtttgctgcagcttctttctctactgattctgtatcagtttctttcaaagtctcttcgctctttccttccgcaacaggtgtgtcagtatctttcttgatgttctcatcttctgctgctagtttagtaacgacatctttggcttcacttacgttctcttgttcatcctttaatggttcttcgactacatgcttctcgtcagtaatggccttctcaatgacatcagctggagaaggaacgtctccttcagtctcctttttgggttctgtgtctgagtcttggtttgtgggtacgactttctcaggggacaatgcagaaccagattcagaagttttctcatcctttgatggttcttcgactacatgcttctcttcagtaatggccttctcaatgatatcagcaggagaagaaacgtcttcctcagtttcctttttgggttctgtgtctaaatcttggtttgtgggtacggctttctcagggcacagagcagaaccagattcagaagttgtttcatcctttgatggttcatccactacatacttctcttcagtaatagccttctcaatgacatcagcaggagcagcagcgtctccttcagtttcctctttgggttttgtgtctgaatcttggtttattggtacaactttctcaggggacaaagcagcacttgattcagaaggtttttcctcatttgctggttcatccactacatgcttctcttctgtaatggccttctcaatgacgtcaataggataagaagcgtctccttcagtctcctttatggggtcagtgtttgattcttggattgtcgataaaatttcctcagagcacaaagcagaaccagattcagaagtcttttcatctttggagttgatttcagagtctttttcctcaacaattacatcctccagctttccctcaagctcaactttagcttgttctgttgcttcagctgtttcctctgcctttactacctcaacttctgtttccaattcccttgctttctcaagctgagtctcaaccttttcagacgtctctggctttggctcgacttcaagagcctccacatctttgactttctcctctgcaatctctgcagatacatctctaacggattgaacatcaactgattccacctgtttgtctccagctgattcagagacatcaacaatcttcgtctcttccctatccttagtttcttcttcaacaacactctcaacggttggcttctcttctgctttctccgcatctttaacaggttgaacatcaactggttccacctgttggacttcagcttcatctgttgattcagagacatcaacaatcttcgtctcctcctgatccttatggtcttctattagaacgttctccacggtttgcttctcttctgctttttcggtatcaacagtttcaacattaacttctgcaacagtctctttaacaaggattggctctttaagttccacttgttcagctcccttctcaccgttctcatgcttcactgtctctgtagattcctctgctttcacaacagctccaacctcttccaccactgctggtgattctttctctggttcaccagcaggagtttgatcaatctcctcttctttggtgaccaccgggtttgaatctgatgccggtttatcattcaccacatctgcagaatccgacgaaataatctctttctccatcaacttagcttcctcgctcaccttattctccaatggctgcatcaggtaaaagtaaacctctcttataattcacaacaagaaaccttagaaaggtattgcttcgtttatttctctaactagaatcatactttggaacgtaagaagagttttctagaaaaagatggacaaagttggttctttaacatccatgtgcataatctacaactttctgaaaagttccaacttttttttccttctaataattgctgcagtaaaacaatggaagaatacacatacaagtatattggactctgtctcagtgaaagcatatggatcttacaagtatcaaaacgtgatgaagaaacctatctatcaacctcaaaagcatcacgcatagaggtacatatacataaatacatacatgagcacgagcttagaaaataagagtcaagaacagagggatagttttcaaaatagcttaccttttcaggtgtagtaacagttggagtgtgagaatcagaagccatggaagaagattcagaaggcaggagaagaaggagaaaagtaatggacagggttcaacttcaagaattcagattattattccagaagttgttgaagaagttagtattttgactgggagaaattgaaagcaaatgataggtgtaaaaaaaacactcacacatatacacacacaaagtggggaacactagatagctgtcactcacaccccccacaaaaacagggtgtcaagttgtcaacacactctgtatattcttactcttttcactttctctctatcttttactattttattattattcttatccattatctgcttttgttggacacttataatacataaaagaattagttaggcttgaattcttttggtaccaatgttgacatttctaatatatttgatcaactacttgcatttgcaaagaaaattagaaaacaaaacaaaagaaagagcatttctctgtgattgattacattgaactctttttaagcaaactttgttttgttttgtttttttattatgattttccacgatacacttaatcatataccaatgaggcattggttactaccaaaggatacaaaatctttccttttgaaagaaagaaattttctaaggtatgtatatatgagagagaataaagaacatagtcaaacaatcatctgaacaccaagttgtggcagctcttgtcacacgggtatgggcaatcgactaacttcacttccgctctatcgaaataccaatctcctacagctattgccaccgcctacaaacattccatagacaaagtcaagatctagaaagtggaaacaggctttccttgtgtgttactttgtttgtgtgggaaagatttgagtgaggttttacctttttcctgataacaggagaatcatcggcaaaccaagtatcttgtctctcggtttggcagtgagcaaagcaagaattgatgaacaatccattctgtctagacattgagaagcccttgactactctaagcatctgttccctgaatcctgttctcgaataaaagattaaacgattagagtgatacaatgatgctttaaagggtgaagtccacaagtttttatgatctatagaacaaccttgcaagaatctcaactgtgcaggagtacattttccatggtttagtctgcagtcatgccaaaatccactaggatcagctgatgttggagctatactgctttgaatctgtttaaaaaccattacagagacttgtcagcctaaccatcaactttctgttctttagtagcaatgtggcacttttcaaagggagaaaaaacataacctgccatgtatcatatgctgcgttgacgataaaaagtggagttttcatttgactgatcagattttgtgggaagaaacactgtacagatatatgagttatcaaaacacaagacttcgaatgaccggtttgcaacagcatcagaatgagagaacaaaagataagataccgaggttggatcaagatggtttgtgcatatacgtggaagattgttcttcacactctgtaaattgtgaagaagatttcttaagtttcttgtgctctttaaatgtaaagtaagaaactttcaagtgaagaaagaggaatccaacctgcaattctacgacaccattgtataagttcctgattgtgcggccgcctgaaacatcggcactataattacagaaacaaaggagtcagtagtagttactaaggtaagggaaaatgaactagctttaatacaatctttgacttgggagaaataaactaacgtgtccaagaacaagcctgcatcactcaagcacttgactttggttgatccagggaataagttcctaaactcatcgcagcgcaagattgctgctaaaccaccagcagagcatccggagagaagtgcctgacagaatataaatagttaaatccattcctgcccttgatattatgctatggaagagatacagactcttatagaaggttaagtgtcaaaacctgattggcgtatcgcattccattcgccttcaaatcatctattgcggctctccagatacgctctcctctaaactgaagttgtgcagcctgaaaaagttaaggtaaagaattttatttgcattagttcacagatgttacacaaaaccaatggctgctcaattctacagaactaagatcacatcaagcgttctctgtggctaataacagccttgacgattatagactacagagttccaaaggcctagaaactagcaagttgttccaaatcacaacaatgggtctcttatgaactctagtaactcaaaaaatgattgatttcaacctgattctggccatctccactgaaagaagcgccatcgcagtaacgaagcttaactctattccagttgaaaaagtctgcagaagtaaagcacatgacaatgagaatatatgattttcaatattaacattacactaacatgaacaaaacttaaacaaagattgagacaaaccaggattttcttgagctttgtcactcagtattcctgtaaactgaagctgtttctccatataattagaggaaccacgtcgagtagtcttcctgtatacacaggtcctgatgttgttgcaccatcctcctccctgatacaaaaacatcaaacatcaacaatgaagactttaactagtgtttcatcgacaacaaataattcactaaacctccaattgaatgagccagctattagctccagatccatgtccacggtgcaagtgatatccaggcaatgttccatccaaacaaactgtgaacaaacacacacacacaaacgtgtaaaggcccaaacatatctaaattcaaatattttgtttttattgtttttctaccgacacagaacatacacatcttctagttctaactttgtttatctgagcttaactagcattaattttgttttatttacattcctagacaataaaacaggaacgaccaaagtaatcttgaagagtacataacaaaaaacgacaagttaaatctggaagtggacaatagagaggaaacaaactgataagaatgtagttgaagtgaatgataataaatgaagaaagcaaaagaaaccatttttgtaccctctttcatattttttggacatctgaaaaaaactcacaaaagtaaaagaaagagagacatgtagagatctagctagtgacagaagcatagagaaagtaccagctccagaatcagctcctctgataagggtgagaccaaccattaaagggttcaaattggagctatatttggaaaatccaaactctaattcctcaatgcgatctatttctgtcacattgaaatctaaatattcatttgcttgagttcccagtattataccagccacaacaaaccctactaacaaaagcttcaccattttctctcactctctctcactggaagagaagagtgaaagcaaaaaaagaaaagaaacagatctctgtgactgtgagtgagagagttgaagaagaaaggaacaaactttgtagaaacgcacagtatgattaaaataaacaagaatagaaaaaaagaatgggctttttctgagctaaagaaaccaaaaaaggtgaaataaacgaagaagaagaagaagcagaggaattatttgttataaaaaaggattttctaaaaagagtttcatggctggattcacggttggagttttatttagaattttaaaaattgaatcaaaccactctcttgctcttatacgacaaagacagaagagaccatcttttgtttggttagctagatcttagttcacacttaaaaacgctcagcatcatcatcaaataaagcagacaaaaacagattgtatgaattagcacatggagaaaatgggtccattggatttgatatcttattggctctatcctgatatttccatctctagattagcaattcgattggatgatgtgtataaagctgatcaacttcatgaattgttatatataaaaaaagagataactagctattctttgtgttggtgaaagaataaaaacaaattttcattttacgtcatgacttgagcataacgaaccctaataaattatgatctctcccaactctgctttaatttccactttgggcagaactcagaagcatacgtgtgaaagaaacaatacacaactagtgcagttgggaaaatcataaccctttgtttctctcagaaaccactttgatatttacgagtgatgattgttatgtaacgtctacgacacctacacatatgctagcaatcatgtgttgaaacacgatataaaacattctcctaagttcacgatataactgttttgatttctttcgacgcaatcatgtcaattaatttacacaaactactaatttaaaggaaattttaattgctttaggttttactacttaaagtagtttcatcaatatttttttggttagaggtcatgttgatagatgtcgtataggaaattcactctacaaatgcttactataagtttaggttttaactcaaaatgtttcaacaaaataaaatcatatattttttactatcctattaaaaaagagagagggtctgcctaataaagaaatgcaacaaacataagaaaagaccaagtgtgcgttgaagaacgagaaaaaatggtcttggtctcatgcacatcaccacatgttgatcttacgccgtggtcgtccacttgcctcttgtttctgaatttttgtttagttgtccctgctttttcctattttttcctgtaagaaccctaatgtttccatatgtctcatttcttgttttgcataatttaatgggctcaatgaagttaatgggcctaagagtgctacgacccaatagcacttgaagatatgtccttcaaggacttcctaagctctgttcaggtcaacatgactaactttctgcttcacaggtttatggaaattaatcaaacatttggtgttttaatttgaacttttattttctttagcatgaactcatgagacttcttgtgtcaaagaagcgactaattataaacaggggagggacaaacaacagagattcatatttgagaaaaagaaataaacaaaaaagcatgagaacatgatgaattagtattggctaaatacaggacttaacatgaaggctatggtacgcgatatatgactcaaagaatggtgcagccgcttccactttcataggtagtaacagacacaacatcacaactgttgcagtaaggtggcttgcatacatgctttggtggttcaggtgctggtggaggctttggtttttcaggctctggaggctttggtggctcaggaggttttggtggtggtccaacgctaatgatcacaggtttctgtttaatctttttcagccttgttgctacgcagaccggatccattgtccccaccacggtaagtatactatttccttcatctaatgaaatatgattcacacctgcaccaaatctcatgttcaagatgatatgttaagacttaagagcacatatttcttgagtcttttttcgttcattaccttctatctctgtgactgcttccatgattgcgctgttgcattttccacagtttatatccaccttgatctcaactttctgctcacaaccacaacaaaaactcaaacattcggtgtcggatttgaaaaggaactagtactaggatgtttaccttgacagtcatgatggattagccaagatcgagaaaaatggattaaaggaatgaagaaggaagagaagaagttattaaaaacatgtgaagacaaacagagatgacagattggaataatgttgaagcagttgaggttgtgtttggtcagtattgttaattaaataatcaagagattacaccatctacgtgcttagatgcatgtttttgtataattgaataagaggttttgggaatttgcttagttggtattcagccaccatcttatggacttacttgggacattattgtggatggaatttgtttaatcttgaaaatttatgaatatattattgagtcccatattctatctaattttgtacgttcttgaccccaaatgtttatttatttattttaatattgtatatgttatgatcatgcaaatgcatggatagagaaattccaagccggtttaaggttttggttttatttctatcccggtttggatttagctgaaccaaacaaacctcttgagttctttcaccagtaaacaaccaaaatcatcaatcatttcgagtttggtgattattagagtttgaaggtgtttttgttatggtgagtgtcatcctataaactataggctaattaatgtgtccaacaaaacaaaactctttttaaacaccaaattttaaccaacgatcagaacacctaaacctaattatggcaaaattttaaaattaacacatctatggcccctctccataattatctcttctccattggttttccattggttaaatcttctttacgtagatatataaattgagaaacaatgttaaagtattttctcaaactcatcaataacatcttacaaacaacaacaatcaacaatggcaacttccatgatccctatattcgtcaccttcatgctcgtggccgcccacatggccctcgccgatacaaatatgcttcaagacttttgtgttgctgatctctccaacggtatcacatctctctctataccatttatgttctgcttgcatttacatttaccagatatagttaactgcaaacgcagctttggtgttttgaaacaaccaagaccaattccaatattttgttgttgactttttatcatgttctgattaggtttgaaagtcaacggatacccttgcaaagacccagcaaaagtaacaccagaagacttctacttcataggcttagccactgctgcagccacagccaactcttcaatgggctcagctgttacaggagccaacgttgagaaagtgcctggcctcaacactctgggagtctccatctctcggatcgactacgcacctggcggacttaacccaccacatcttcacccaagagcctctgaagccatcttcgtccttgaaggccgtctcttcgtcggtttcttaaccactaccgggaaactcatctccaaacacgtcaacaaaggagacgttttcgttttccccaaagctctcctccatttccagcagaaccctaacaaagctcctgcttccgtcctcgctgctttcgatagccagcttcccgggactcaagttgttggaccatctctgtttggttctaacccaccgattcctgatgacctgcttgccaaggcgttcggggctgcagcaccagagattcagaagattaagggaaaattcccaccaaagaaataaataagtttcagaccagagcactaatctaataatgatatacaatgatgaacataaaaatgtaaacttctaagcaaaagcttgtaactttttttcattcttttctttattattgtagatactcttttgactatatttggcccattgattacgatgagaccagttttcacatgtttaagagtctatatatatatatatctttgaacaatcgacagttcttgaaacataccatactgcaagaatattaaggtcctctttagtgctttcaatccagtagatttaatggctgaactttcagctgagtttagagggaaatcgtgtctcaaaaaaggacacagaggcatgctacaactctgaaacatcaaccattaactatccaagctccttcttcataatcacttagaatcagattcaataaacaaacgatgattggagataaccatttgcataatcaagacttagtaagcataactagcacaagggttccgcggcttcatagagatgattaaatccatatagcaatttcaaaaccacaactacatcagtgtctcagtaaaattcaactattcataaaaccattgaaaatggttaccctagatgtgtcaaaggtaaacaacacttgccaaaataaacttgggctttactagtagagatattcaacacatggaaacagatatcagacattagcaattaatattcgttgagtgtgatactctgagattcaaacttgggctcaaatttctgatcttacaaactagtttggatattatggacaaagagtgacattgtcagagacatatagaaactatcatacggaactatgaagagagacaagaaagacccacagatattaatgatgagcataagaggcagatatacaagattcattaacaataatcactctgttctgcaaaaatctttggtaacattgatgaacacacttttgatattgatgaagtttaaaagaagatctatacagatattggtggtatactaaatgaaaactacactatatatatatatatatatatatatatctgaacttacaaacagagatgtggattagaatccttggagaagaaatcattggtctgtagcagaaccctaagcttaaagttgtcatcttcagggtcaggttcaattccacaaaagcagactcttttccaaaacccagaagaaggagacgtattcggcgataagggtctccttctgaacttagacacgattcgtttctttgctttcgagacggagtaaatcaacaatggagattcctttttcttcttcttgttgttgatgttatcaggatctctctcgttctgttcattgttcatccaccgaaaccagaatcagttggccaaaattcggatagaaaattggacgatctatcagagacgaagccaggtctggtttcttcttcctacttgctacggtctccttcacgctttttgtttccaggcctcgctggctctttctcactctcaaaaaatcgcaatcgagttttcgtgttaaataaattattaattagttttactaataatgaaatagaaaaataatttaattcggcaaaccaaattttcaattttattgctgttttggtcctccggtttgcaaatgtttttcctttcttccgtattatttttttcgcgatcaacctataacatttagcatgtaaacatgtttattttctaaatgcataaaatatcaaactattgtggaaaaaaaactaaatatatatatcaaaatatgtttgacggttttattacgcaaatattttatatactccagagaaaattttaaaaatgttgtttttgtttcacgcttcaacgtgtaaattggcgtttaaatcaaataaaaatgttttgaattgcgtttaaacttaagcaaaaaggagaaaaagagtattagtgacgaagaacattaatgtaaaatcaaatttagctctaagccgattaagagacaacatataaaaaatttcccactattgacctttagcttttacaatggcattccctacatttatttgccttcatcatagcgtagtgacgtagcatttgccaaaattctaagacttctgttctcctttagtatctctttcagctccaagtctttccttaactcacattctatcaaatcataaacctagagaacactattgataaatgaaaacattaattctctctacctatgttattgaaatatatagtacttatcagttgaaagcacatgatccaatatatcatgttgtcgtagcataaatacctcacgatcttggtgcaagtttctccagctcttttgccatttcacatctttcctaatttgtaccaatctccttatactctgtatcttttctcccttttcacaatatttgcataaatgggttttcataaatgaggaggagttgaagcgccgaagttttgcttgctttatgtaccacaaagttagttcctttataacatgggtgcaacaaaagaagttagttggatttttttgtactgacatgcttctagtgtttctttaaaccctttctttattatctgaccaagtcttatctttactttatgcataagaaaaaaatgtgattgtcacaaatcatcacatactgtattgttaagttggaatcttctgtaaagttcatgtgtcctttatgactgcaaatcttcttcctaaaagaaaaaaacaactttacttgtatttgaccaatagtgataaggattctaatagaatcactctacaacttgctatgaattatggaagagaaaaaaacaatcttgaactctgttcatataatcctccaaaaatcgtaatttagaagaacatggaagtgggtttacatttctatgtttcattgttttttgagtaatgagaatcagatatcttctcactaacggaatccacctcttgaattcagcaaaccagggaaaccccaatgagaagagaaaacaagattaggatataaaccttctttgttcatctgatttgtgatgcgcatataaatgttaaagatccttcttggcaaagctagtgccttaagaaccagcttccttgatcgatttactctgaacccttttgctcgagtctcgttcttcttccccaagttctgtcttttggtcggcgacctcgttgttctttctggtggtggtgttgtcaatctctcgccatgatcagttagcttcttgtaccgataagattgtctccaccggtacttgcctacaatctgcaacatctctgtttcttataaagttgtgtgtatgttgttgttttaggacaatacagagtcactgtctaatgaaggataagaacgaaacaaagagatatgaaactaggaaaacagtaacaaaacaggaatataaaaaggaaatgtttttgcttaaaaagataaggagaagaattatgtgatgataatgattgtgagggaagtggcttaaaggcatgtgtttataaagagacagagagagtaagaaagattcttaaagcacatgattttattctttattttccatttaaaacccaaaaaaatatccaaaatctgttaaaatgggcagctcttgttaaaccacataagcagatgctctgtatatggacctacgcggattgtgatgctgctataagattacaaatcctttgtgttttggagtcatgtgtgattcataagttttagttaagagttatgcaaaccgaaattcacgatggagttttgcggaaaatgggaaataataatcatcttccatttttagctgagtttcaaaagtgctaaattaaaatccgcaaaaaagaaagtaagataatttgcatgtcccattagaaacaagattatgtgttgtcaaaaaacaagaagacaatattatatatttgaacttttgcatgttactattattgcaagttttgttgggaatttcaggtttcgttttcaaatgataaattaagttaatgcttttttactttagctaaaaaggatacgaggagatatcaaatgattgggatttggaagtctctaattaactaactaatttaaacaaagttaagttagttgagaagagaagagagtagctctgctaaaatctaaaacgattttgggggcaatccctgccacaatgtgccaataacaaagagagagagagagagagaagaataataagaaagagaagagacaaaggtccaaaaatatttgtaaaacacgtagtcgacaatgattggattggtgacgaggaataagttggttgctagtctatttttttctccccattatttgtttctaacaatacatatatatttcaacccaactatatgtatccggtttagctaacctctttcggtttgctttcctgattttcccccaaattataaagttcaacaacgaacataaaagaaaatctacccaattttgttttatagttctaacaagaagaaatatcaagattgttagctaataattttgtttttttggcttcaactccaaagaaagccaagtgcgtgagagaaacgtgcttctgatacgcgtggacttatcagctcgagaaatacaggtccactgaaaactaaatggacccacgataggcccataaataggcccaatataagatatatcatctttagaaaatgattggtaagaaaaacagactcgcttacgaaaacgtatcactgacttgttggggaagaggacacgagaaaagaggaacttgactcgtttacgttattgcgttatgactatgattcacaaaatacattaattgatataataatacgaacattaactgaatctgacgataggttcacatttcatttcctgcatgatctttcatatcctaaagtctctttctaaatcacaaaacaaaaagtcgaaaattttgaccacaatccttaaacataacaagatcatttagtgaataaaacaacataaatcttaattttaagcacgcagctaactatgcaggacacacatcaacgaagaaaacagagacaagaagagaaaagagaaacctagtagaaacagtaggaagaggatttgtttggatgaaggagacgaaggaaacgtctacggcggtagaaaaacgccgttttcagccgcgaccaaacgacgcgtttcaatcttctagcagatttcaacctcatacaaacaactttcttcaccactctcttcatggatatcttaatcttctctgtgaaactctgtttcctcgagaattggtagctcttaaggaatagttgtctcttctccacgtatcctcctccatatccatagctatagtaaccgttactattgctctgccaaacgccgttgctgctgctgtttctgctcctcggaattaggaattgagaaagtaaagaattgtgttcaaaagggtggattgagatttcttgcactggattccggtgatggcttatttggttaacttgtaaaacactaaaacacttagccgccgccgccaaatccgccgtagctacaacgaatagggtttttggtttggttggatatatctcaatcgtgttttcaagtgcttcacgttgttgctttaaatattttctggcttggcttttgccttttgacgtactactctctctctctgcttttaatggagtctctcttttttttttactaaaataaaaagtggtctcgtcaaatcaaatacactatatctaggtgagactttaatctaacttcccaacaagtaaaaatatcaattgaaagttcaatgttcacgttctgcttataggcatgataaactaatttgtaagattataatattttacgtatgacgtaagacgtaagacggtttttgttttcattttaatataatggactagcaattttcagtctgaattttgtatgattttcaagaatatgaatttttaaaatgatgttgagtgacataatgatattgacatttttgaaacgatgataattttttggtttattgttatgctttgttgctggggtcttgggtttattaatttaccaaattgcgtaagcacgacaaaagaattttagtgtatacactacaattaattcaatgtttgcataaatatcacacaaacaaaaatattatgttattcgaggtctgaaaggaacacgagaggcaggagactagcctaacagctccaaacacttcaatacacatagctccaagctttatctaactattttttagattgtgtaaccaatatgccataataatctaataatatctacaaaccaaatatcgtggaacaagcaagaacaagaaaaaggctgtgcaaagtaaaaaaataccagtggaagattcataagaacaacaagagaacacatacatgagtaaaaaacacttatatctcccatctccaactaagatcttcccgtttaacaacacacttgagaggttcctaaatctaagacttttgttactgttaatggtggattctacatcatttgactcactatttaggtcctccacttatatttgcagaaggtaccttgctagggtagctcgatatatcaatgtcaatgagcgacatgtcatacattgtggaaacagagtccgaggcatctaccagcaaggaagatttcatgctctcagggcgtgcaggatcataagttacaccagaggttttgggtgtgcttgtttctgaagattgactggagaccgaaacaccatctatcttgtttccaaacatgtgtttgttctttctaacagcatccatttcctgaccagttggcacaaatgttcgtgctcggtacttccttgtcccttcctcacccccatcattatgattatagagcacataatcgtgatatgttggtgcaaactgcaagaatcgaaaaccgatcatcaccaaaaggacttagatcactcatttcaaaatatttgttatacaatgaatcggttacctggtgaacagtatcatggtagaaatcgtttagcataagagcatgtgccagacttcctgagaaactgcgagctcctccaacattggcctctgcatattccttgtacggaaatgcatagaaatgagcagctgcagcaataagcatttccacacatattataaaattttggaagagggctgcttcttcttcatcccttataaatccagatttagcaaaaaggaaaactagaacaccctgtaacacaaaaaggttcgccagacagaagaaatacgttatatatgtatggagaatagcaaaagttaatgccaaaaaccagattcagtgatagcaagagagtacgaaaaatcacctgccaataggttagaaagacaacagactttataatcacaaattttgggactggattgaatggctgaagcagatctttgcatgccacataaaagaggaccagcgcgtacagagctacagtgtatgatattgtatagatgatggtaagatagagataggattgatcagggctaaaatttccatccttgtatttcccttttgcataaagcacaagtgtgacagcaactaggattggctttagaataacaaattgcagacaaccttgcttgcatcgtctaataaaacgcctatatgaaaagataatcttgtataagttactacatgttaattaaggcagtcgtcatagaactcgaaaacaagactcccacagatatatctggactaaaataatctaatgcttctgctaacccagagtgcatgcaaccaaatgatcattcataaagatccttggcatggtttggttaagaatttaagaagttccaagattttgtgaaaaaaatcataggagaaatcaaagatatatgcaaatgcactaatataagcacagagaatgtaggtttattctgcaaactaacccgtctaatggtagtggtgggatgcaacacgtcatgagatgccaagatggcttcagagagcgaccagttaaacttataactaccgaacctgggcctccaacccaggccaaacacagcgatagaaaattatatatcacccatgcttcgtaactgaaacagaaaaagaaaaaaaagattacaaagccttaaccatgaggtctgcatttgttgaaaccaaaggttaaaattatgttcgtcatctattcccaagagtcaatgagaacttagtatagtaactcgagtaagtacatcccatgtcaaactagtaatacgaaaaaatcagaaacactcacacttcacggatagagttaaaatatatagagctcttgggcaaaacgagagccaagaatgacatcaaggcataaacctgacatgcccaaagaaccaataacatgttagccagagagaattcaacattaaaatggagttgacagtcacagatcaggatagacaaacagaagaaaactcttggaactgctaatactcaccgggaccatgaagacaatgcgcacaatatatctctgataaatgggttccgtatagttcaataggtgcttgtagatatggaataaagccaaagcaatggctccgacagtgcatagaaatgccaaaataatgaggtaaatgggtaacaaatccgccattctgggagacaaaagtagacaattcgtaactaagttctgatcaaactcgtcaaactctaaacaagagaaatgctaaaggtaagtacctgtacaagagctaagcaagatctggagaagagctaattccctcctaaattctccgggaggtgctcaagaatcccagtggactaaggattgaagcttatagcggagaaaaaaaaccctaaatccgaaacgaatttcacgattcaaaagcatttaactatcgattagctttcagcaattgttgaatcgaagcaagtgaataaaaggggaaaatttgcagtaatgaagccaaaacccggaatttgagagtgattagaacgcaaccaacaagagcgtaccttgaaaggggaagaagaatcgtaaacgcaatgagaaagcaacacagagagaatcccggacacagatcgaactgaaatcggagaaaccctcagactgaattcaacggcggagatagttccccggattactctgatcgggggttttaagatttgtactgatcttccttggaaaagagattactttggagatatgaaattcaaaattcctcagttgataaagcaacgcagcagagtcgagattaaggaatatgttttatcattaattaaattatataatccatttaagttccagcctgggaatttccattatgcagtaaaatctagagtttgggctgatatatggtttgggcctagaaccggcccaattaaaaatgatgtcggccatcgggatttcaattcttaccaaccaagttttcttaccaacgaagaacaatttttctatttttgaattgttcgataagaatgttcttttgtgggtttgaagtttttagctccgacaacctatatcacaaaatatacaaaaaaaaaaaaaaaaaaactacctatatctaagggtgggtatttagcttgttttctctgctatctgaccttaagtttgagtggattgccataaacttatcagcatacaagacacaaaaacatcaaatcacaacacaaacaggatcagtccgccatgtaggaatgtatttcgcaaacaaaatattatgtcttttatataatcgttaataataataaaataaaaagatcatactaaatttatagaacaattttttagttctataaacattttgtagaaagagagaggatacaaccaaaattgtgttttttaaatatacctctatttagatttttgattgcaaaatcattaatcaaaatcacgtactccagcttttcaaccataattatattaataaatagcaaaattgtgttttttaattttgtaatcaagttcaagcaccttaccttaaaaagttatactataaaagacacatctctttttttctttttcttttttacagtcttaattgttttattttagttctcacaccacgctataatacattttattttatatttttattcatattttggtacatttcccttcattctcttaacttgttaataatgacgatcataattggaagaaaatcttgcctcgagatatttaaccacgttcacatccagctgaaacgcttttgctaaaatctccggcataatcgaaggcttcgatccaaaaacggcgtctgcgattgtgattgtaccgggattttggctaccaagaccagcaaacgcaactgcgttcgtcctcccaacgttcacttgaaaatgtatcattcctatgggaaacacgaaaacgtctcccgggtaaagaacctttgagaacaatctgttgttgtcttggttcgatgttacaaaaccgactaagagtgttccttcgacaaccacgaggatctcagtggctcgtgggtgcgtgtgtggcgggttttgacctcccggggcaaagtcaattcggacaagagacactccgagggtgttgagtccagggattttgtcaacgttaacgtttgtaacgttggagccaacgcggtttattgtgtttccggcgatgtttagtccggaagtaaaaaagtcttcagctttcacgtattttgggtctttgcagaattttccattcacgaaaactgataaatagatgaagatcttattgatgttattgatttaactaattgatgttagagagtaaagatatagtatctcataaatcataattagtacggtattgaggaactatattaaggagtatgtatagtaaattagagagattaccaccactagcgtcatcgacggcaacacaaaagtcctgaagaggacttgggtcgtaacaagatacaaatgaagatgctaaagccaataagatggctttcgctacaagaaagcgaagaaacccttccatttactatttattttctttatccttagctttgtggtaaggaattgagaaatattgcacgctaatgatgcgctatatatagcacaataaagttatatttattttttaatgggagttttattaattaagagtcgtacgaaaggttacatctcattggtgaatctcctatttttgatttacacgactaattaggcgaatgaacaaagaaagaattc

SEQ ID NO: 1271 - DNA, 62271 bp, Arabidopsis thaliana
gaattccacaatgctatgaatccaggaataccccaaggtgcacttggagacaccaatatctacaatttaccaaacttaccaagtataagcaagacacctaaacgacttccgagtagacgactctcagcaatcagtgatgctatgcccagcccactcaaaagctccaaacgtacactgaacacaagcagagtgatgcagtcaggaactgaaccaactcaagtcaacgagtcgaccaagaagggagtaaataatagccgttggtgagttagctcgtgcttaagttactggtgttaggcctgaaactggttttattctctttggtgttaatgtttccttcttcctcagtttctcagagatacgtcggaagtgggaagaagaactctatgaagagcttgagaggcatcgaggtaagtgttatttcttcaagactaaagatttgaagaaaatgacttaaaatttgtacaagcatttgtttactaatagtaaaactctttgcagagaatctgcgacacgctggtgcaggagggaagactccattatcaggccacaaaggatagtgaacggctaaagagaaactgtatgtttctttcttatgtttcaaaattacttcttcgtatttttttttgttggtggggtaatttcatgactagtatgatatatgtagatagttcttcaacggttcatagtattattatttattattattattattattattattattattattattattattattattattattattattattattatgtatacatatcttaaatctgacttataaggtcgtatcaaccatctaaaaacttgtttgtgaattgtggtgttgttcgagtatggttattttgttttaagtataaaaaaaactagtcttataaaaaaaagtttaccctatttccttttacatgagcagtcagttaatcactcatgcaccaaaaagataaaaataagaaattagaccaaagtttttaattcaaaattttggttggaggatgggctgtcaagaaaaaaaagctgagcaaattttttttttaaaaaagagagaagagaaacatgaagatcttcatgcttaaagatttcttgattttctcttccaaatctattaataatcaacatttagattttgtgctttcctcttttatcagtgtttggaccgtttttgattgaagtattgaccatatgtagatacacttataaatcccgaaataaaaagaaaagagaaggacatgtgaatttttcgatttgtgtacgttgtcgacaagtccatatctaaatgatatgtatgagagatagagagagcgagagaatccctttttcgccacttttctttttattaacttttctgtgtttatatatattatacaatttctctgtaagtaggacataaggttcaaattgcttttccaatcaaatgaacaaatccaaatataagtaagacataaggtttaaattacgacaaaaataaaatatatatgaaattcttaaagatgaaaggttacaagaactggttcgtatttaggcaaataatatgaaggatttgtagaacttaaatatagtgctattaattctgatatttttttcatgagagcaataaacacgagaaacgttatagaaatattgtaataaattctcaaaataaaaataaaatacaaagtatatttacttatgtagagataaataaaaaccaaaatttataaacgacgataaatatgtaaattatacaaataatataaattattctttcaagctaccaaatgttattagttcacgtgtacatagtcacataactcaaaattttgaaatctgattgggtcctacggattttgcaatgcattatccaaaataatttcacaaattatatatatttttttaaaaagctcacaagtgtgaactgtatgcgttgtgacgaatgctttttttttttcctttattaaaaaaaaaaaacacttttcatattcgtgtccaaaaattataatctcctgacttcttgtggggggtcctcttttgtttaaaatttatgttcctcctaatcattataatttatgtatatatgtattaaacgaagatgaacgtcattaaaccatgcacacgtttctaattaatatataaaacaattaagttaggacaagagtctaccaattgagttgctacgatttggaattggttgtgtcgccatgttgcactacgacgcgggcccggtgtaaattgaaaatgaagaatatacaaattaaatgatgaaaatatctgcatatttggcgttgtgaggaggtttcttcaatctaaacgaattaaaaatgtgatatgagctgttgacaacaagtgatatgagctatcaagagacataattacagttaattataatttgtatacttaacgagagtaaacgttcatatctcggagctaagaatataaatgatgatttgcacacaaaaaataaaaaagagaagagtataaataaaccatgctccatgcatgattagattaacccaaatttgattagcttaatttactggttctacagatattatgaaatgtcattatcatcggaatgttatgtatatatatgatatatcaatatatgtaaacgaagagattgcctcattgcttatgtaatcaaatagtatttttgaccagtttgaattattgcagattttacgtccagattttagtggttaaaatagtaatatattttagggaatttacaataataccataaatttaattatgtccggtctggacttactcctccgaacctctacaattagaaaatgaatgaataccatagtggtttatttaattattactactttggcaaattatatttttgttaatggtattccgctaactaaagtcatgaactaattaaataatttaattaaccggtcaaagagagcgacaacataaagaatcaaaaggcatcccaccattacttaaaagaagactccattagaatttacatatttatttcattgtttaatttgaaagggaaaaaaaggattagaaaggcaaatgggtcatttcactgagaagtgaggatggatgagaaagaaaacataatgggcatataaacaaacacttagcacattgttatgtcactcaccattcaccaatccttttgctcttcttagccaccaagaaacccaattctacttttcgtgattttcatttaatgtcttctcttaaattccacattgttgcatcatctcgctttatatgtttatatgtaaatatatgcagtttgttgtatattaaaagtgtgacctaatttgaaacataccaaataaaggattgcgtcatgaatcatataaggccaagttgattagggctaatggattagatcgatttaaaagggtgggaactggacatggcatgaaactaagctttatttatggcttttctgtttatacattctaacgtgggtatcaaatttggagtactttatttttatgtcacattttctatataaatatatacatatatgtgtatataaatttatattgaaaacgggttttgttaaaagaattacagttgattttctatatgtatagcgattaaacagttaatattacgtaacatcgttctctgaataataatatcgacgacttaatatatatatatatatatatatatatatatatgcaagtctaaacattttaaaaaaatatatatacgcaaatggatcgtcccatgcaaactactttgcttttcagaaaaagaaacgtgaaaaggatcgcacgtatacatcaaattcgaaccccactaaaattagattaaaaacccagatgtgttaatctaataaaacatgaatacgtaagcataatatatagttttaactacgttggtgtagaaacgggtgtaacagtattattccaatgtaaagtagaaaaaaggtgctcgtagaaaattgaaataaagaagcaacaatctttatggaaaagatgtggttctacatcaattatgtatggggtgtaaattaataactaaaattttggccaatattacgaccataatttttgactaagcataaaatattataaactaaaacgttcaaaaccttaacatgttatagatattctttcattgttgtcgatactcgtatctataagtatgtttagcttctaccttttatattagttattcttatagatagaagtacgttttgttgaaggaaattatttaaatcctaactggaaaaattaacaaacatatttgtaaaaatttacgagtttgagtttcaaccaaaagccttcttttttttcctttggggctgagagagagagagagaggttgaagccttgaacgaatcagaggcggagactcggagagcttctagcatatatatatatgacgttgtcattgtacggacacaatcacacagctgtcccttaactttttttttgcatcatagtcccttctctattatacattattatgcttctgtatttgtaaatatactattttatcaaattgtatgatcttgactatctaaaaacgccaattacgtacagaatactgtgtatatgacaaaccctaatgaaatgaatgctccagagagtttataaaatgttgaaagaattaagaaggaaaaaaacaaattaatgaagtggaggagtactcttctataatgtccaattaggtacgattttacaagtcttggagatatgattcaaaattgaattttaaaagacgaaaaacgtggaaaaactaacaagaaaagacagagggaagtgatgtgtgttcccatcatgaaggcatcttcgtggtacaatcgtccttacccaaatatttcagtctgccacttaattccttcggacatttccatcgaatctcacctaaccatattagctaactgtctcaggtttcttctctaattttccttcacctaaatacagtttaattgacgtaactttaatttaacgtgattgcgtcatattaaaatagccactaatattgggttattatcattttgatctcacacttgcgggaaatgcgacttacaaataaatagttgataaaacaataatgttttggattaggtaaacgcaaactcaaatatgtgtacgtagtgaattaacagttaaggtctttgtcggaagtccattatccaggattcggtttcatattttaccatagcgagtgatagaaaaacgttgttatttatacaaaacgaaaacaaaatgcaggagaaagaaaagggtgtgaaactgtgagattacagagaaatcccaaagaacaaaatgtaaaaaaaaatgaaaggaagaaagattctttttttaggaagtggcaacacataaagattcccaatttagaaatcctctgttttctcgatctccttcaatacatcttcttgatctttgaactttctcaacaccctttactttgatttcttcttctttttcttcttcttcttccttgtattctggaatctcttcttcgttatctctcacggtctcgattgtttcttcctcttcttcttctttttcttctttggtctctgtctctatgtggtcatcagaatcaatcaagatagcgagtctgacacagccattgcttcggtcctgaaggcaacgattacgcggaggaggtctcgtggccatcattactaatcttccgttttcacggtgcgacttgacttcaatgcaatcaaaacctatcatacttgtcaaaggaggtggaagtgaagccattgtattcctcttcctatcttgtcttgatggattcgatgttgtcgacgtggttctagtttccatagtttgtaattcagatgaaatcgagaacatatcttcatgaatgatatcagagcccgtctcgctcccaaggctctcagtgcacaatgctaagctctcgtcgctgagagttctacgagaggatggagattgaaagagtggtaatgtcttcttctctttatcattagagctcgagtttgaaagggactcgaggaagctccaacttcccgagttggtgtccgagttagagctcgggttgggacttgatgagggcaaggaggctgcattaatggtaatagggttgtcttgtggagcaatggaagaattttggaaatgggatttgagaggtgtggatagttgaggatttgtatgagaagagagtctgagtctgagagctcttggctcaaagtgttgagactcaaaataagattgatatacaacagttgccataaagttcaaagatgaagatttcttgtaagagattttgttggtatgtgtaaacaaggaagcagagagagacaagtaggagagaagatgagagaggctttggaagtgaatttgagggataaggagagggagagggtgtcaatttgtagtgcctaaaagtaactttttttacaaattgaaatttaaagaaaaaaaaagagaaagaattatttagtatagtgtatagagagagaaatggtgggtaaaagagctttttccacactaccacttgaataaaatgaaaaccatttatttatgccacataatgtatatgagaaatatatatacataaaaaaaaaaagtgaaggaatagaatatggtcattgtacagttccatatgtgtaatatacattcaaaatatttgtgtctatttttttgcaaaagtacttctttctgtttggtcaatcatagtttttcacttaaatagcaaaaaatgatatgatcgagtcagagtcgaggaagcgtccgatctctgtgcatgtgaagtgggcagaaagagccaacccacaaaaaggaaggaaaggaaagtcctatgaatgtaagaatgttgtttaagagcacatgtgtttttggacccagagtaaacattttaaatcctagccatatcgaaaatccgaaataaataaaacttacactatatataacaaattaaaagtgaaccaaaatagaaacaaaagaaaacacaaaaaatgtacttcaaattgttagatttgtttagatattaaatataaatattacaaaaattgataacccaaagcaaaaatcattttaatcaaactaggcttatagtttcatttttgttgctttatatcctaaactataacctaatgaaacctaaattagaggtatgtggaaataatgtatacataccggttaagatgaaaaaactttgtaaatcagttttaacaaattttggatagtacgtcaagcttgtttttccatttcgtctattttctaccaaaattttagagaacccgacaatgaacaaaacttgtttcccatgatgatagtgataatgactctttgtttcttctcggtaataaacataaagattcgtgtgccggttgattattaaacccaatataccaacatttgttttagtaaaaggtcaattaagttaccaatataccaacatgataacaacagcccaacaattctgaaatctctttcattaactaaaagagtaaattaatactaagattatgggcagcaatcaaggcgtgcgtggacatctagaggggaatgttcgtgaactgaaaatatgcatgcatcatccacgagaaaaacatatattaaaaaaaaaaaaaaaaaaaagtgtgtcaaaaacacgcttacccaacaacgctgtatctgaatgcaaagaacaaaactcattttctgcccacttgttatgacctaaaaataaaatacccctaaattacatcactttattgaaaaaacggatcaaaaacataagtgggttatcttaacgggttacgtgggagaaattgtttcagcttctcagatcaatgatatttatagcatttcatatatgcatgtattttatagttggatttatccattatttgttatttttgtggtattattattggggaatgaaaactgaaaagagagtgagaaaaagtttctaaattttgatcagtgaaattaaatttatagaggtggaatatgagcatagctattacatcgaaactcgaaagtcaatcactacaaaaaaaaatttgaaaaaattttttttttatcactacaaattgtgtaagtatatattatacgtacaacattaaacttaacactttccgcttatgaaagcagacgaatagaagaaagccacctaggtttctactttggaatattctctctaaaattcaggacatcgtggttataaatagtaatccaggttgggtttggttggaacttggattaagttaacatcaaactttgtcctttttcactttggctagccaacactaagttgctttttcactctccaagtccagcccatgttacccctataaaatcgtacggagtagcttatgaagacacaaagtattagactcgtgatgaatcagcaattgattccccactatcactttctctcttctgtcttcactgtttttcagatgcttacgctatataatgtacgaaaaaaccctaattatataaaacccttttctttctgaaaaagaatgggacaaaacaacacttgcattcgacttttacaagtaaataaatgccctaaggtcactcagtactaactagctagcttttccttaactctaagccatgtgaatgatgatctatacaaacatgttcaacagcaaatgtgtttgcagatgctagtaattaagatattgtttttatatttggaaactatggaaacattttgaacttttgacgtaacacaaaaaaacgtttagttactcctagtttgccaagctctcttaaaattgttaagatatcgataaatcttcaggattagaggatactaatgtttttaaagtatattcaaactcaaaccctctttactaaatcaatcaaagactcaaaatgaagaaaaccctaagtcaagtcttaagaaaattcgaaaactcaaaaagtccaacaaaaactcgaaaacgtgcaatcctaattaaaatatacttagaaaaatgtttataaaacttgcaaaccgcgcaatttttatttgtctatttgcttttgaaatctttgaatgttagtacttaatcatagtggtgtacttcttttagtaaatacagcaaatttagcacgtaaaagcaattgagccctaaccttgtcttttaccgtataacttgcaagaaagaaaggctagctataaagtgtgagccgttccttttgaagagagtgggagagatttttgagattctgggtttccggtattaatatggaaatgctttcccagcttgtgtactgtgtctgaataaagaaatgtgtacacaataagaggctagacactatcgatgaactgtgaatatatgttatgctctagttatgttgtataatgatcactttaactagcagaccaaaactttttgaggtgtatagcaaacatgaagacaagtagatccataaattatagtttcccacaaaattcgatgagaccatgcatagggggtttggtacgacgaatatcttttgatgtgtattatatatgacaagtagatctcagtttttttcttttcctattaagttgttttacaaaattaattagtactcagcatctagtactagcaacattttacaatatgttccaagtggatgatcacgcattaattactccgagtaattaatgcatgtgaatcagaatttgtgtatacgcaccaagcagatgcaaagctgatttgaaacatcagaggtgtgatatacaagaacttcgtcttgtttaccttacttgaagaatcacattcataatcctcaagatatatatcttacaagaatttttcttatgaaagtttttttttatgtaatagattgttccctattgtccatactttatcatgacgacacaccctacaaccatacgcatttttattttccaatctctactttcccatatgaagaaatcaagaatgagataaatcatatagttgacacactattggaacgaatataaaaatgaaattaaaatagaggatctatatataacgtaagcatgtaaaaagttatgacataatttaattgagaaaaaggtcgaaaaaggagctgacctgcagacgtaatctgtcgacaaatatcaatctatatatattgagtctttgatcaccacatgtggtcctaaatttcgaaccaacgcatagaaatgaattagaaagtatagcatatagcaacctttggccgctccaaacgatcatgctttacttttttgattgtgtcctattacctaaagatgcttttactatataattgagttttacaattattaagtgaataccgacaagcgacacaagcaaattaaagtataagaattttatatgagaaactaatttgacttttgttgtacgtagcacacaagaccatgatgcaccaagaaaaagaaaaaaaaaacagagtgaaacttgaatcgttatccatcaatattagttatttgtttcaactaatggaggatctaaaggcacataatacgtcataccacttgaaatttagtggagactgaaaacttaagcattacgttttgatgtttgtaccaaactaccaatagtgttgttataaaatgagagtatgcatctttaatgtagatgtgttggcatatttgaaagcgttttttcaacactttccagagatccaatttcattcggattctatgattcttgatttcgtccgattacttattcgaaaagaattttgtgaaacaaatgtatcgtaaaatttaatcccaaaatttgttgaatgctatatggaatctaaaacacatgatgtgaaaccaaagtgtacatctcatggctcaaaatggtttgcataagcaaaaatcatctttttgactaagttagtggagcctttatgagccactccttaaacttttaaatcgagcttatatattataagcaatgcttacacatgttaaggaaccattggttaacatagttcaaaaaatttactagacaaagaataaaaataaagaattttatgtattggccacatagagttattgtttgtctcccattgcttttgttgacgcatgacatccacatgaaaatatcattctcatccaaaactgttgtctcactcacatatcatccaagcaaactataactttcacaaaggagatgtcaatttacatgaaaaaggcttttatttaaggtgaagtgcggataagaatagtgattcaaacgaacaaacacagtcatggatcgatctattccattactagaacaaggatctttaattataacccattcaatctaaagttattattagccaacacagtagtcaaaaaatagggaagataaagcaacattcagtttcctatacacacaaaattttactagataacaagagtcgatcgacaataacatggacaaacgtacatctacaagtgggacaatgaacgatttgaatcatacgtacatatacacccattgtaattcacgactgaaagaaatgggacaaagaatctctaggcaacactatctcccaacagcaaacaaattactatttccgagaagaacaaaaaatgtgactcacactcacttaaggttttgaaattacaagattttagaaattggaatggacatgtatatgtattgtcggtgtgttgtcttataacctcttaatgggaatcggattcaaaacaaaccctctcattccacgtttgtcaagcacgtgcttcttcaagaatttgaaattttggtttaacggtacactcgatttgatcagaacgagacaattaattacaattaaatacaaatttagttactgtcggtagttttttttttccgaatgcttcctgtcgcatatattgttttggttctatgaactcttattagcatataccagaatctgttgaaccatacaaatttactatattttctcggtgactctctatatagcagcaaaccattagcgagactagattatgaaccttctaaacattaactaaaatactcagtttcaagcccaatcaatatcaatatatagcccgcagatgccgatcaaatgggcctgtccaacggcccattaataaaacgggggttaaaaatgtaaatacaagaagatagatgtttggtgagtcctaaaaatcgtaaaccagatttccaaatttctctccgtctcatctttgtctcggtctctctctcgagtgtgtgtgtgtctaaaggcaaagagagagatttgagaaaactgaattacaaaaaaaaaaaaaaaagacaacgaaaaaaaagacatcaaatttgcgaaagttgaaatcgaaaacggtgaatacaagttcccgccatggtggctcagcagctccaagagagatgcggcggcacttctcaagaagatccagttgagaccaccaagtctctgatctgtgctctcaattacatttctcgtgaccttcctttgcctcctcacctcttcaccgccgtttcttcaatctaccatggcgcttcttcttcttctctctctgactccgatgtctctccgccgctacctacttcgccgcctgtaattcactctcgagcccttctccagcctcaccctagattttgatgtttgcccctttttgtgttttgtgctttgtttgggaggttttgaatcgatttatgtggtcctgtgatttgtttttgtagctttgctttcgagtttatgttcaaagttttctcctttttcgagtttctatggaaattagatatcttcagtggcttgttttgtcgaattacagtctaaaggtttttgctttaatctgtggtttggtctctttgttgtttttgcaggcgaataaagctccctatggagctgatttgatgggtgaattcgaggatgcacttttgaagcagagaccagattgtgaatcaggctctcgattgatacaattactggataatcggaataagagtcatatccaacgccgcttatctgaacttgaaggttattatcgtgtttattactcctaagttgcacttcaatccattctcaagttttgattttgttatgcttggcaacagtttttttgttactggagaactattgtcaattatgttactaaaaccctttattcttcaagggggatgctttgtgcttactctttgtgtttttgaatcagaattaccttctactagaggtgaagatttgcaggcaaagtgcttacttgagctttatgggcttaaggtatcatcgttgctagatgttctcattgatcgttgttgttatgttacattgtttgaattgttatatctttgacattgacactttacctggtgagttacagctacgggaattgcaaggcaaggttcgaaccgcggtgagctcggaattctggctacgtctgaactgtgcagatgtcagtagccaagtatttgactggggcatgatgcggttgcctcgtccattttatggggttggagatccttttgctatggaagctgatgatcagttcagaaagaagcgtgacgctgaggtgatttaccttttattcagctagcatattctggtgcaacttttttagttcctggattttattttaacctatgataatgaagtttcctgatgagataaggccccttttgaactatggctcatatatcttagcagtacaactagacatgtgtataaatatatcactagattctgctttgttggaactcatttagatggatttaatagaattgaaatgaaaagtgtacacaatttctagttgttatgacatgattttattttatagctttcaatcttcgtgattggcattgctgatgtgttaaaagtctttgttcagaggttatcacgtttagaagaagaggagaagaatctgattgaaactgccaagaggaaattctttgcagaagtactcaatgcagtacgtgaattccagttgcaaattcaggcgactcaaaaacgccgtaggcaaaggaatgatggtgtgcaggtatgatagagtttacttacgcggttattgtgatagtagttccagttatcttttaatattaccaatcaatatacaaacatctaaaatttattttgtgtgtacattattcgaacaggcttggcatgggagacaaagacaacgcgctacccgtgctgaaaagttgaggctcatggcccttaagtccgatgatcaagaggcatacatgaaactagtaaaggagagtaaaaatgaaagactaaccactcttttagaggagacaaacaaactccttgctaatttgggagctgctgttcaacgtcagaaagatgctaaacttccggaaggcattgatctacttaaagactcagaatctgacttgtctgaacttgatgctccaagaagtgaaccattgcaggatctgcttcctgatcaggatatagatattactgagtctgacaataacgatgactctaatgatttactagaaggacagaggcagtataactcggctatccattcaatacaagagaaggtaacgttgatctctatatacttagtagctgtatggtgaactgtttaaaccactgccatctcagagaccagggaatttaaaatagcaatatatacttttaacaggtgacggagcagccctcgcttctagaaggtggggaactacgatcctatcaattagaagggcttcaatggatggtttctctattcaacaataacctcaatggaatattagctgatgagatgggtttgggaaaaactattcaaacaatttctctgattgcgtatcttctggagaataaaggtgtgcctgggccttatcttatagttgctccaaaagctgtgctaccaaattgggtaaacgagtttgcaacatgggtaccaaggtatgttgcaaacaatatttctcttggtactgagaaattgcactggtatgaatgttatgtctgaaaatcagcctttttgtttttttgacagcattgcagcttttctgtatgatggacgtttagaggaaaggaaagcaataagggaaaaaattgcaggagaaggaaaatttaatgtgttgataacccattatgatcttatcatgagagataaagcatttttaaagaaaattgagtggtactacatgattgttgatgaaggacatcggctgaagaaccacgaatctgctctagcaaagactttattaacagggtacatctctatattcatctgtctgaagtgaatgatgttggctaactattatgtttctaacaaaaatttatccgggatgcagctatcgtataaaacgcagacttctgttgaccgggacacccatacagaatagccttcaagaactatggtcattgcttaattttctccttcctcacatctttaactcggttcagaacttcgaggaatggtttaatgctcctttcgctgaccgtggtaatgtcagtctcacggatgaagaggagctcttgattattcaccgcctgcatcatgtgggttctctagctgtctttccttaaatttcttatcaaaatttgtatgcactgttttaatgtaattcactctgtcactttcaggttataaggccgtttatactgagaaggaaaaaggacgaagtagagaaattccttcctggaaagacacaggtcatattgaagtgtgatatgtcggcgtggcagaaagtgtattacaaacaagttacagacatgggcagggttggccttcaaacaggtttgtagcttaactcacgtatactctctccctaatgttgcactcatctttgaggtaagagaaaatgaatcagaaagaggagctgattttatgcaaacgtaatcaccatgtgcaggatctgggaaatcaaagagtctgcaaaatctaacgatgcaattaagaaagtgttgtaaccatccttatctatttgttggaggagactacaatatgtggaagaaacctgagattgtgagagcttcagggaaatttgaactccttgatcgtctccttccaaaactgcgcaaggctggacataggattcttctcttctcccaaatgacccgtctcattgacgttcttgagatatacttgacacttaatgattacaaataccttagactcgatggtaccacaaagacagatcaaagagggcttttactgaagcaattcaacgagccagattctccctactttatgtttcttttgagcacgcgtgctggaggtctcggtttgaacttgcaaactgcagacactgttattatctttgacagtgattggaacccacaaatggaccaacaggccgaggatcgagctcatcgcatagggcagaagaaggaagtcagagtgtttgttttggttagcgttggctctgttgaagaagtaatattggagcgtgcaaagcaaaagatgggcattgacgccaaagtcatacaagctggacttttcaacacaacttccactggtatgtctgtccgaaagaacaatatgagggcttctgctttctatatcgatatggtaatctcttgatgtggtttttgtgattatatcaacagcacaagacagaagagagatgcttgaagagattatgcgtaaaggaacaagctcgctcgggacagatgtccccagtgagagagaaataaaccggctagcggctcgtagtgaggatgaattttggatgtttgagcgaatggatgaggagagacgaaggaaggagaattacagagcccgtctgatgcaagagcaagaagtccctgagtgggcgtacactactcagacccaagaggagaagttgaacaacggaaagttccattttggtagtgtcacaggtaagcgaaaacgtaaagagattgtttacagcgacacactaagcgagttacagtggctgaaagccgtggagagcggtgaagacctgtcaaaactctcaatgagatataataggagagaggagaacgcaagcaacacaaagacatcaacgagcaaaaaagtgatagaatctatccaaactgtgagtgatgggacgagcgaggaggatgaagaagagcaagaagaagaaagagcgaaggagatgagtggaaaacagagagtggacaagtctgaagaggaagaagaagaaggtgaagaagagaatgatggaaaggcaatattcaagtggaatactcataagaagaaaaggtctagatactcttttacgtgttcttcgtctgactctagagctcaaagttccaatggaagtagacgaaaatgaagaaggtgaggtgagatctgagtttgactttggtctcttcttctacgtgtttgtgtgtcttcttgccaatgtaacttatcccaatctaacatgtaatagtaatacatgtattttaattggtctctggttaagtttagctttttgttgttgttttaaggtactactaccaatgtatatgtttcttatgtagaatgatttattcgggattgaaaaacccttttcacctaaaagaaaacatacagcatgtaataatttgttcagaagatctaagagaccaattcattttttgagctactctaaatgtgcccttgccaaaatagcatccaaaccactgtctatgagtacaatacaaactaataaaagataaatacactcacaaattcatcttcatcattctctcttaaatcatcatcatcatccacattatatacgttcttatccaaaggtccaagtaactttggacaattcgtgaatatcactttgatttcctcaatgcctttaagagagatcatatttccatcaatgttcaacatcttgaaacttcctttcttgacaacaacacgagccaagcgcaatgctccttctcttctcaagtcattgtagctcatatcaacatattctaactcccaatcttccatactctttacaatctcaacacatccctcatcttttagatcattttcagacaaattcaactttttcagatgtctctttgctgccaaacaaactgcgatagctgtagccgcctcataagttatgttatttccagccatttctataacttgaagagatggagcggagttcttgagagcgtttactaaagctatagcacctccattctctagatttgtataacttagattaattacagtcaagaaactgaagcttgaaaatggtttgctcatagaaactccaacttttatatgagtacaagtctcgaatgcagtctcctctatagtatcctcattggttaagctagtgtccaccatattcaccaggagctcctttatttttttctcccaagtgaaccagaagcccaattcttatagttaaccatagataaatacagtttctattttgaataataataacagaggtgttataggaccatagaacctaaactccaacaaaatctgttgttatttattattgaatttaaaatcttcaagatattgacaagatatgtctaaaaatttgtatcattggttgaaatgtgtaagccatcttaaagagtttaattgatcccattagtagatattttactcaatatgttatgaaaagaatgataggtaattaaatcagaggaattgtataaaatccacttaaaatcaaattacataaggaaactttcgatataaaacaaagtttcctaaaacagtatgatttcatatctatctgtaggtcgggctcttgtatcaaacttaatataaacaaatgggcctcttatcccagtggtgaacaccaaatataatcttctgatgaacaccaaatatttttcactaaatccgatttcattctttgtaaacgaatttgtatttcaacatgttactattttgttctgtagagtttatcaagctaatgtttttttttttatgtagacgcctaatttattaaataaacgttatcttagcatcaacatcctcttattacgtacagctctactcatcctaaatattcattgagatggatgttttccgtattttaacgatagtttacaaaataagtaatattttagagactttttggaccgttgtggtaggccacaaagtaaacgtgtatgagctttgaacaaaatgcaaagagataccaatgttatattttattaatgcgagcacatgaaatgaaatcttgtgattcaccacgagcacgcttagcatccgaaagctttaatgcaatttttcattgaagaagcaaagaaaagtgaggaaacgtaaacactacttaaaaagagcctccaaataatatgaagtttaagatataataattaaagttattaatgttaattagaacaggtttggttatgtagggtttgatgtttgatctcgatccataggtgtgatttttagttcatgatggaccaaaagatttcatcgaggaaatagtgttagaaaaacccacatatatataaaataatatcgtcatatatgtatcaatccattgattggtttcacattatctaccaataaaatgtgaaaaaaatattaggaaatcgaaagattagaattcatatactaaaggttgaaaaatgaaaatagtaaagcttagattgatcttttcaaaccgcatatcaaaaggggtttttcaaccaccattaggtaaattaccgaatcaacaacataccaaaattacataaatcataatatcacattctgatactttgtggaagaaattacaaatgtaataatgttttcgtttgaggaaattgaacgaagacaaaagaaccgggccggtcataattccactttaccaatgtagaccgcaacagaaataacggaataagataataattttttgtcgtcttagaaaaaataaacaaaagagacaaaacaagttcatcatcagctacctctctgacctgttcctctaattctctcattcttcaaattctctggagctggagggtcaacccacccccctccttcttccaacctaaacctctcttttatgctaacttcttctctaccaccgtcgtctccgccgccatgtcccctctcctcctcctcctcctcacagtcttctccctcctctcctcttccctctctcagccctctcctccttcaggtatcacctcaatctctttaatccatcgcctaaattcgtatcccttccaatttccaattttgtgacatttctaattttaaaatttagcgattctgatcgattgtggcgcctcttcctcctccgtaatcgacggccgacaatggcaacccgacgagactttcgtctccagcggcacaccaaaaaacgtttccgatcaagtcctcgacgaaatcttattcactgttagatctttccctctttccctcgacggaactcatcacaagttttgctacgtgatgagcgtttctcgtggctggaagtatatgatcaggacgacatactattacggaggagttaacggtaaaggtactccgccgccggtatttgatcagattgtcgacggcacgttatgggggatcgtcaatacaaccgccgattacgcagatggtctcgcttcttattacgaaggggtttttctggcgcaggggaaatctataagcgtctgcgttgcttctaattcttatacaacttctgatccatttatctcagctttggagctcgttaggcttgatggtactctttacaattccactgactttaccactgttggcatgagtcttgttgctaggcatgcttttggttacagtggaccaatcatcaggtaaaaaagttcactactttgatttaaagtttgatactttctcagaaaaattgttccttcgatgctaaatctttcgaaaccaaggcaatgtattcaccattatcaacattcttcttgtttaggtttccagatgatcagtttgataggttttgggagccttattcgttaaattcgacagtaccaaacaataggaaactagaggtttctggtttctggaaccttccgccgtcgaggatatttaacaccgatctaagagctactcaagttcagcctttggagttcacatggcctccaatgccattgaaaatggctacttattatattgcgctttactttgctcatgattctgactcgatgggtgatggatccagagtcttcgatgtttctgtcaatggtataacgtattataaagagctttctgtcactccagctggtgcggttatctttgctagcaggtggcctcttgaaggtctcacaactttagctctgagtcctagaagtggttcaaaccttccccctcttatcaatggtggtgaaatgtttgagttgttgtctcttggaggcaaaactcttgttcgagatggtaagacttagaacaacagtgaatgattgaattcattgttatggtattttgataagtagctaactgctgataacatactgaagttgtgtttcttccttgtgcagtaactgctctgaatgcaattaaaaacagtttcaagaacgcaccagctgactggagtggggatccttgtttacctaaaaattactcgtggtctggaatttcctgctctgaaggcccccgaattcgtgtagtcgctttgtgagttggaattttgccaaattgtgtcgccagttttttttaaatcatcagtttgagatttactgacactgttctaaaattgttgttccaggaacttaactaatatgggagtttcaggttcgctagcacctgcagttgctaaattaacagcattgtcctccatgtaagtactttgacctgtgaacatttagttttatgcttgtacgtcaaaaacatcaattgatatttgtgtgttatgaacagttggctgggaaacaattctctctcgggtagtttacctgacttcagttcactcaaacggctggaatcattgtgagaagatatttagtttatttcacatacttggcagcaacgtttaggctgctgctgaacagagactcataagctaatcttatcccttttttctatgtacaaggcactttgaagacaatcttttcagtggaagtattccttcatctttaggtggagtgccgcacttgcgagaactgtaagtttccattctcatattaccatatacacagtcctttgataattggttaaaaatttagttgcttctctaaaataagttgcatattgtctgcatttctgctcaagattcttgccttgtggatggaaaagacataataccttgtattcattcttcttgtttttagcatcagcacttttgtcttttagctttgctttttaagattcaaagggcataatcaacataactaaactcatggctctttatatactctgttaatagttcctatactcagttattgaacctacatgtcttttatgcatcattgcattgtcgccattttgtttccatgagcatgaattgcttgctgactgagttatgtatgatttatggataattaggttcttgcaaaacaataacctaactggccaagttccgagcaatcttcttcagaagcctggactgaacctaaggtaagctacaaaattcccaaagctgtttttaaccaatccataatgtctcatcttgaattggctaatacaaatactctctgattcttcacacttcaggacttctggtaacccctttttgactcaaccgtcacgttgattcggccttctaagaagaagatgacaatgcattgagtttgtgttatagttttgtagagttgtgtgtaaattagaagcctcgcgtgtacaatcatctgttttaacatatcttaatgcttcattctttgaacactttgggggataagagaactactgattgcatgggttgtatcattctattgtgtaatgcaaaacatacattgtaatatgaatcttgtgatacatggagtttatgtgttttcctttaattaaaaaaatatcacctgaaatcatactttgagatatttctttgataaatatctatcaatatgctctgatgtaacaaaagtacaagagaaatgtgaagaacgagagctgtatttctgtaaaagtggagccccaattccaaaatagtgaagcagaaaccattggcgcagagaaaagtaatttatagaaaacatctgaatcttgcatgtgcccatcagtctttcatctttcattttctcatcattaactaacaaacagattactctgctttctatttctctgtctcatcatttttgtttttgacatttactcttttgtctctcacatctcacatctcaacatgcaacaaatctaaattcacatcttcatcttttcatgactaactcacttttggatccaaaaatgaaaatacaaaatggagatgaagaacagaggaacggttcttactagaatttcttaacactgtcacacattaaatctcaagccataaagcatacacataatacatctgaaaaacatcacttaaccacatgcattagaccacatgagttaacacttgagaatctgaacaaattcaaccaataattgtttttttcaatccaaagatagatcaaatcttctaggcgcgtctctctactctgtttttcttaagcgaaagaggaaacagaggaggcaaaggaagagaggatttagaaggagtgcaaataggaacatgaatcattggccttatcctcatactcgccgatctcgttctctctaatcctttcttacctctcttcccttctttctctttctcctctctcttcgctgcgtcctcaagtgaacttgatgatgacgtggacgacgacggagacaaagacgacactgtcctcgccgtcaccggcgaagaagacggattcctctgtttcttcaatctcaaaagctctttccaaagaacggtacacttgggaggacgaggagacggatcttcgtctataaaccaagtcactctgttatctctattgttaatctcctgatctttcttcttcacttccactttacgtttctctgcttcttcctcttcgttcgtcttcaaagtaatgtttttaagcttctctgagtgctttacttgccaaaaaggaagcaatttaccttcggagaagagttcatcggcggtaagcattctctgtggactcacattttccgacgacaagaactcaaagtcggagactttcactgaccctttgacgacatcttccttacacattacgggggtgatgcagatgaaatctccaccgtcagataaatcagatgagaaggagatacgaggtccaagcaacggtggtggttccgtctttgaaaccgtctctaaaaccatttcttctattgtgatgaagatttgatctattgatacgagtaagtgaatgatctctgcttataatctttggtggaagccaaagattttgtgagcaaatcgtggtatagacgtgtgactgattgattcttgtctataagtttaagagaggagagagttcgagctagtggtggactttgtgagagttatagatgatggagataatatataatgaaaaaaaggagagagagagaggtctgaaaaaagagaaacagagttaattaatgtgattaaatgagctaaatagagtttaagatagtactaatgaggaagacgaccacatggacacgttggggggagacacaaggagacaaattagagacatgtaattagagttgtgattttaaagcctgttggagattaagaatagagatgggccatgcaactgcttaattatatagtataattacatggatcgagattacttataaataagatagagaaaaaattggatcagtcaatggagttgggaattaacgagagagtaaagagtgcatgaaggagggtaataaacagttaacacatgtcggcacatgacctcgcgtctttgcatgtgattaatttcacacgtatctgtctatgaatttagtttttcattccactgaatctaggttatattaataattatttgagatttttatctattcattagaattttaagttatatcaataaaagaatgaagtcttaaattcgtatttagttctttctttaaagcatattacatttcattcacacaaaaataaaaagccattacatttcaatcaagaagatatcatattacgagtccaaaagtacctgcagacagctttaaaattatactcatttctttaaaatatatctatttatgtataaatggaaattgtgtttttgtctactatttgacaatataagatactaatagcaaactattgggtatggacaaacaaacagacaataataatttaaatggggtatatattgaaataatatggtataagaaaaattaaatccaagtaatatacttggaagcacgttgagctgtgcgggtttcttggtgttggaccactcgttttggttctagttttctttcttcctttttttttggtatgtcaacgttttggttctatagtttagtctgattattttatcggagtatttactttgaaaagtattatttattatcaactacgagttgcttttttcgttttttttttacgtgaagagtaaaaaattattactaaattttgttaagattagaatttacgatttggtgttaatcttattttcaggttttctgatatatatatacctatgcaatcataactagaagaataagaatcaatagctaaatagatatttgtgtcaattattcctaagttcaaaacttttttttttatagttcaaaacctatcaaaaacatattccctaaacaatgataaacgaaacaaaccaactaaagtaaaccgaaccaagatcttgttagcttgattctatcatcagtttctctaatccgtgactgttgtctgaagaggcaaataactctagactcctcctttagcctcagtttgctgcttctccgcaacagcctttgataatccaaacatatatcttgaaaaaccaaaatatattactattaacaaagtcataagtagtggttcagtgatcaagatctattatgagtttagtaaataatgaagaaagataaccttcttaatggttttgttgaaacagttcttgtgatcatccatttcttaacctcgtctacaactgcacattaccaaattcgaattcgaattgaaaccatgttttttataaaaaaattcgaattacaacatagcgaatataatagtaaaacaaacaatttaattaaacatattttttcttttatgtaatccatttaaatgttcaattgaatcccagtagtcattttccacaagaacaagaattagaggaccaaaagatgatatgcattccatggtgtctcaaaacaaatgggcctttagttataatgcccacttgtctctcctacaatatatgggcagcacagaacattagcaagtggccgcttaacattaaaagaaaaaaaaccaactcaacgaccccgttcaacgatttcatcttcgttctttaatttatgaaaatttacttaagataaacaatttagtataacattttttttatattaattaggttttttaattttgtaagatcttgaaatttattagaacaatttaagagtatatataatgtagaaactggtatgataatacccatatgtgaccaaataaataaaaatttgataccatttgaactaaaaacattacaatttaacttatatggatctgatatggaatatgaatacatataaaagcaaaaaatcttaaagtaatcaacgagtcaaactttaggtggctatatgatcaatataaaaaaaaggtagaagaaaaagaagaaaaaatcttttagaaaaaaataaaacttttaagtggctatgttttgagagaaataaatattcagctaaggaaccatatctgccaaattaatcaagtttgacttaacaataacatgtgtccaaagtaaaacaataacaataaccaaaaaaaaaacatccgcctaattactgccataacccataaatgataaaatgaatgacagattgtaatccgttatgaacagctcaatgtcttcacactccttcttctttatttatccatctttctatgcatttctgtaaaacctaaacatttacatacaaaacttaatccacataaaatattataaccatgtccaagcgacgcatttgctgcatagtttccggaatcatctttgtcctcttcgtaatcttcatgaccgctttgatccttgcacaagtgttcaaaccaaaacatccgatactacaaaccgtctcttcaactgttgatggcatatctacaaatatatcactaccatacgaggtccaactaaatttcactcttacgctggagatgctgctcaagaatcctaacgttgcggattttgaatacaagacagtggaaaacttggtttattacagggatacactagtcggaaatctcacacttccttcgagcacattacctgccaaaggttcagtgcttttgccatgtcctctatttctccagctcgataaatttgtcgcgaatttaggtgatatcgtgcaagatgtattgcatggaaaaattgtgatggagacaagagcaaaaatgccaggaaaaatcactttgttgggaatctttaagatacctttggattcaatatcgcattgcaatctcgtactcggctttccttcaatggtagtggaggaccaagtgtgtgatctcaaaactaagctgtaaatagttttttcaggtaaacatttaggcttaagagagcagtttaattctagctagtttcctgtaataataaagattgtagtgctcttgatcgctgttctttaatcaactccatttttgtgagttcttgaaattaaatgtattcctttgaatttgaaataatgaatttgattcaaaaatctgaattattttatttttacctccatttgaaaaaaggaaaaatagtgtattattattattattattttatgacaaataatttggagaagacttgaaaacacgaaatcaacggatagcgacatcatgaaacagagttagaaaagcgtgcctcctttttttagtatctatctttctctctttcggatcattctctcctctgattccgaatcgggtaaattattatggattcttcttcttcgtcttcctccgccgccgcacgccgccgtatcaacgctatccactctcacctcgtcacctcttctcgctcttcccctctcctccgctccaatcccaccgccggcgagttctgtcttggtccgtatttcctcatctctctctctgatctatactagtagcttcctctcgctgctgattacttgtcttctgatcgcaatcagataatggctatagtgttgttcttcccgagaaactgaatactggcagttggaacgtctacaggttccttacgcttcctcttcttctctccttgtctccattccctctcttaatatttgtttttgttttgaattcaatttttcagatctgcaaaatctccgttcaagctcgttagcagattcccagatcatcctgacatcgctactctccatgacaattttgagtatgaatcagagtctcccgaaagctgatcatctcttctatatcaattctttagtcatctctctgattgatactgttcttggggtctatgtaggcatgctgttcatgattttcgagattacaagtatttaggaactcgtgttcgtgtcgacggaactgttggagagtgagctcctaacttactcaatctatgtgtatctgcaagaaagtactttccttgaagctagttttcttatgtgactctgttttgtttttttcagctacaaatggatgacatatggagaagctggtacagcaagaactgctttaggttctggtttggttcatcacggaatccccatggtaaattattggattcttactctccttcctgattgatttttaagtttgcagctagactcaagtctctgtttttcttctaccagggatcttctgttggaatttacttcatcaatcgcccagagtggctcattgttgatcatgcttgttcttcttattcttatgtgtctgttcctttgtatgatactcttggtaagtatctggttggttcggcgtattatttccatttcacaattcgtggggtgttctaattctgctctttgtttttgctcaaggtcctgatgctgtgaaatttattgtcaatcatgcaactgtgcaagccatattttgtgtggcagagactttaaactctgtaagttctgtcaatctcctgctttaatttccttctcttttttaaaaaattgcttacttggatgatagtgagaaaaaaaaaacaacaaccttttttagcccttactcaaatgatgtgtatgttgctgactgttttctttaagtgcttgtacttttgcttaataatcgtttttctgatttctttttgcttgctttcctgcttgatttactgctggagatttcagttacttagctgtttgtctgagatgccaagtgtacgcctggtggtggtatgaagaaaactcatcttttgttattcttttgaggattatgactacagtttccaaattaattttgtcttctctctgttcgtgatacttctcatgaccaagtaggttgttggagggttaattgaatctttaccctcgcttccctcatcatcaggagtgaaagttgtatcctattcggtgttactgaatcaggtacttgtatgattttgtaattcaatatccgttttctgaatataaacaggattaaggacattctatcatttaagatattgcaagttcttaccagtgctattatgagtcttatcctgtttattaccaacctagggttcatcaacatttatacataactgggtacatattagtcatatatacacaagtgtacttccacatcattacgcttttacctataactcaattttttttttttatatcaggactacttctacacctttcccatatatccataatagttttctcattgagataatatagtcacccagtatctttctcgctgatagcagcacagttgtggtggtacatgttggtttcattgttttctgaccaacaaatttgtttcagggtcgtagtaaccctcagcgattttttccaccaaaacccgatgatgttgcaaccatatgctatacaagcggaacaactgggacacccaaggttttacttacttgaaatgttatcttcatttagggtagtactgttctttatttcatatttaccctgactatagcatctaacttactgtttattttatcctgtatccctcattcctcccttgcctgctcttcttctggatgaaatatgttaaagggagtcgtattaactcatgcaaacttgattgccaatgttgctggctccagctttagtgtgaagtttttctcttcagatgtgtaagcgctttacttctttctactaatggttaaacattttctgtgttcttctttgtatctattgctacatgtatcttaattcttaaaatttccattcttaagtggtctttgtttcagatagactataagtaactaattttgtcaaaatttcttctactttccagttacatttcgtatcttccacttgctcacatttacgaacgagctaatcagatcctaacagtgtactttggagttgctgttggattctaccaaggggttagaaactgaaccttctccttttaggttgcattaagtaaccatcatagacctatacacctgtgatctggtctttgcttatactcttccttcactctcaaaccattttctattgatttgattggacgaaccacttgcaaatttttctgcaggacaatatgaaactactggatgatttggctgctctgagacctactgtatttagcagtgtccctcgattatacaatagaatatatgctgggtaatataatggctttggtttgttgatatgcgctctctgctgattttgagaatccactgaattaatgtaaaattcttgttcccagtatcattaatgcagtaaaaacctctggtggtctgaaagagagactcttcaatgctgcctataatgcaaagaagcaggctctcttgaatggtatgtcctgtcatacttatttacattaaaatcagtctatgcaattctgtagctttattttgtaatttctgacacagataaggactttgattactgtcgagttctaagagatgataaaaagtaaaagatcctttatacagtttttgggtttgatttcctttgtatgggtactgttggttcaggaaagagtgcttctcccatatgggacaggttggtatttaataaaataaaggacagacttggagggcgggttcgttttatgacgtctggtgcttcacctctctctcctgaagtgatggaatttttgaaagtgtaagtttattgctattgaaatattgtgttctgtcatattatacaatagacttcatcctcaagaatgaacacttttcagtccccaccaatccctctctctcactagctcatgcataattacagtagctttggttccacataacttttgtacattagcttgtgattttcttttccctcttgatttaatcttgtcatatgaatactccagatgctttggaggaagggtaacagagggatatggaatgactgaaacatcttgtgttataagtggaatggacgagggtgataacctcactggacatgttggctctcctaatccagcttgtggtgagctttttactgactctgcgatatgataagtagagtaatttggaactaaatatccattttaaattgctttgggatttaatatgcatttctatatttcagaagtaaagcttgtggatgtcccagaaatgaactatacatcagcggatcagccccatccccgtggcgaaatatgtgttaggggtcctatcatttttacaggctattacaaagatgaaattcaaacgtataaacacctactgcattggaaattcctctttcactaaccaaagtgtaccaaaagtttaattatttcagtaaaacgtattattttcaggaaagaggtgattgatgaagatggatggcttcacactggagatataggtctgtggctgccgggaggacgtctaaaaattattgacaggttttccaaaaaatcacttgattgttatcagctgtttcttcactaaaatcaaatctcttggctcacaaagaataagcctacttcttactgatgatacaaacactaagaaataacatctgcaaaagtctagggagtgcaaagctctagtcttgggttacattttggggacttgttggtatcttttgaatcgcgaatcatctgagtgaaattttctgatcctttgaatagaaagaagaacatcttcaaattggcgcagggggagtatatagctccagagaaaattgaaaacgtctatgccaaatgcaaatttgtgggccagtgcttcatatatggtatagtaaacaattatagtaaattgttttgtataacattttgctttatcctttccccatctcacctgttaccaattttcaggtgatagctttaattcatcattggtagctgttgtatcggttgatccagatgtgctgaaaagctgggcagcttcagaaggcattaaggtgatataacttacgtcaccaaattctctaaatgtaacattaaaaaactaactttataccactttgctgaatgtagggaggagatctgagagaattgtgtaataatccgagagtgaaagcagcagtactatctgacatggacactgttggaagagaagctcaggcaatacatctcagaaaacaattttctgtatatcagttagttactattctcaaaaacatgatgattgatttggatgataaaaatgtttggtgcagttgagaggcttcgagtttgcaaaggctgtgacattggtgctggaaccatttactctggaaaatggcttgttgactccgacgttcaaggtaaatttcttatatgaatatacttcactcaaactagcttcaaaaggtaaattctatcttagttagtggaaaggtttgttcgacatggtatatgttcagatcgatttactcaaattgaaaatgcctagttcctactcctataattagtgtggtttagtaaacatcatgctgtctctcttttaaaatcggtaaaaaaagcatatctggattggatgtgggataattagcaaaaccaattgtgaaaatggattgaggcaaatggatttgattgaatattgcagattaagagaccacaagcaaaggaatatttcgcagaagcaataacaaacatgtacaaggagcttggtgcttctgatccctctgctaatagaggtttgtgatgatggtataatcgtgtgattaataaaaagcctacgcaaaagttgtttctcccacaaattgtattcttttttgttttcttgctacatatttattgaatagtaaaggtaataaaggtgctacattacattaatgaaactttcttacagtacaatgttttccctctgtaataaaaaggcaaaacattcccaattctgttttattgcggattcttcggcctaccacgaaacgacgatctctgtccgtacgctgagatctatatgacaatatctttatgttcgtatccaaaacccgaaactacacatccaaatagattatgtgctttggataaaaacccaatcgtaaatgtttaaaagtattcgattttggagttttttcggtttaggtattggaacaatcaactttaaaggaactatagtctgcgtagctttagttcagtaatattttagcttggtcttgattttacatatgtattaatgtataattaggtaaatccgacttttgttccaaaaaaaaaaaaaaaagctaaatccgaccatgtctagattaaaaaataatacgaaaaggttaaaagaaaggcaaaatatcaaatttcatagagaaatataaaaagatgtgatatgattgaatcattttctgaaatatatctttcgtaaaatctgcttttataatacaaaaattaattttatatatttaagtactcaaaacttggttaagtttttggttgaatcggtttggttaaccaggttaaatacccttgagccagatgtgttggtggtacttggtacagaaagatttgactgtgtaaccaaaaataataggaaagtgaaagaaaaagaaaaagatttgagatccaaaaacaaatcacagaccatacaaaaccccgtgtatcttgccgatgctatttcgaaaaacaatcccatttttagacaagtctgaatctcacagtttggtcatgtgattctgacatgtcttttatcacttataaatacgtgatctccttcatcttattatccaacagggtctgtcatttcaagcagggtctctgtctccttcagcttccttcatgtttcatctttagcttacacagacacacacatatacaaacacttatatatttgacatatatatactgagttaatttgcgtggtggtgtctgctcgagatttaattaaacatggctgttgttgtgtctaatgccaatgctccggcctttgaggccaagatgactgtctatgtattcatctgcgttatgattgccgctgtcggcggtttgatcttcggttacgacatcggaatttccggttacttctctttctctgtaccaaatttcattttacttgcatttcaagaaaaagtcttaacttgtatctcaagttaactgttttggtttgcttttagctaatgttactgatctgtaaattaaaaggtggagtaagtgcaatggacgatttcctgaaggaatttttcccagcggtgtgggagaggaagaagcacgtacacgagaacaactactgcaagtacgataaccagttcttgcaactgttcacctcgtctctttacctagctgcactcgtggccagtttcgtcgcgtccgccacctgttctaaacttggacgcaggccgacgatgcagtttgcttctatcttcttcttgattggtgtcggtctcactgcaggagccgttaacctcgtcatgttgatcattggaagactctttcttggctttggtgttggatttggcaatcaggcagtgcctcttttcctgtctgagattgctccagcacagctccgaggaggtctcaacattgtattccaactcatggttacaatcggaatcctaattgccaacattgtcaactacttcactgccacggttcacccttacggatggaggattgctctcggtggagctggaattcccgctgttatcctcctcttcggttcactacttatcattgagactcccacaagtctcatcgagcgcaacaagaacgaagaaggaaaagaagccctaaggaagatcagaggagttgatgatatcaatgacgagtatgagtctatcgtccatgcatgtgacatcgcgagtcaagtcaaggacccttacaggaaactgttgaagcccgcgagtcgcccaccgttcatcatcggaatgcttctccagcttttccaacaatttaccggaatcaatgcgattatgttctatgcgccggtcttattccaaactgttgggttcggaagcgacgcagcccttctctctgcggttatcaccggatcgatcaatgttctcgccacgttcgttgggatttacctcgttgacagaaccggcaggaggttccttcttctccaatcttccgttcacatgctcatctgccaggttctaattaaatctctcatctctttgtttcttatgcctcaagtaacttaaaggtaggtttcttgtcccagaagtaaactaactaacctcttaaaacagttgatcattggaatcatcctagcaaaggacttgggcgtaacgggaacactcgggaggccacaagccctagtagtggtgatctttgtgtgcgtttacgtgatgggatttgcatggtcatggggacctttgggatggctaattcctagcgagacgtttcctctagaaacacgtagcgcaggattcgctgttgcagtctcatgcaacatgttcttcacttttgtaatcgctcaagccttcctatcgatgctttgcgggatgagatctggaatattcttcttcttcagcggttggatcattgtgatgggactgtttgcgtttttcttcataccagagacaaaaggaatcgccattgatgacatgagggagagtgtgtggaagccacattggttctggaaaaggtatatgcttccagaggacgaccaccatgacatagagaagagaaatgcttgaaaacacgagtctgttgatttgtgtctttttcccctgtttctgttttttttttttttttttgggggggtattctttgattctttcgcacttcttttgtttcgtgggaacgaatagttcaataagaccaacttgttgattcaggttaggtattatcaattaaattccatggaaacaaagtttttgaaaatcacattcctgagtactatatattatttagatgttctcattattaccgttttctctttgctcaatgtcttctaccaaacgcaactgctaatttcacattaggggagagagcgatcttctgcgtttgcagaatcgctacatcaagaactactgtaaaaaaaattcaaattttcgatagtttcaaacgccaatgttaaaatgttataaccctgagataaaaccttcttccaaaatctcattattttattttaaaaatctcaattgggataaattagctagataaaatatatgtgtaatttctagcacactcagataatatgatgattattttttaggtttatcttgaatcgaattgtaatgtaggattgagaattatagcagcttctttgagaaaaagacagcaaaaggaatggagataatctcgtagatgattgcaaaggaatttctccaaaaaataagaatacaataatatctgagataagtgaaagtgtttaccaccatccctcgagctcaacccccaatttatatttgacaacttgtaatgcacgtgattgtattgtcaaataaatgtgcacaaactgtaatttaataacaatgaccgtattatagtgattagggcacttagattaagtggctctgcacttgtatgtttatcttccaacttaccgtgagtcctttttggtcactctcctcatgatgtatacgtagccatcacttataaattccatgtattttgaactaatttcagatttaaaacgcaattcttttttacaacaaagattgaaaattcaaatatgaaggtggcctgtaatccaataattaatattatagctcaacttaagatttagataattattattgacttaatcacttaattgtgagaaatgtggatagagcactcaaacaaaaaatagcaatatgtcaaacatttaccctctagcctcctttgtttttttctaaacttcaatttgtgaatgtcatcagcatcacatcagttttttccatagttgggggaaatattattagttttttcattgaggcaaaagatgaggtactaattctagatttataccacacttaagtagtgaactatataagaaaattgccttttttataattatataattcactatataaatataaacatgtacgcaaaatctaaagtttttaagtattctttaatctcagtgataaaaataattgtcaattctttgttttgtgaaagaattctttctttgttcattcgcctaattagtcgtgtaaatcaaaaataggagattcaccaatgagatgtaacctttcgtacgactcttaattaataaaactcccattaaaaaataaatataactttattgtgctatatatagcgcatcattagcgtgcaatatttctcaattccttaccacaaagctaaggataaagaaaataaatagtaaatggaagggtttcttcgctttcttgtagcgaaagccatcttattggctttagcatcttcatttgtatcttgttacgacccaagtcctcttcaggacttttgtgttgccgtcgatgacgctagtggtggtaatctctctaatttactatacatactccttaatatagttcctcaataccgtactaattatgatttatgagatactatatctttactctctaacatcaattagttaaatcaataacatcaataagatcttcatctatttatcagttttcgtgaatggaaaattctgcaaagacccaaaatacgtgaaagctgaagacttttttacttccggactaaacatcgccggaaacacaataaaccgcgttggctccaacgttacaaacgttaacgttgacaaaatccctggactcaacaccctcggagtgtctcttgtccgaattgactttgccccgggaggtcaaaacccgccacacacgcacccacgagccactgagatcctcgtggttgtcgaaggaacactcttagtcggttttgtaacatcgaaccaagacaacaacagattgttctcaaaggttctttacccgggagacgttttcgtgtttcccataggaatgatacattttcaagtgaacgttgggaggacgaacgcagttgcgtttgctggtcttggtagccaaaatcccggtacaatcacaatcgcagacgccgtttttggatcgaagccttcgattatgccggagattttagcaaaagcgtttcagctggatgtgaacgtggttaaatatctcgaggcaagattttcttccaattatgatcgtcattattaacaagttaagagaatgaagggaaatgtaccaaaatatgaataaaaatataaaataaaatgtattatagcgtggtgtgagaactaaaataaaacaattaagactgtaaaaaagaaaaagaaaaaaagagatgtgtcttttatagtataactttttaaggtaaggtgcttgaacttgattacaaaattaaaaaacacaattttgctatttattaatataattatggttgaaaagctggagtacgtgattttgattaatgattttgcaatcaaaaatctaaatagaggtatatttaaaaaacacaattttggttgtatcctctctctttctacaaaatgtttatagaactaaaaaattgttctataaatttagtatgatctttttattttattattattaacgattatataaaagacataatattttgtttgcgaaatacattcctacatggcggactgatcctgtttgtgttgtgatttgatgtttttgtgtcttgtatgctgataagtttatggcaatccactcaaacttaaggtcagatagcagagaaaacaagctaaatacccacccttagatataggtagtttttttttttttttttttgtatattttgtgatataggttgtcggagctaaaaacttcaaacccacaaaagaacattcttatcgaacaattcaaaaatagaaaaattgttcttcgttggtaagaaaacttggttggtaagaattgaaatcccgatggccgacatcatttttaattgggccggttctaggcccaaaccatatatcagcccaaactctagattttactgcataatggaaattcccaggctggaacttaaatggattatataatttaattaatgataaaacatattccttaatctcgactctgctgcgttgctttatcaactgaggaattttgaatttcatatctccaaagtaatctcttttccaaggaagatcagtacaaatcttaaaacccccgatcagagtaatccggggaactatctccgccgttgaattcagtctgagggtttctccgatttcagttcgatctgtgtccgggattctctctgtgttgctttctcattgcgtttacgattcttcttcccctttcaaggtacgctcttgttggttgcgttctaatcactctcaaattccgggttttggcttcattactgcaaattttccccttttattcacttgcttcgattcaacaattgctgaaagctaatcgatagttaaatgcttttgaatcgtgaaattcgtttcggatttagggttttttttctccgctataagcttcaatccttagtccactgggattcttgagcacctcccggagaatttaggagggaattagctcttctccagatcttgcttagctcttgtacaggtacttacctttagcatttctcttgtttagagtttgacgagtttgatcagaacttagttacgaattgtctacttttgtctcccagaatggcggatttgttacccatttacctcattattttggcatttctatgcactgtcggagccattgctttggctttattccatatctacaagcacctattgaactatacggaacccatttatcagagatatattgtgcgcattgtcttcatggtcccggtgagtattagcagttccaagagttttcttctgtttgtctatcctgatctgtgactgtcaactccattttaatgttgaattctctctggctaacatgttattggttctttgggcatgtcaggtttatgccttgatgtcattcttggctctcgttttgcccaagagctctatatattttaactctatccgtgaagtgtgagtgtttctgattttttcgtattactagtttgacatgggatgtacttactcgagttactatactaagttctcattgactcttgggaatagatgacgaacataattttaacctttggtttcaacaaatgcagacctcatggttaaggctttgtaatcttttttttctttttctgtttcagttacgaagcatgggtgatatataattttctatcgctgtgtttggcctgggttggaggcccaggttcggtagttataagtttaactggtcgctctctgaagccatcttggcatctcatgacgtgttgcatcccaccactaccattagacgggttagtttgcagaataaacctacattctctgtgcttatattagtgcatttgcatatatctttgatttctcctatgatttttttcacaaaatcttggaacttcttaaattcttaaccaaaccatgccaaggatctttatgaatgatcatttggttgcatgcactctgggttagcagaagcattagattattttagtccagatatatctgtgggagtcttgttttcgagttctatgacgactgccttaattaacatgtagtaacttatacaagattatcttttcatataggcgttttattagacgatgcaagcaaggttgtctgcaatttgttattctaaagccaatcctagttgctgtcacacttgtgctttatgcaaaagggaaatacaaggatggaaattttagccctgatcaatcctatctctatcttaccatcatctatacaatatcatacactgtagctctgtacgcgctggtcctcttttatgtggcatgcaaagatctgcttcagccattcaatccagtcccaaaatttgtgattataaagtctgttgtctttctaacctattggcaggtgatttttcgtactctcttgctatcactgaatctggtttttggcattaacttttgctattctccatacatatataacgtatttcttctgtctggcgaacctttttgtgttacagggtgttctagttttcctttttgctaaatctggatttataagggatgaagaagaagcagccctcttccaaaattttataatatgtgtggaaatgcttattgctgcagctgctcatttctatgcatttccgtacaaggaatatgcagaggccaatgttggaggagctcgcagtttctcaggaagtctggcacatgctcttatgctaaacgatttctaccatgatactgttcaccaggtaaccgattcattgtataacaaatattttgaaatgagtgatctaagtccttttggtgatgatcggttttcgattcttgcagtttgcaccaacatatcacgattatgtgctctataatcataatgatgggggtgaggaagggacaaggaagtaccgagcacgaacatttgtgccaactggtcaggaaatggatgctgttagaaagaacaaacacatgtttggaaacaagatagatggtgtttcggtctccagtcaatcttcagaaacaagcacacccaaaacctctggtgtaacttatgatcctgcacgccctgagagcatgaaatcttccttgctggtagatgcctcggactctgtttccacaatgtatgacatgtcgctcattgacattgatatatcgagctaccctagcaaggtaccttctgcaaatataagtggaggacctaaatagtgagtcaaatgatgtagaatccaccattaacagtaacaaaagtcttagatttaggaacctctcaagtgtgttgttaaacgggaagatcttagttggagatgggagatataagtgttttttactcatgtatgtgttctcttgttgttcttatgaatcttccactggtatttttttactttgcacagcctttttcttgttcttgcttgttccacgatatttggtttgtagatattattagattattatggcatattggttacacaatctaaaaaatagttagataaagcttggagctatgtgtattgaagtgtttggagctgttaggctagtctcctgcctctcgtgttcctttcagacctcgaataacataatatttttgtttgtgtgatatttatgcaaacattgaattaattgtagtgtatacactaaaattcttttgtcgtgcttacgcaatttggtaaattaataaacccaagaccccagcaacaaagcataacaataaaccaaaaaattatcatcgtttcaaaaatgtcaatatcattatgtcactcaacatcattttaaaaattcatattcttgaaaatcatacaaaattcagactgaaaattgctagtccattatattaaaatgaaaacaaaaaccgtcttacgtcttacgtcatacgtaaaatattataatcttacaaattagtttatcatgcctataagcagaacgtgaacattgaactttcaattgatatttttacttgttgggaagttagattaaagtctcacctagatatagtgtatttgatttgacgagaccactttttattttagtaaaaaaaaaagagagactccattaaaagcagagagagagagtagtacgtcaaaaggcaaaagccaagccagaaaatatttaaagcaacaacgtgaagcacttgaaaacacgattgagatatatccaaccaaaccaaaaaccctattcgttgtagctacggcggatttggcggcggcggctaagtgttttagtgttttacaagttaaccaaataagccatcaccggaatccagtgcaagaaatctcaatccacccttttgaacacaattctttactttctcaattcctaattccgaggagcagaaacagcagcagcaacggcgtttggcagagcaatagtaacggttactatagctatggatatggaggaggatacgtggagaagagacaactattccttaagagctaccaattctcgaggaaacagagtttcacagagaagattaagatatccatgaagagagtggtgaagaaagttgtttgtatgaggttgaaatctgctagaagattgaaacgcgtcgtttggtcgcggctgaaaacggcgtttttctaccgccgtagacgtttccttcgtctccttcatccaaacaaatcctcttcctactgtttctactaggtttctcttttctcttcttgtctctgttttcttcgttgatgtgtgtcctgcatagttagctgcgtgcttaaaattaagatttatgttgttttattcactaaatgatcttgttatgtttaaggattgtggtcaaaattttcgactttttgttttgtgatttagaaagagactttaggatatgaaagatcatgcaggaaatgaaatgtgaacctatcgtcagattcagttaatgttcgtattattatatcaattaatgtattttgtgaatcatagtcataacgcaataacgtaaacgagtcaagttcctcttttctcgtgtcctcttccccaacaagtcagtgatacgttttcgtaagcgagtctgtttttcttaccaatcattttctaaagatgatatatcttatattgggcctatttatgggcctatcgtgggtccatttagttttcagtggacctgtatttctcgagctgataagtccacgcgtatcagaagcacgtttctctcacgcacttggctttctttggagttgaagccaaaaaaacaaaattattagctaacaatcttgatatttcttcttgttagaactataaaacaaaattgggtagattttcttttatgttcgttgttgaactttataatttgggggaaaatcaggaaagcaaaccgaaagaggttagctaaaccggatacatatagttgggttgaaatatatatgtattgttagaaacaaataatggggagaaaaaaatagactagcaaccaacttattcctcgtcaccaatccaatcattgtcgactacgtgttttacaaatatttttggacctttgtctcttctctttcttattattcttctctctctctctctctctttgttattggcacattgtggcagggattgcccccaaaatcgttttagattttagcagagctactctcttctcttctcaactaacttaactttgtttaaattagttagttaattagagacttccaaatcccaatcatttgatatctcctcgtatcctttttagctaaagtaaaaaagcattaacttaatttatcatttgaaaacgaaacctgaaattcccaacaaaacttgcaataatagtaacatgcaaaagttcaaatatataatattgtcttcttgttttttgacaacacataatcttgtttctaatgggacatgcaaattatcttactttcttttttgcggattttaatttagcacttttgaaactcagctaaaaatggaagatgattattatttcccattttccgcaaaactccatcgtgaatttcggtttgcataactcttaactaaaacttatgaatcacacatgactccaaaacacaaaggatttgtaatcttatagcagcatcacaatccgcgtaggtccatatacagagcatctgcttatgtggtttaacaagagctgcccattttaacagattttggatatttttttgggttttaaatggaaaataaagaataaaatcatgtgctttaagaatctttcttactctctctgtctctttataaacacatgcctttaagccacttccctcacaatcattatcatcacataattcttctccttatctttttaagcaaaaacatttcctttttatattcctgttttgttactgttttcctagtttcatatctctttgtttcgttcttatccttcattagacagtgactctgtattgtcctaaaacaacaacatacacacaactttataagaaacagagatgttgcagattgtaggcaagtaccggtggagacaatcttatcggtacaagaagctaactgatcatggcgagagattgacaacaccaccaccagaaagaacaacgaggtcgccgaccaaaagacagaacttggggaagaagaacgagactcgagcaaaagggttcagagtaaatcgatcaaggaagctggttcttaaggcactagctttgccaagaaggatctttaacatttatatgcgcatcacaaatcagatgaacaaagaaggtttatatcctaatcttgttttctcttctcattggggtttccctggtttgctgaattcaagaggtggattccgttagtgagaagatatctgattctcattactcaaaaaacaatgaaacatagaaatgtaaacccacttccatgttcttctaaattacgatttttggaggattatatgaacagagttcaagattgtttttttctcttccataattcatagcaagttgtagagtgattctattagaatccttatcactattggtcaaatacaagtaaagttgtttttttcttttaggaagaagatttgcagtcataaaggacacatgaactttacagaagattccaacttaacaatacagtatgtgatgatttgtgacaatcacatttttttcttatgcataaagtaaagataagacttggtcagataataaagaaagggtttaaagaaacactagaagcatgtcagtacaaaaaaatccaactaacttcttttgttgcacccatgttataaaggaactaactttgtggtacataaagcaagcaaaacttcggcgcttcaactcctcctcatttatgaaaacccatttatgcaaatattgtgaaaagggagaaaagatacagagtataaggagattggtacaaattaggaaagatgtgaaatggcaaaagagctggagaaacttgcaccaagatcgtgaggtatttatgctacgacaacatgatatattggatcatgtgctttcaactgataagtactatatatttcaataacataggtagagagaattaatgttttcatttatcaatagtgttctctaggtttatgatttgatagaatgtgagttaaggaaagacttggagctgaaagagatactaaaggagaacagaagtcttagaattttggcaaatgctacgtcactacgctatgatgaaggcaaataaatgtagggaatgccattgtaaaagctaaaggtcaatagtgggaaattttttatatgttgtctcttaatcggcttagagctaaatttgattttacattaatgttcttcgtcactaatactctttttctcctttttgcttaagtttaaacgcaattcaaaacatttttatttgatttaaacgccaatttacacgttgaagcgtgaaacaaaaacaacatttttaaaattttctctggagtatataaaatatttgcgtaataaaaccgtcaaacatattttgatatatatatttagttttttttccacaatagtttgatattttatgcatttagaaaataaacatgtttacatgctaaatgttataggttgatcgcgaaaaaaataatacggaagaaaggaaaaacatttgcaaaccggaggaccaaaacagcaataaaattgaaaatttggtttgccgaattaaattatttttctatttcattattagtaaaactaattaataatttatttaacacgaaaactcgattgcgattttttgagagtgagaaagagccagcgaggcctggaaacaaaaagcgtgaaggagaccgtagcaagtaggaagaagaaaccagacctggcttcgtctctgatagatcgtccaattttctatccgaattttggccaactgattctggtttcggtggatgaacaatgaacagaacgagagagatcctgataacatcaacaacaagaagaagaaaaaggaatctccattgttgatttactccgtctcgaaagcaaagaaacgaatcgtgtctaagttcagaaggagacccttatcgccgaatacgtctccttcttctgggttttggaaaagagtctgcttttgtggaattgaacctgaccctgaagatgacaactttaagcttagggttctgctacagaccaatgatttcttctccaaggattctaatccacatctctgtttgtaagttcagatatatatatatatatatatatatatagtgtagttttcatttagtataccaccaatatctgtatagatcttcttttaaacttcatcaatatcaaaagtgtgttcatcaatgttaccaaagatttttgcagaacagagtgattattgttaatgaatcttgtatatctgcctcttatgctcatcattaatatctgtgggtctttcttgtctctcttcatagttccgtatgatagtttctatatgtctctgacaatgtcactctttgtccataatatccaaactagtttgtaagatcagaaatttgagcccaagtttgaatctcagagtatcacactcaacgaatattaattgctaatgtctgatatctgtttccatgtgttgaatatctctactagtaaagcccaagtttattttggcaagtgttgtttacctttgacacatctagggtaaccattttcaatggttttatgaatagttgaattttactgagacactgatgtagttgtggttttgaaattgctatatggatttaatcatctctatgaagccgcggaacccttgtgctagttatgcttactaagtcttgattatgcaaatggttatctccaatcatcgtttgtttattgaatctgattctaagtgattatgaagaaggagcttggatagttaatggttgatgtttcagagttgtagcatgcctctgtgtccttttttgagacacgatttccctctaaactcagctgaaagttcagccattaaatctactggattgaaagcactaaagaggaccttaatattcttgcagtatggtatgtttcaagaactgtcgattgttcaaagatatatatatatatagactcttaaacatgtgaaaactggtctcatcgtaatcaatgggccaaatatagtcaaaagagtatctacaataataaagaaaagaatgaaaaaaagttacaagcttttgcttagaagtttacatttttatgttcatcattgtatatcattattagattagtgctctggtctgaaacttatttatttctttggtgggaattttcccttaatcttctgaatctctggtgctgcagccccgaacgccttggcaagcaggtcatcaggaatcggtgggttagaaccaaacagagatggtccaacaacttgagtcccgggaagctggctatcgaaagcagcgaggacggaagcaggagctttgttagggttctgctggaaatggaggagagctttggggaaaacgaaaacgtctcctttgttgacgtgtttggagatgagtttcccggtagtggttaagaaaccgacgaagagacggccttcaaggacgaagatggcttcagaggctcttgggtgaagatgtggtgggttaagtccgccaggtgcgtagtcgatccgagagatggagactcccagagtgttgaggccaggcactttctcaacgttggctcctgtaacagctgagcccattgaagagttggctgtggctgcagcagtggctaagcctatgaagtagaagtcttctggtgttacttttgctgggtctttgcaagggtatccgttgactttcaaacctaatcagaacatgataaaaagtcaacaacaaaatattggaattggtcttggttgtttcaaaacaccaaagctgcgtttgcagttaactatatctggtaaatgtaaatgcaagcagaacataaatggtatagagagagatgtgataccgttggagagatcagcaacacaaaagtcttgaagcatatttgtatcggcgagggccatgtgggcggccacgagcatgaaggtgacgaatatagggatcatggaagttgccattgttgattgttgttgtttgtaagatgttattgatgagtttgagaaaatactttaacattgtttctcaatttatatatctacgtaaagaagatttaaccaatggaaaaccaatggagaagagataattatggagaggggccatagatgtgttaattttaaaattttgccataattaggtttaggtgttctgatcgttggttaaaatttggtgtttaaaaagagttttgttttgttggacacattaattagcctatagtttataggatgacactcaccataacaaaaacaccttcaaactctaataatcaccaaactcgaaatgattgatgattttggttgtttactggtgaaagaactcaagaggtttgtttggttcagctaaatccaaaccgggatagaaataaaaccaaaaccttaaaccggcttggaatttctctatccatgcatttgcatgatcataacatatacaatattaaaataaataaataaacatttggggtcaagaacgtacaaaattagatagaatatgggactcaataatatattcataaattttcaagattaaacaaattccatccacaataatgtcccaagtaagtccataagatggtggctgaataccaactaagcaaattcccaaaacctcttattcaattatacaaaaacatgcatctaagcacgtagatggtgtaatctcttgattatttaattaacaatactgaccaaacacaacctcaactgcttcaacattattccaatctgtcatctctgtttgtcttcacatgtttttaataacttcttctcttccttcttcattcctttaatccatttttctcgatcttggctaatccatcatgactgtcaaggtaaacatcctagtactagttccttttcaaatccgacaccgaatgtttgagtttttgttgtggttgtgagcagaaagttgagatcaaggtggatataaactgtggaaaatgcaacagcgcaatcatggaagcagtcacagagatagaaggtaatgaacgaaaaaagactcaagaaatatgtgctcttaagtcttaacatatcatcttgaacatgagatttggtgcaggtgtgaatcatatttcattagatgaaggaaatagtatacttaccgtggtggggacaatggatccggtctgcgtagcaacaaggctgaaaaagattaaacagaaacctgtgatcattagcgttggaccaccaccaaaacctcctgagccaccaaagcctccagagcctgaaaaaccaaagcctccaccagcacctgaaccaccaaagcatgtatgcaagccaccttactgcaacagttgtgatgttgtgtctgttactacctatgaaagtggaagcggctgcaccattctttgagtcatatatcgcgtaccatagccttcatgttaagtcctgtatttagccaatactaattcatcatgttctcatgcttttttgtttatttctttttctcaaatatgaatctctgttgtttgtccctcccctgtttataattagtcgcttctttgacacaagaagtctcatgagttcatgctaaagaaaataaaagttcaaattaaaacaccaaatgtttgattaatttccataaacctgtgaagcagaaagttagtcatgttgacctgaacagagcttaggaagtccttgaaggacatatcttcaagtgctattgggtcgtagcactcttaggcccattaacttcattgagcccattaaattatgcaaaacaagaaatgagacatatggaaacattagggttcttacaggaaaaaataggaaaaagcagggacaactaaacaaaaattcagaaacaagaggcaagtggacgaccacggcgtaagatcaacatgtggtgatgtgcatgagaccaagaccattttttctcgttcttcaacgcacacttggtcttttcttatgtttgttgcatttctttattaggcagaccctctctcttttttaataggatagtaaaaaatatatgattttattttgttgaaacattttgagttaaaacctaaacttatagtaagcatttgtagagtgaatttcctatacgacatctatcaacatgacctctaaccaaaaaaatattgatgaaactactttaagtagtaaaacctaaagcaattaaaatttcctttaaattagtagtttgtgtaaattaattgacatgattgcgtcgaaagaaatcaaaacagttatatcgtgaacttaggagaatgttttatatcgtgtttcaacacatgattgctagcatatgtgtaggtgtcgtagacgttacataacaatcatcactcgtaaatatcaaagtggtttctgagagaaacaaagggttatgattttcccaactgcactagttgtgtattgtttctttcacacgtatgcttctgagttctgcccaaagtggaaattaaagcagagttgggagagatcataatttattagggttcgttatgctcaagtcatgacgtaaaatgaaaatttgtttttattctttcaccaacacaaagaatagctagttatctctttttttatatataacaattcatgaagttgatcagctttatacacatcatccaatcgaattgctaatctagagatggaaatatcaggatagagccaataagatatcaaatccaatggacccattttctccatgtgctaattcatacaatctgtttttgtctgctttatttgatgatgatgctgagcgtttttaagtgtgaactaagatctagctaaccaaacaaaagatggtctcttctgtctttgtcgtataagagcaagagagtggtttgattcaatttttaaaattctaaataaaactccaaccgtgaatccagccatgaaactctttttagaaaatccttttttataacaaataattcctctgcttcttcttcttcttcgtttatttcaccttttttggtttctttagctcagaaaaagcccattctttttttctattcttgtttattttaatcatactgtgcgtttctacaaagtttgttcctttcttcttcaactctctcactcacagtcacagagatctgtttcttttctttttttgctttcactcttctcttccagtgagagagagtgagagaaaatggtgaagcttttgttagtagggtttgttgtggctggtataatactgggaactcaagcaaatgaatatttagatttcaatgtgacagaaatagatcgcattgaggaattagagtttggattttccaaatatagctccaatttgaaccctttaatggttggtctcacccttatcagaggagctgattctggagctggtactttctctatgcttctgtcactagctagatctctacatgtctctctttcttttacttttgtgagtttttttcagatgtccaaaaaatatgaaagagggtacaaaaatggtttcttttgctttcttcatttattatcattcacttcaactacattcttatcagtttgtttcctctctattgtccacttccagatttaacttgtcgttttttgttatgtactcttcaagattactttggtcgttcctgttttattgtctaggaatgtaaataaaacaaaattaatgctagttaagctcagataaacaaagttagaactagaagatgtgtatgttctgtgtcggtagaaaaacaataaaaacaaaatatttgaatttagatatgtttgggcctttacacgtttgtgtgtgtgtgtttgttcacagtttgtttggatggaacattgcctggatatcacttgcaccgtggacatggatctggagctaatagctggctcattcaattggaggtttagtgaattatttgttgtcgatgaaacactagttaaagtcttcattgttgatgtttgatgtttttgtatcagggaggaggatggtgcaacaacatcaggacctgtgtatacaggaagactactcgacgtggttcctctaattatatggagaaacagcttcagtttacaggaatactgagtgacaaagctcaagaaaatcctggtttgtctcaatctttgtttaagttttgttcatgttagtgtaatgttaatattgaaaatcatatattctcattgtcatgtgctttacttctgcagactttttcaactggaatagagttaagcttcgttactgcgatggcgcttctttcagtggagatggccagaatcaggttgaaatcaatcattttttgagttactagagttcataagagacccattgttgtgatttggaacaacttgctagtttctaggcctttggaactctgtagtctataatcgtcaaggctgttattagccacagagaacgcttgatgtgatcttagttctgtagaattgagcagccattggttttgtgtaacatctgtgaactaatgcaaataaaattctttaccttaactttttcaggctgcacaacttcagtttagaggagagcgtatctggagagccgcaatagatgatttgaaggcgaatggaatgcgatacgccaatcaggttttgacacttaaccttctataagagtctgtatctcttccatagcataatatcaagggcaggaatggatttaactatttatattctgtcaggcacttctctccggatgctctgctggtggtttagcagcaatcttgcgctgcgatgagtttaggaacttattccctggatcaaccaaagtcaagtgcttgagtgatgcaggcttgttcttggacacgttagtttatttctcccaagtcaaagattgtattaaagctagttcattttcccttaccttagtaactactactgactcctttgtttctgtaattatagtgccgatgtttcaggcggccgcacaatcaggaacttatacaatggtgtcgtagaattgcaggttggattcctctttcttcacttgaaagtttcttactttacatttaaagagcacaagaaacttaagaaatcttcttcacaatttacagagtgtgaagaacaatcttccacgtatatgcacaaaccatcttgatccaacctcggtatcttatcttttgttctctcattctgatgctgttgcaaaccggtcattcgaagtcttgtgttttgataactcatatatctgtacagtgtttcttcccacaaaatctgatcagtcaaatgaaaactccactttttatcgtcaacgcagcatatgatacatggcaggttatgttttttctccctttgaaaagtgccacattgctactaaagaacagaaagttgatggttaggctgacaagtctctgtaatggtttttaaacagattcaaagcagtatagctccaacatcagctgatcctagtggattttggcatgactgcagactaaaccatggaaaatgtactcctgcacagttgagattcttgcaaggttgttctatagatcataaaaacttgtggacttcaccctttaaagcatcattgtatcactctaatcgtttaatcttttattcgagaacaggattcagggaacagatgcttagagtagtcaagggcttctcaatgtctagacagaatggattgttcatcaattcttgctttgctcactgccaaaccgagagacaagatacttggtttgccgatgattctcctgttatcaggaaaaaggtaaaacctcactcaaatctttcccacacaaacaaagtaacacacaaggaaagcctgtttccactttctagatcttgactttgtctatggaatgtttgtaggcggtggcaatagctgtaggagattggtatttcgatagagcggaagtgaagttagtcgattgcccatacccgtgtgacaagagctgccacaacttggtgttcagatgattgtttgactatgttctttattctctctcatatatacataccttagaaaatttctttctttcaaaaggaaagattttgtatcctttggtagtaaccaatgcctcattggtatatgattaagtgtatcgtggaaaatcataataaaaaaacaaaacaaaacaaagtttgcttaaaaagagttcaatgtaatcaatcacagagaaatgctctttcttttgttttgttttctaattttctttgcaaatgcaagtagttgatcaaatatattagaaatgtcaacattggtaccaaaagaattcaagcctaactaattcttttatgtattataagtgtccaacaaaagcagataatggataagaataataataaaatagtaaaagatagagagaaagtgaaaagagtaagaatatacagagtgtgttgacaacttgacaccctgtttttgtggggggtgtgagtgacagctatctagtgttccccactttgtgtgtgtatatgtgtgagtgttttttttacacctatcatttgctttcaatttctcccagtcaaaatactaacttcttcaacaacttctggaataataatctgaattcttgaagttgaaccctgtccattacttttctccttcttctcctgccttctgaatcttcttccatggcttctgattctcacactccaactgttactacacctgaaaaggtaagctattttgaaaactatccctctgttcttgactcttattttctaagctcgtgctcatgtatgtatttatgtatatgtacctctatgcgtgatgcttttgaggttgatagataggtttcttcatcacgttttgatacttgtaagatccatatgctttcactgagacagagtccaatatacttgtatgtgtattcttccattgttttactgcagcaattattagaaggaaaaaaaagttggaacttttcagaaagttgtagattatgcacatggatgttaaagaaccaactttgtccatctttttctagaaaactcttcttacgttccaaagtatgattctagttagagaaataaacgaagcaatacctttctaaggtttcttgttgtgaattataagagaggtttacttttacctgatgcagccattggagaataaggtgagcgaggaagctaagttgatggagaaagagattatttcgtcggattctgcagatgtggtgaatgataaaccggcatcagattcaaacccggtggtcaccaaagaagaggagattgatcaaactcctgctggtgaaccagagaaagaatcaccagcagtggtggaagaggttggagctgttgtgaaagcagaggaatctacagagacagtgaagcatgagaacggtgagaagggagctgaacaagtggaacttaaagagccaatccttgttaaagagactgttgcagaagttaatgttgaaactgttgataccgaaaaagcagaagagaagcaaaccgtggagaacgttctaatagaagaccataaggatcaggaggagacgaagattgttgatgtctctgaatcaacagatgaagctgaagtccaacaggtggaaccagttgatgttcaacctgttaaagatgcggagaaagcagaagagaagccaaccgttgagagtgttgttgaagaagaaactaaggatagggaagagacgaagattgttgatgtctctgaatcagctggagacaaacaggtggaatcagttgatgttcaatccgttagagatgtatctgcagagattgcagaggagaaagtcaaagatgtggaggctcttgaagtcgagccaaagccagagacgtctgaaaaggttgagactcagcttgagaaagcaagggaattggaaacagaagttgaggtagtaaaggcagaggaaacagctgaagcaacagaacaagctaaagttgagcttgagggaaagctggaggatgtaattgttgaggaaaaagactctgaaatcaactccaaagatgaaaagacttctgaatctggttctgctttgtgctctgaggaaattttatcgacaatccaagaatcaaacactgaccccataaaggagactgaaggagacgcttcttatcctattgacgtcattgagaaggccattacagaagagaagcatgtagtggatgaaccagcaaatgaggaaaaaccttctgaatcaagtgctgctttgtcccctgagaaagttgtaccaataaaccaagattcagacacaaaacccaaagaggaaactgaaggagacgctgctgctcctgctgatgtcattgagaaggctattactgaagagaagtatgtagtggatgaaccatcaaaggatgaaacaacttctgaatctggttctgctctgtgccctgagaaagccgtacccacaaaccaagatttagacacagaacccaaaaaggaaactgaggaagacgtttcttctcctgctgatatcattgagaaggccattactgaagagaagcatgtagtcgaagaaccatcaaaggatgagaaaacttctgaatctggttctgcattgtcccctgagaaagtcgtacccacaaaccaagactcagacacagaacccaaaaaggagactgaaggagacgttccttctccagctgatgtcattgagaaggccattactgacgagaagcatgtagtcgaagaaccattaaaggatgaacaagagaacgtaagtgaagccaaagatgtcgttactaaactagcagcagaagatgagaacatcaagaaagatactgacacacctgttgcggaaggaaagagcgaagagactttgaaagaaactgatacagaatcagtagagaaagaagctgcagcaaacaaacaagaggaaccaattacagaaaaagtagcagaagttgtagaaacagcacctgttgctaaagagatcgatgaggcgaaacaacaaccagaagtcacaaccaaagaagctcctgctaagcaaaaacattcaaacagcattatatcaaaggtgaaacaatctcttgttaaggcaaagaaagcaatcattggaagatctccaagctctaagactatcacaactgaagaacccaaagaagaaatcaaagtctaagtgataaagtgttcaagtttaaagttttcaggtatttttattcaatttgttggttttgcttcgtgtgggagaaaacaaaaaaaaaacaagaacattctttttctttgtttttatggctttgtgtggtttataacttatatctgtaaacatacaaagatttgcctttgtgttatggatgtgtgttgaaaattttctttacggttatcattcatcagcattacatttcatgaataagcaaccatatcatttgaaatctcagaatcagaaccttttcctttaggagttttctctttggaatttcatcaaacaccttctccgcacaatgcatcttcccacaatttcaccaatcaaatcgttaaagtacataaagaaggtttcgggtcaacaggaaagttctgagaagcttcgcagatacaggaattgacgtctatggcggtcgaatttgcgtgagtaagatgattccaactttccatgaggatgttttggagggaaaatcaaaacctagtttatgtcagtttcacgttccgttatatcgtagatgatctaataaacccgctttgaagtgatccttttgaaaatgggcctgtaatgggctcagatgtaattccaatcaaaaactttaaagaatggataaatgctaagaccaatgtcggcaggtttttttttttttttttttttgcaaagtttttcttgtcaacaatatttcaataccagcgaatttgcacaccaaaataaaggaaacaaattcttgaaaatttaagatattaaagtcaagtttgaatagaagtgaccaattcgaaaggataagaactaatagattaaagcaagcgacattaccacttattttataacaaaataaaaaggacattacaactttgattaggacttcatatataaagtaaatctattaatagttttgtggtgtcaattcaatgccacggtttatgcgttggtgtcggccggaatattttatcactaaataatgttttgaaaaaagagagtaattaactcaataatggtcatttttatgaaggagtgttgagtgtcatgaaagcaactttaggaagaaagaacatatgctattattatgctgacagatgaagccagagtagcatgattcacactaagtcactaacgatcttctaaatatcacttattttacaactttcttgctttgctccaaagatttattcttctagacagctaagctttgttgtcatcgataaaattaaaatattgattgggtgcttattatactttacactagttttctcgagaaaaaacgaaagtctatatgaaaactaaacaaattcaaattttgacagaatatagcactaatgtagtacaaagtgtaactgtattgtttgtaattatagaaaaagagtctgatcaaaatgtcaacaattaaaatattattttctggattaaattagttgtataatttatagttacgagtaaaatagttttgtaaaatcattaaccatactgagatcaatagcataaataatataaagtgatatacaattttgaaaaatatttaaaatgatggaaatgccccattcagacttttaggtttggttgagaatatttaataaccggttactgaaacgcaaaccgaccaataaattaatttaaaccaaggagtgtaaagtgattaagcacccatgttctatggagttatggagcatgggttttgtcacgtgagaggacggccgggtaatgcgttgacagacatgaaagcatgtgagtggacaacgtgtcataagcctgttggtggaaggtgtgagacttgtacctctcgccgacctccacgccggagattgtcccggcccacattcgtgtaaccgacaacgatatggtgtttgatgaaatatttagggtttgatgaattcgtaaaagagaatgaattctgggacgtgtagcttctgtgttaagccacttaactttctgacaagtcctacaggtacaatgaattttaagtcaaacctaagctttcattctggtcttaatcttgaaagcattatttttattatttttgtttctcgaaaagcgaaagcatttgtttgctatacatcaacaaatagaagattccgaagaaacgtatattttcttaaatggaactttgaaagtaaaaaatcgatctttagtacttggaacttgctagctgcatattacccaattacgaaaatgtaaatatgggatttgacattagaaacagcactagtgtttgattgacaaaatataaagcacattaacgcttaagtgatcggataccatcaccaaactggaaacctaaaccaaataccaaatttcaacaactttcaactaacgtttttggtctaacaaattaattattatgtaccaattaaccataatcgaagacgcttattaaatatttttatttatcgtgcgcgccatctatatatagttggtcatttctttagttccaaattaccttgaatttatattatttcatgccactgtttatgaaatatataatgtgactcagtcctgatattttaaagaaatctagtttaaatattaatgaatatgatatatagtgtttatttatttataatcatttagtttgattcaagataagagtaactaaaaacataagaaaaaactagattagtaatagagaatattaaatttaatctttgattaacttgtttgattaagttctacataccgcataatgcccaaagataaaggaaaatataattaaaatcatttagatttccccaaaagcaatttttaaaaggaaaaaaaaataaaacctattactcctacaagaaagggagaagttacagagtaaccaccacgtggataggctcataaaatatagagatctcgggtctatatatatataggagagtagagaaagtccataatcatcaagatttagtgttaaagcataataaatattttctttgaaatttgaagagcttgaaaatgagtacagccactttcgtagagattattcttgctatcatcttgcctcctctcggcgtctttctcaaatttggttgcaaggtacactatttgcatttttactgcttcttttcattagaaagagtttcttttttaaaaaaatctcataattactcgaattttcagatttttgacttttctttttttgcaggttgagttttggatatgtttgattttgacgctgtttggttatcttcccggaatcctttacgctctttatatcatcaccaagtgatttttcctatctcctctgttctttcctcttgctcctcgtaagctctctttctccacgatctctccccctcaatgtatattaatctaatcatacaaacatacatgcgtagctgtgatgaatatagaacgagatttaagatgaaatatctttgattaactatatatgttttccacaaagaaattacgaatatcttcttaataaaattaaataaaaagaaaaataaattaatgttaggtgaaccacatttttagtgagatattgttataacgattcactttgtaacattttcagaaaattatcgaataattatcaattaaaaaaaaaaggttaaaataacactataagattttatcattttgatttacatttttattagtaaaaggaattgaccaaagttttaactttacatttgttatttgtgtaggaagaacagctgtttcgtcgtgctcttctccctttgggactgattcatcatttattttatgttatgagcaattgtattctcattgttgtatttgcattattgtatactttctgctgatatcaagaaaaaatcgttggtttatgtgaggaatttatttatttcgtttaatttgtacaattggtaaaatgttgcaatgagcaggtttggattccggaccaccattaaaaaaatttaaaaccaacgttatataaatccatggtcacatgtctcgtctcatcaccaacaaatttgcaccataagtactcacgtggtccatgagaaatacaagagaatcatccccaccggttgttaataacccaatgttgataatatacgtttttgtcatctaatagttgacatgaatcagttgaatcgactatacaattaattaaggtcatatctttatttttggaaaaacactagtgaagaaatagagtttttcaaacttaaaagattacctaaatttgatgaatacttaattatcggagacggatacaaaggaaagaaattgtcaggaggcaaaacacacgtatat

SEQ ID NO: 1272 - DNA, 93478 bp, Arabidopsis thaliana
gaattcatcagtttatttccaaattttactccatgatccccgaatgaccaaagaaagaattagataagagtaaagtatttgagaggagaatcgctgagagaatttacaatcacagattctctcacgagcttcttgccaaggctcatgtcatgtcacaatcaccgacttgggatattatttagcctcaccgacttgtcttttatgaatcataatgactcgattcactgaaaatgaaatggccttcatatgatatgattaatattaatataatatataaatttacggaaaaacaaacctaaaacataaaacatatccataaaaacactttcgtgcatttaatgataacaaacactcgtttttagaaaaagttgccatcgactagggcaacggtgttgagccagtggaagatcgtgtggtcgacgtgatttacatgtctcggtttccgattggttaattatcctatatagttggagaattcgtcgttgtaaattactatcacaagattcatgacttgtttttttttatggtttcccaaacaagagttgaaaattgcaactttcggggtataatatagcgataatgatttccaaatttatttcttaatctagctttttaatacacaacacatatgcacgtcacttttatgtctgcacgtaaaagagatacctttttccaacaaatggaagtggccagagaggcacaaatacgtgcactcgttaactcgaacttcaaaagattacgagacacatatcaacatgatccagacaatatccgtatttttttcttcttggtaaatcaattcacatctatgtctaagtctcaaatcatgtaaacttccgaccatttcgtctaaatgtgaccgttgtttgtttcataagccaacgatatcccggaaatttacttttattgggctaggcccaaaactgtatatctttgaatcatcgaaaaataattttaagatttttttttatctttacaaccagagattaagattaccaacctaattacatatattcccccacccaattaatctaatcacccaatcaaaaaatccagaaccctttttgatctttaagcttggcatcttaagaaaaacgccaacagctttaagaaacaagagcttgttgtggtttccttgtcctgtccaggcatcacgacattgtaacatttcctgtactgttcgcttcttcaactcttttagaagaagaaggagcttcttgtttcataaataatgcatagaagagctcgttccacgtgtcaggaacaccgggaaggcaccagtggctacagtcttggcgatgaagcggtgcaggaccatgcggaccgagatagtagagtgatgggtgaccatcttttctttgagcagccattgccgttatgttcaacagtttcactttaacagtctctgatctgtttgagttatgtgacaacacatctctgaggatctttaactgttcccaggtctctgatgaagccaatgaggttccaatctctggtaatgtctccatatgacatgttcctcctgttttccaatctcctcccctgtttcatacatacaacgacgaagatatattgaaactaaatgcagaacattctacatcataagacctaaacctaatcaagcaactgaatattacaaacgattgagtctttatcaagagtaataccgtacaaacctgaaatgcacgggggcgaaagtgcgaaagaagacttgagttttgtttgaatcgagctcggtatgtatccatttcacaacggtattcagagctcgcttataagcatcatctacattcatcttcaattttacttcttctccttcttgaaagtaacatcccctgttagtaacaacattcaagatttggtcacaggaacaaatttcagacaagagattaagtgacacatcgaactcgggtatacgggacaaaaacttacgttctagtagttttcccctcgttccaccagtgtccagtattgagcactaaaacgtcagcatctctccatttgcttgaagtccaatccatagtgtccagtttcaaacttgtcttgacctttccaggtgatccaatcggtggtctgctttgaggaaccaaaaatggagatctgtagtactccactgtgcaattgtactcctcaaatttgaacaccaagaaccctttgtgctttgtgatcggacttccatttatttcataaatcaagctctcgttcttgactgcagaagatagtagacaaagtagagactcccactggtttcttcctattgaatcgccaacaaacacaagccgcttgtcccggagtttctccagcatcagttttgcatcaaatctaattcagttttcaaaacaggaaaatagagtcagctaagtactgcctcccaagacaaaactgaattctctattataaatatctgcaatcaagtattccacaagaattgacctttactcacactattccacaaaaccaatgtcaaaaactttgcttgatctaggtggaattcaaaacctaaacatatagttcatagctcaagaaacaccacggacaaactattgtgcatacatgttatttggcaaccaatcctgtctttccagtttaactcacgggtacaatacaaaacaaaacccttaatagaaaaagaaagagcacacacattgattggagaagaaatagctgtttgatgtaaatgggaaatggaagaagaagggaccatataaaacgatcaaatcaagagaagagaacaaaaagagcgactggctttaataccaaaatctgatgactagtttcacgagattgtgcttatcctaagccgtaacttgcggacaactggagaagagaccatagaaaacgacatcatcaaagctgaaagcaacaaaacttaaagaacctctgacttatcttctccatagaccaaagacttgataaatctcaaacccaaaaacaaaaaaccttttgatttaccagaaattactacaccaaaatctcctttccaataaccaaaatctctagaaaacaaacataagaaacttaagaagttgcctagaacagtaaaacacagaagaaacttaagaagctctgatttctctaagattcaataaccctttcggtttccaaagaaaacactattcaaagaacaaacatgaattccatcaagataaacgatttgatttagcaattaagaacaccaagtggcagaaacagagtaagaacagaggaaacagtcgaattttccgggggagaaaaacagaatcaatacctgggcaaattacagtgtctaggttgccaacgccactgagtatagaacaaatcagaccttccaaagtcactacacctaaacccttcatcgagaaatctgcaatctttggattgatacaatggataagactcgtcccaaacccaatctccatcgaacacatcacacccacttccactctcttccagaaacccaactctctttgaactattactactactactgctgctgctgctgatattgtcaaacttgagccaaacgaatctctcagatttatccgaaaggccatagcttttagcaacgcttctgtaatcaaagaagaaaaaactgcaaaccaaacagaccccaaccaagaaaaaccccaacactcctaaagacggctcgaacacaagcctcgaccttttgaatctcctcaaagcttcacagattggctttgctcctccattctcttcaacgtttgagttcttagacatctgaaagtatctataggaaatcgaaaggctttgtctttgggtttaagaattcaagaaattggtaaagtaaaaaaagagggaaatcatgacgaatgaagatgaagcaagtagaggaactttgcttggtaggtcagtttcgtttcttttagtttaaaatgatgaagaatgaatgaatgatgcgaaaaacatgtgtcaaggaaacgaggaaacactcgtggatggatgttttgttgcgcttttccaatggagaaactgaaataatgtttggatttttttcagacaaaagaagacgaagagagaagaatattggtaacaacaacaatggcgattcggttcgaatccagacaagcgaaaatcaaaagaaaactctcaactttctcttcttgtccttttgtgttcacattcacaaggagagagatagatgcaggagtggctattggttgagaatcgtggggtttttgaattatgggtccaattaattcctctttatttgttttttgtttaccctagaagaatcgaaaaaaacttactcttcaatttaccctgattaattttttctaataattgagataaatctgtgcttttgtagtaactttagattttgtagaaccttgaaagtgaaggttcataactaattaagaagtcaaaggataatagtatccagaaacagtaagaaattaaccacagtttaaataactttcctgaacaaatattcttccaatctacaattagtcaattactaataacaacaggtcagaattcttacacacataatttttttaatttgtttcttttgtaacaaaactacttaatataattggtttgctagtaattttacaacgttgtatgaataattgtttacacgcgcctgcttggcgggtgagatcattcatgtcgtagcgagtggggagggcaagcgtgtaagttaaaatagtgcgaaggcgcgtgggacaaaatgttatgagtggtgataatggtggggccaccagccgtgtgcccttttattagtggggtttttaattcgtctacctgaaaacaatacgtaattacgtaaatgtaatttgcatttaatccttttttgggactcaaattttatgaagtaaactcttgattccttgctttacagagagattgttctattatggaagaatatattggtgataaagatgagtagtacagttgtgtaagtagataaattggcacctgataaatgttagacaaaaaatgggaaaacaaaaagctgtatttgttatgggatttggtacatattaattagtaaatgctagagattttttggatgaaattgtagtcttttataaactttgtaatcaggatgaaacactacaaaaattattagttgagtcatttaagcatttgattaaggcatataagttaagaaaatggggttattatcatgttatatcactaataagctcgtatattccaaagtttaatgacaaatgtaatggtcccaggctttgacgtttgacaaatgacaaccaacggtcccatgatttttgcgaacagtgttttttttttttaaacgttgatatggaaagagattcgtcgtctttgacctctaacatttacaaggtgtattaatgttgcaaatagaggtagttggaaaataacactattatcaaatgaattaaggttgataggtttgagcaggcttactcgaaattgggtattttaggcttaactcgaaattgagtattttaggcactgatcacttggccagtcccacatgcaagttacggacaataaagcccgacgtctgagaaacaaattgtaacaaagaataaatcgaatttcaactagaatttgttatttcggaagaagaatttaacttgctgatattattttgttaggctcaatgtatatattttataaaaagtttttttattaagaaaaatgatcttatatgagaaaactaaaaggtgtagggaccactagcatgccaaaaatgtaataatcaatggcgttaagcatcaaatattttttcctctatacaactcctatctttatcagttatcatctacttatccttatcagcttcgtcacgtttggctttttggtgtcactaacttatgaaaaagttttattatattatattattactagctgcaaaatgtattagaataggctataactcaacgaattgcaattatttggatcggactaccgtatcgtgtgtttttttagtccacagttccacaccttattcgagtatagcttttcgaaaacaccctggctgaacctatatagtttatgcataattcataaatgattgattcttcagatgagaaagaatcttctaatgatttttacgaaaacacatgattaaattgaagaagctcgaaattagactcgggagccgtccatgccacttgtcttaaggttttgtaacacatcacatgtcattttttcttggggacaatgaatctcatgacaaacgaagaaagaaagctagtgagaatatattgcgtaatggtcaagctcaaatatatattcgattttaatgtgctttatataatatatgcagagagcatcgtaaatactttgcttaatcaaaaatttctgttaacttttttcttcttgtattgacttgcttgaactttaaaagtagtgacaacgtagcaaacggatctcgttgttcagctttgatttgatcaattaaagtgcttgcaattgcgtttgagttttgcattacgaaatcaacaactttaaaggtttgctttagaatttgcgattttgacaaaaaagattataatatacaatcttctggtacttttcaaaaggaaaatttagaacacttttactcaagtctcaagttagtgagtatcctcgcatctaaatgatttagtttcttctaatgatcgaacaatttctcgagagcaccatctaaatctgaatacatttagttggaatgaatcatatttgatctaaaacacatggtttaaatttctgcaagaccgcaaccagactcagacatatcatgatttaatgaaatttactttaattcttaaattagaagttctgaaatagcattaaatacaaagtagcaacctaaaccttactattcgtagactgtttactcactcagtcaataaacatttgaaccgtttaactaattatgcattagctctcatagaacaaaagaccaaaaatctataaacatgcatatatacacgaatacgaatcaatgttgagaatctatagtttaagtagtagtcgacactaagaacatgaagatgaagaagcttcttaaagttgtgtttctcttggtcgcttacttaacttgttccattgccatggctagttaccatggttgtaacagggttgcagagaaggcaacgagaatgaatgtagtcggagaagattcaagaaatgagtttggaaactacgaggagaagaagaagaaggcgaatttgtggtcaggtcgaaagttagcttctggtccaagtcgtagaggttgtggccactaaatttttagttggggtaataatttaagatatttaatttcatttctctaatttatgtttgttggtatcgtttagtaatatgagtattttagtgggttcttataacctaatgaaaggatttgaatattcatacgaatttcgcttcactataaaatatatgtgactaaagatttttaattgcgttcatttcattgtgtaaaaagaacaaaatgccccctgttttcatttgctttaccctctatatcttcaatccgataagtagctctctgttttcgcatcacggcatctaatgacgtaatgacaaaaacttaaaaaccttaaccaagaaaaaaaatcaaaagtgtttatttgtataatagatattaggttttgaagtgattaacgtaaaagtgaagaaacggaaggggaaactggagaagggcaaggcctggtttttaggctaattgatctgtatgtcaaaactccgattatggctccgatcaccggagctgtcatgtaaatccataagtcttcaaaatcccatgccaccaccgccggtccaagtgatcgagctgggttcatcgatcctcctgaaatcggtctaaccataccatattccacaaaacgttagcattatacgatcacatgaaataactattttccaatactttacggtgataatggagttttaagttaagtacccggtaataagcactccaagggaaatgactgttccaatcacgaaccccgtcaaattacccaactgcacaaaataacatataaaattaaatgcatataagttttctaatcagagagtttgattttttttattttctctttggaaagaaataaaatttcataattaagaaatagcatgtaaatgtcacattttaggtgttattcttattagaagatatttttttataacaagcggactagaggagtaacgaagatcgatttggtcacttacattttgatgaggaccacaatgcaacgcggaggcgagaaacacgacgatgctcgtagctatgagttcaacgaaaaatgcagaaacgcagcttaaagcaggttttgttgccataatgtcagcgtttactccgtacactgacaccccaactaatgttgccgccgttgcccccaatgtttgcgccgttatatacaacggaacctggcatgtgacacaacattccaaaaaagaattttcagttttcataaaaaataatttgtaaacgtccaaacaaaagattaagttttctcgtctcatcttcgttgataaatgaaaaaaacacattatttgatcttggtctaaacgctaagataaacaaaaacaaacgatcaagaccaagataattcaactacaattcttagttggtcaaacgccgtgttgagatggatgcattatacctgagaccacgggaatccgccaaagacagcgaaagcaatggtgatggaagggttaagatgggcgccagagatgtgtccgatggagtaaactacgaccaccacagataatccagcggtgacggcgtactctagcaatcccacgtggccgccggataattgggtactgcttatgaccccacacacactgaacattagaatgaatgtccccaccaattccgccattacctaaacattagtccggagatactattaattagcattttatttctatacaaacattttaatattttcaaaaaaattatttgtaattatggacatagccaattctttagtttaacacaaaagtattgtgagatattaatcttgttgattctatgattttgtgtatatatgaagcttacaatgcgtaggggattgagatctatatcataagggagacatccgaaaagcctttgtctcgagggatgatcttcatctctcaaagtagatggagttgagccagcttcttggtcgactactcttgaccgtgcctcaccattcatcttcttaattccttcaagatatagtgatcaagaactgaggaaagtcacaatcaaggtggcttgatccgctttatgaatgatctaatggaacaaaaaaagagagatagagagaaaaacgcaaagaagatggaaattaaagagtaattattttatttcaacaaaaagaagaattagtagagtgctgctatattcctttggttaagcagtctgaaaggagaagagggtgctcaacacttttcttgtgttcaattttcacttcctacctaccaatatttcttaatgttaatttggtgatttctaagtcatctatttattttaatcatcttcatttcatgtgtaaaaaggttgactctcttaaatcttttcacttaaaaaaacaaacaaattgttgcaccagccgggaatcgaacccgggtctgtaccgtggcagggtactattctaccactagaccactggtgcttattgattcatctatccgaactaaactattaaatattaattacgaatctagggttatttatctttctgattaagagttttcgtctgtacaagtggaattttgaaaaaagaagcagagagcgatggagaaagtggttgatctcttcggagtcggagaagctaattcccagaagctactcgaaggaggcaaagatctcagcgagatccaacaggttttcttcgtttctcttctctatctatccgtctaatttcacacttggaatttctcaggttttggagtctttaattccgaaaaatcgtttgttggatgagtttattctcagggattgttcataggatcagtagctgaagcgaataacaaggattttctcaaaagctctaatatcactcatgtcttaaccgttgctgtggccttggctcctccttatcctgatgattttgtctacaaagtcattgaaggttgggttttttttcttcaatccttagcctgtttttgaaatttttcgtttagagattttataaacttgttcttcatcgtgtagtggttgatagatccgagaccgatttgacagtatatttcgatgagtgttatagcttcatcgaccaagctattcaatctggtggtggtgttttggttcattgcttcatgggaatgtctaggaggttttgattcttttgcccttaaatctcatacattcagttattagatttagtgtttaagaatcatcaatgtgaaccaattgcaaattatgtaaccatatcaaaaaagtgtatataaattgccaactgagtaaccataggaaactacagagactcagattggcaaaagtgtatatgaatcttgtagtttgctttgattcttttatagcttgctgattctggtattagtaggagttatggtagtgaacagattacattttgttgtggacaaattaagagtttttcttgaacctgtaatttgcttattgtgtcgttctgttatatatatacttacacaatttgattggtttgagtttttctttgaagtgtgactatagtggtggcttacctgatgaaaaagcatggaatgggattctctaaagctatggaacttgtaaggagccgacgacatcaggcatatcctaatcccggtttcatttcgcagctccagcaatttgaaaaatccatccaaggtaatgcatgattgcttcagctgataagaagattcaagatagtggcatgatgaactctcatgaaattccggcaagtgtcttcagccccatgttggccaaaaaagttgattggtttcgtgctgtgaaggattttttcttgtgaactattgatggtgagcactttgccatgtccattagccaattgaaatgaatgaaaacgcagaatttacatttcctctgttactacaatgaatatattttctaggaggatcagtgtgaatttaaccaaaccaatcccatacccaaaccagactgaaaattggttggtttggttttcgacccttgcattgaatgttaaccgatatcttgatcgaacgtgagtttttttttttttttttcttgtttcattgccttgtcgatcaatattgtatataacgtgatagaccatgaacaaattgaatatcgaagtaggagttagatttctttactcgtaattaaatggggcatgcaccttgcatgtcttatacgtattgtagcctaacatttgcggctacaaacatttgtcaccaacattttcattccagctgcttccacagttttgggacttcggagataatgtatatgtggatatgcatatatgaaccataaaaataaacgtttgtccaaacaaaaccacaaatagaagtgttatccaagtgggtttgtttcatagaaaaaatattgtcactatagcaatttttttggttaggttaaaccttatttaatgaagtttgtaatatgaattgagatattgttaactttgcaaaacagagccgaaattttacgaatatctctttattaaaaataaataatataatttaagaatacttctcgggaggaatcttaatgagccgtccaggtagctgaacaactgaactttatctttgctccaaaggttatatcaatttatgttttcttgtagaacctatatttcatgcaaaaagttatccattaaccaatggaaattggttccgactagtgatcaaggaaaatgatggaatcatcacgaatgagaaatttgtggtattaaatgacatagtgattaaggaaaacaaaaagttgtaattcaactacaaactatgtcgtaactatttatattttgttacttgtcaatgttgtcatttatcttacaaagtcaataggatagaagatgtgaaacataattacacaaaaacgatgtcatatagaaacatgcgaaatcacataatcatttcatcacttcgaaatttcgtagatttccaatcagatactacccaatatgtttgctaatagtaagtagtaaaaaacatatgttacgccaaaaaaaacggcttttgatgtacttattttccttcatcgatccatgaaaactgtaaaacatctcaatacaaactaaacctttccaccagtatatgtccgattcaatgtttttttactttgtgtatgtatcagtgtattatctgttaataaagagtaaaagaaatccattttttcttgtgaggacacgcggtaattaagaacaaagaagtggcacaagtgtagaaattaaactagaagtaaaagaaggtggtgcaaaggcatgcactctaaatgaaaatacgatattgaaattcataaaagacctcacgcagtgaatgtaaatgtaaatgtatccaacttcacaaacgtgacgtatctttgtgtatgcatacctttttctttacgttgttctaatacatatcgatagtaataagagagagaaagagaaaaatcaagaagagacaaaagaatgtcacgagacagcgacatagtgcatttatgaaccttgaaaagaaattctaaaccctaattatcacttgttgttgcggctgtataaatacgactttgttttgaagaatgtgtcgaacaaagtgaaaacataagatcatcttcttcgttgatagatcaatataggaactccagaagagaatcttgatcaattaagtatcatgtctcacatcgctgttgaaaggaatcgaagaaggcaaatgaacgagcatcttaaatcccttcgttctttgactccttgtttctacatcaaaagggtaaatttcatatttatctgttcgatcccttcatagtcaattagctagtttggatgatatagaaaaaagaactcaattcacaatcctaattattttctcgaagagattggtatttttttaatgatcgttgctttcttttgttgaagttatttcgtagaggttgattcaagatttattccaatttatttatacagacaattgaaccttctcaaattgcttatttaataggatcccagataaaattgtgcaggaaccaaaaatctcttagatacttataattggatcatgcatgataatctttctaatattggatttcccaacttactatttttggaagaaaacaaaatgttgtggcatacatatatagttaatcctatattctcactgtcagacttccttgtttgtatatgttatgcatagactgtatatttctctttggtaactttctttaaacaaactactcggatgcaccaatctgtttaataatcatgtggtcttgttttctatgattgatcggtattagggagatcaagcttcgatcatcggaggagtgatagagttcatcaaagagttgcagcaattggttcaagttcttgagtccaagaaacgtcgaaagaccctaaaccgaccatctttcccttatgatcaccagacaatcgagccatccagtttaggagccgccactacccgagtaccgtttagtcgaatcgaaaatgtgatgaccacaagtactttcaaggaagtaggagcatgctgtaactcccctcatgctaacgtagaagcaaagatttcaggttctaatgttgtattgagagttgtctctaggcgaatcgtggggcagctcgtaaagatcatctctgtcttagagaagctatcttttcaagttcttcacctcaatattagtagcatggaggagactgtcttatactttttcgttgttaaggtacatatcttcatctacatacaaattaaatacattgttagtcaatatattgaacaaccgataaaactcattatatctatcatgaaattagatggaatttggtgttatagaactattacaaagtaaaatgctcctaatgaatgatcaaacaccaattattgctaaaccgatgtcttgcatcgatttagttacttaaccaaattatgactatttaacttgatttgtacttctttaatttacaccaaaagatatatcaatattattagttaagctcaatgtatatatatatggatcagataatatttgtatgagtcttttgttttgaattcgacggaattaaatttacatgtgcagataggattggagtgtcacttaagcttggaggagctaactcttgaagttcagaaaagctttgtgtctgatgaagtgatcgtctctaccaattaaaaacaaaattctacatgtactagagcgtgtatcgttttttgggattaataatcatataatcgttacatgagccttgatactttgctagaaataagctcctctaaacaaaaccttctttttaaaaaaacacacttatgttttacttagtttgttgttgtatccgaagttgatcaacgttgtaatttcccacaataaatcatgacattttatatgctctaattaactagtataatatagttctgaatcatccgaatgtaaatgtgtgtttgtgtgtagtcatacttaaattgtaacactatattatttggtagcatttttttcgtttttttctcgacatattatttggagcctagtgatcaaaattgtgtgtatcaacgctacatatgtagagctttaagaaatctttaaacatgttttaagattgcaaggtttatatacattcataaataaatattaccttgacttttttttttgttttttttttctaagtcaaaactatatattacctagtacctacattctggacgtaaacttttttggaaataattttgtaatttttatcttttgtaaaactttatgataataaatgtagataaaaataaatatacacatattgtatataaatgaccaaagcccgaaaggctgggaagggagtgataacaattaaaagaaaatgaaaagataataaaaggtggggatttggtgaagtgaggcctcacctgtttcttggttaattatccaatttgtcacgtggtgcttccagaaccatgcatgtctggcgattgtgacatcttcatatgtaaaatttgtttttttaacgatatcgtacatataaaaatacttcttcaagtacagctccatttctgaccgttcaatctatggcaaaggcagactttttccgatccttcaccgtctcggatttagttttctcaccattgaagatctaattttcctacctttctccatgagacgctttcctttaggtctcggggtgctgattttgcttcaccgccgttcgtggtaaggagtattttggttttgtttccttttgtgagagtttctagtctcagatctgttgattctatgtttgttttacactttgtatttctggttttgaatatcaggattatgagtccggaaagtatttgttcagatatgatgtatttgtagcttgggttttttcccctttagtttgatcttgtattcgggagttttcatttgcttgccgactttaatctctacaaggattgtttccttgtcggcctttgtaatcatgtgactctaaattttatcaataaaatccttattctactaagaaaaaaaaaaaacatttacttgtttgcaattcatttctcaaacaagtttaaaccaaccttatttatttaacataattttaaagtaaaaatcctaaattttacaaaaatttctgcgttaaaaatatggaaccgttttttctgtaaaatattttttttaaaaagtacaaaatgatttttattgtgaaacgaaaagaatattgttacttaacgaaaaaatgattttttaaatattacttgtgaaaatctcttctttttttcttttcttttttgcgtctgatttgatttatatacaatacataataattgacacataaatttttatatatagatactacattatatatatgtaagaaaattagtgcaaaaacgtatgacgtaaatgatcggtatcacgaaatgtggcacactctgagttgtcaatattcaattatattatacatcaatccattatccatattgacccaccaaacaaaaatctcactgcctttcattattaatctcactttctttccaaatcctcttttctatttagtttaatcccaattttttaatctattctcgtgactgcattcgtgtcccttttatttgattcttcatccctcgatctttgtttaatcggcgcatcaaacgagacgaatattttaatttttccttaaacaactattaatatgagactgagagcatgtaaaatgtaaattagtgactagttgaaattttcatggatttatttaaatcaatacaaattatggataccatttatcctttggcatgtatactcagtagactttgtttttcttaaagtctgatgcaccatataattcagattcacagtgagtaaaaacttggatatgtattgaagttttgtatctcaacggttccacttttgtttgcactacttgtcacaggcaccataatccaatcaaagtgtgaagaggtatatggtcactgggccatgatgagagaaaaaaacatcgaatcaaagtgtggaaactcttgaaaatcgagatcatccaaccactagactgctaaaatagtagtagcacccactccatttaatctttctattgtatttatgaaaatttagtactatatgctatagatataaatacgtagaacgagaactcatggattggttagacattttcttcttggattttagtgtcagcgtccaattgcaatttgcataatagtactattcctttgaaaggtacattaattgtaaatattaaagtgaatatttttaattaattaataaggattaagtagatagaggaaatcaattaatactatgtgagaacgcgtgtggttcaattattgatttgttatatgagggtttttagcagactaacagttcctttgttgatagttaaagtggtctttgcttgcttatgatgttacccttcacatgaaccaattagcattttgggactaattgatatattgaaaaaccaaacaagtctaatgttcatatcgtatgtagaaaccatccaaaattattatcacaatataggtctcgtacttttacaaaactaaggatttatcagcagtgtgtggataattaattaaggaatattggcaaacaaagtgaatgtcaagcaataaagtattaagtgaagagataaattattccttaaaaaataaaaatagtgataaatagtgtcatcaaaggcatcttttcacaagattgtcaacgtgagggaatatgtacaacaaaaaaatggaatatatacagccaccataagtagcatacataccaaaggcagtgactgtactaattgcaccactataagaaacatatagcatcaattgcatttgctattgtaataaagtgtatgctagctttattaaaacgaatcaaaggaattgcactgtttgtaataattgcatggttgtacgtaccatattgactggctgcagtgctaaatcatatggagtcttgtttacaatatatgatgtatataaagatgttgtggtatatacgtttggttgagattcagagtttacctgaggatgataactagtgatcactcacaatattgagtttgcaacacattattggacaattgaaaatggaagtgtcaccagaactttgagtagatactatccaaaactatgggtcctaaagtggaaaaagtgaaaaaaaaaaaagatgggtaattttgtcaaaaacctggaaaggatagaattagagctacaaccaaacaagagatgaacaaatgtcggatctcgagctgctcgcacactttgtcgcaattcacttttatacttgtcttcacttttcaactcttctttcaattctttgtttttctttctaagctcaactaattatattgcagtgatctaataaatgcaaaatacagaaatatataggaaactctgaacacaatgactactacgcaataaataaataaagaaaccatttaaagaaatttcaactgttagtcgacaaccttgtaacttgtaagaaaagaaaaataattgttttcaagtccagaaataacatttaatcatgaaatacattttgatttcaatgtacatttatatatactttcctaactgaaatacacaaaacttactaaaagaaaataatatgtatttgatagaagaaaaaaaggaaactattacgtaataagcagaatctaggcgaatctaaaatctgcattagtaagtttgtaaacgcagaaaaattgcatagaagatgagacatatgcagttctgaacaattctgctgacgctatacttagctctgcctcacagccttcaattaattccttcaactgttcacttggccccatcatcatcatcatgaatgagaatgaccatattgcatgatatatatatcttcatctattttttataagtcttggttaagcaggattatcagttgatatcaaatggaaatttgtaatagtaattacgcatgaaattactatttgtggattaaagtcatgataacaattgatttggttgcaatagtgacttgataaccaatactatataggctagcaacggtttacatcggacgtgaattggtgatagagattgatgaccaatttttacgtactaggaagactatgatcacgacccaattttttattttttttttatttacgaattagttataagtcgttatattcaatactattattttcttgcgtttagacttttccgctttgttaacttttgaatttaaatgcaaccaatcatgctgacttttgcttatactaatatttatccttaactcgacgacaaaaaaaagtttctgtataattctgagctaacaacaagaaataaaagcaagatccaaatatagtggagaaatctatcttaatataatggttcgtaggacacaactccacttccattaagattccgtatcctcttagaaaatgtgctaataagatcaaaccaaaagtgtcaatattcataatcaatttggtttggtatctaccgaatttgttctagcaactccgtatattcagaattaatttataggaaaattagcatataataattagtcacatgtgatgagaaaaaaaaaaaaattactacactcttttcaaattttatattattctattaaattaccgaagctatcacaaagtgaaaaaaaaaaacctacaacaacttagcatttcgatccatcgaaaaaaaccccaacttaggattcaaatacacacaaactataaaagttttattttgatttttaaccatctcacataatatcgcagcttgatgtgttctcgtcgctaaaggcatgagagtattgatcattcccataaggtggaggatatggatacgggtacggatacggatacggatgcggattcggatattggtgcgggtttggcggcatatagttaactgccggtggtggccttgcgtacatcattggttggaaccgttcgttccccatagctcgttgctggttcataaccgccgctaaatattgctgttgttgttgctgttgctgcatttgcataggatctatcccggccccttggaaataaccctgtggtgcaccgcctggaccggtcgctggtaacccctgaaccgccggcatattccccatcggaccacccatacccatttgaccacccattggcatgctcatattctgtggtcctccacctcccatgggtcggaaacctcccgaaactcctccagccatgggcccacctccgccgttacccttttttccggcgttgggaccaccgcctccaccgccgtttttaccatcttgtggatgtccaccaccgccgttcttgcctccaccttggttttgattcccaggaccacccttagcaccgccgccagcaccctttccaccaccggcaccgccgccgccagcagcgggagcgcctttaccgccgtttttagcaggaccaccggcaagattggcattcttctgagcgttcatcatcatctgttgagcattaggcatcatcgtcatgttgggcttcatcttattagacggaagagggagatcgtcaaactcatcatcaaactcgtcgtcatcatcatcagtaaattcatcatcgaattcgtcactgaaatcatcatcatcatcatcttcagggacatcaaacttgactcctttctggttttggttcttgttgacaggaacagagccttttaactgaggaggaagcttcagatcttgaaaccctttcatcttctgaagctgttgaagctgctgcaaatgttgtggattcagttgctggcccatctttggcgcattactgttacctccacctccaccgccgccacctcctccgccgtttttctggcctttcttgttgttattattgtttccgccaccaccgcctccggcttttccatggtcaatctgcattcccttaaactgattggccatttgggactgattgggattgttgttaccctttggagctccccagatttcagcatgtttaccagatttggcgagcttcttgatgagaactgaaggatctacgctcccagagacagtcactttcccttgctctgagtcaatcttggtcgtgaaaacacctgagtttttggtttggtttcagacaaaacacaaaaatgagtttcaagacttttagtcaacaaactgaaaaaaactttgattcgagactttaaaaagtcaaaacagatttttgtctcctctaccttcgattttctgcaagattttcttgactttctgcttacagccatcacagtgtatgttcactttaagaacacaagtctacaaataaaatattctcagattaagtcaacagaaaactttcattttaaaaagaaaacagagaaggaatggtgaagaaacctggatcttcatgaactcttctttactcatttttcctcaactcaaaatctctttctctcgctttagaaccagatctgagacagctcctctgttacttgcaacttcaatctggacaacataataacccacaaattgttatgtttatcacattcaaagacgcaaagaagagaacacaccattacatagacatatatgctgtaactgaggaagatacctttttttaagtttagaacaacaaagaaacagaggaggaagaaggagaatgagagagggaaagcacttgaaagaaggcaaagaagaagaaagaaagatttcgactttgcagtattaagttggtgaacattaacttctccacttcatctttttcagagtcagagagaaagagagagagagagaagtaaagtcgctgcttcaatttattagccagaaaggagtgagcaatagtatcttatttccttgcctagactttagacaatattttttgtaataaattcaacaaaaagattagcattagaagaacaagaaaaaaaagagtggtgtggggctcgtttttatgaatctttttaatgatgaaggcctctcgtatagtatttcataatttatatagtgaacataatcacgttttcggccagatctctcttaagtttcccctgttttaataataatactatttgttttccaattgcatttaattaatacaattttttcacgatttcattgttcatcgaggcatttactatcatcgcttgttgttgataaagcctaatcaagcatgaaaccgaaattcttaaaagtgagatataatcaagttaattatattttaaatatgataacggttttctttgggaaaaaataatgtaatggttttcttggtgaagcgtttttgacaacatggaaaaagggttctcttggtgaaggacaatttattgtttatttaaatgaagcatggctaattttataattaatcacattcttaactagatgatctaagcaaataatagaaattgaaaattatgacttctaacacagatttgatatgacggttgtccaattattgatagagaaaatgaatattaagaagcataatctacacatttgggaaagttccgaacaaaaagatctgtataattgtttttaaaaaaagcaattgataggttaaaaaaatgtggcatggtgagatgaataattcatttttgtcgttgaggttttgcctaattcgatagctgttggtcacatgagtgtctctgcatatgacatggctctccttcttcttcttcttcttcttcttcttcttcttcttcttcttcttcttcttcttcttcttcttcttcttcttcttcttcttcttcttcttcttcttcttcttcacaaaatgacattaattcctcaagctttttgtcgtgttaccatcttttccctttggattcgttttcatcttcatattttcggaaagtgcattattgtacgttttggcctttaaaaggtaattattctcttcgacgtcaccgttgatatcatttcacttttagtcaattaaatgatctttaactaaattgaattttcagctataaaactaagctaaatagacataattttgtcctcaagcaatcaaccaggaaaaaaaaaaaaaaaaatccaccatgaaaactgtttttcataataacagatcatattaagacttttcttaactcaaaagtttgaccattctgtcaaaagaaaaaaaatcgaatttttaattttaaaaggaccttttgtggtttcttttaagctaaacctcagtgggaaacattctttttcctcgggcagctttttcttcaattgatgttttaaacttatatagcctaataggcaaaaaggcagaaaaatgattcttcttcttcttcaacttctcctctttttctctcttttcttttacttatatctctgcaaataccaaattcttcaagttctctaataatttctaactttctggtgagagataaatggtaaataatatggccgtagcaactctgcaaatgttaatatctagatcttgtgaataaattgtttggatactatgagagacttggaccacaacataggatccttgtgcttaagcaaaccaacaaaagcattcaattacaaacattaagtagtttggtgagagtgttaggaagttatctatacatgtactgatgatgcttatatcttgcaaatacaaagcattagatcaaacaaatctatatgcggaatgaaggaagttgcacaacaatgatagcggaaatacagattcagatatggagggtttcagagaaaaatgaagaaagaatcaagaatggtgttttatgtaaagaaagaaccttttttgtactagtgttgttcatcactactgttcattttgatctctaagagctcttcgatgggttgtcgacaaatcggacatttgttggactgaagcctcaattctttagcacagtcgctacacatgcactgcaaagaaggacatacagcattattataagacgtttgaataaagcaactacaaagttcttttcttgaaactaattctaaagtgatctatagaccttgatggttggatctgatcgaaaacaacaactgtctatcaaagaaaatgcataactttggaagtttatatgacagttcatgttggtattatcagctatcaggcagagatctcgataaggtttggaaaatgaaatgataattgtgaaaccacaagcaaaagattgagaaagtgttaccaaatgtctgcaaggcagcacggccgtgtccttagcctcagtcatgcagataacacattctgtacccgaaccactctcatctaagcccgaggctgcaccttgagtggtcgagccatacaactcacggagttcatatcgaactccttcaatccaaagaatctgcttcacaactttcactttgaaagatccatcattatctttctcgagaaccgcttgtgtgacttgcttatgaactgatgattgctctgagattgaatttggagagattatcgtctcagctgatattacaagcggatacacatcttcttctaagggtttagacagatcatcaagaacaaagaagctcaggtcagttcctgtccctgaaggctgcagaaacttctgtccaggacctttctgaaaatggaatcttgtgggtgaataaacctctggaaactgtgggataatggtgcaatttggttcctcctttgcaaagaaggtgatagtgaaactgaaaacgaaaggacaacacaatgagagtctattcttaagtaacattgatcaatacaaatcatataagtgaggttaatccaattctgaagaaagatgggatcagtttacaaggacacctctctacgtttctgatctaaagttgagtttaaagcttacacaacacattgtagatcaagccttgaaatcattattcacaaacccatcaagcaaatcatgtaaagtttaaaccttttctatagggaagagtgattccagattgttctcatgagtaaagatctttcctttaatagttccctaagccttaatttacctatttcgtcccaattatggttctaagcatcatcaatctcaaaaccctagaaattcaatcacatttcacgcaatcttcattcttcacagatcaaagtcgaaatcagatcgctgaatattacctgccgtcgaaaagagcatcgaagacgaaggaaactagatggtgaccaggaacgagatcgtccacttcaagcctcactgtatctctatgcacattgacatcattcctcaccttcttcgcgttctgttgctccaggtatggcttaggcggttgcgtttgcggctgaggcggacagtagtacgccggtctcatcattgggccccaccaattgggctgagcggtggtgaaatactgaggaggctgagggtgataatggtaatggccgtaagaacaagagttgatctgtggctgtggcggtagaggcggagagagatggtaattggagtagttatagtcataatgcggtggaaatggcggaggaggaggaggagggtcgaggtaatagtaaggcggcggcggaggatagtggtggaggtggcgacgattattgttgtctcgtcttctgttgttgttgctaaaggagattcccattggtgagagaatgacaatgggaaagacagagacaagacagaaagcacaacagtgagaagcagagagactgaagaaaaacaagatttggtagaagaagaactagaagatgtcttgttcaagattcgttaatgcttttttgacttttctcttttttactttttaaaccgagtaacaaaacttctcttttccggtttggtttcggtattgagttcggtttaatatgtggttttagacttttgttgtagaaaattaattaatatgttaatgtttacataaaataattggttagttgttcagttttcttcgtaactttgactttgtatagtttttaccacctaatcacaacttaccgtgtgtaataattaaattatgctactcaaaagtcaactctacaactatagactatagagattagagacatgtttttctatgagtctacaatataccttacctctcatgcgggaaatcgatttctaaaaacttcgtatctaatgctattactatatatcatgtcagccattaaagttgcactaattagttgagtttgaaccagtaagtatattatttgcatcaaatgttgaatattggatattggatatatgacacaattgaatgaattgattaatggactatcaaagtgggagaggatcagaggaaaggtcattattttgcctgccatcaaggcacctcactggattttgttgcctttctccaacgaaaaaaatcaaaataaatacacacattattgatcatcgataaatgtgtaaagataagatctctctaaatagtatttgtttctcgaccaaataagagaacaaaatttacttcaggatggatagtcttaattataagaaactttatttaaatattgcatcaccattttgggaaacaataatagaaaaccactaatttttgggttataaatcattcgcagatcatcatagcaaagatcacttatactataagtaacaacaccactaaccaagttgtgttaacttaataatgtcatcttctgactgaatctaaattagtaaatataatatttgctttttccactacatataatcctcaactaccacaaatatcaaccgacgaagataaataaaattttgtgattagtttggaattcagagatctagttaccccttttggaaagagatcaacttgtgatcacgttgtttaatcccaataaatccaaattcaagaagagtcagacggagttatacatgcatcatgtatcacataatataacttggaaataatttagataaactaaccaataacgataagtttcaaaagagaaaatcaagacattaattcgaagcatgagaaaaggagaatcaacacaaagcagaagctctgtctcttttctcaactgcgacacaacctctctgtaaatccttaaaaaccctaatctccgagtaatccctcagatcctcgagactcacgtactgttgcttcaccatcttcgacaagtccgtaccagtctcgtgaacccatacgtacggtagacaagtgtcgtcgtagtacagccatctacgtccttcctggtcatcaacgtaagctctgtgaatgcttctgtgtctaagcttcttggaacggccaggtttgagagtgtggacccgttttagaattgaaccgacccgaatctggagctccacgggacggtcggagaggttccaaaagcgggtggaagtggtggcgatggagcaagggagtaaatgcgtccggtcgccgcaaccaccgtagcattgtcggaggaagctgagcctcgggagcttgtctttgatagactctatcatctcttttgtgaacttcatctttgatgttttcatattcattttttctctctctctttcttcttttgatggctggctcacaagagtgggatactggattttgtatatatgtgtgccaaatagtaaatgcaagaggaatattgtactttaatactatgaattttctaaaagaaaaatggaaaaagaagaagtcaatttcggtttaccagtgatgattgtacaccaaaccaaacctcaaccaatgttcttaaaccacaattgttataaattgcttggtacaaaaaaaaactatgttgaagatccacaaagatttggaaataaatttgtttgtagattatttacaccatatagaaaggagtcaaaaatatcttaaccagattaaaccggatagtggaatgtcgtccttgttttagtgattcatcatgttgatcaagagtcaagaccaaattgaattatgaattgatgaaaaaaaaagagaccaaattgaattatcaatagcgtgcgtctcaaaaaactagtctagttttcgactcataaatttaatttacgataaaaacaaaaaccaaatggagctatgcattttaaatattttcaagtctcaattgataatatgatctgtttattcaaaaaacatgcttcacataataaaccagcaaatctaagagataattatattcatgtggtgaaggaaaatttggtatgtgtgacgccgacaaatacttcgttatttctatttatcaagttgatcatatacctcgcttgctacttccaaaagatatcaagaatatatcattttttttgttaaaacaaaacaataatatagtcataatctacacacactttgcttgaactttcaccattatgaagtatgtaaactttaatctcccttttggtttccaattatctcctttttcttcttaatattaggctttacaatgataaagattattcatctgacccaattgtggcattatgttccttaagacactgccttaaatatttggtctattcttttaccctttctcctatagaatattgctttcagaatccatggagatgattatatgaaacccaaattctcaatcagccaaattaccgtatgtagaggattaagaaattagaacagaggaatgaaacagagagaagctgagttgagccaaaattttaaacttgtacttatttatcatccaagaattcaaaattatcattatcagaaaaatgtcaaccagatacatatagtacactattgttgctccaatctcttgctattatacaatataactcaagcttgagttgagttttcccaaataataataatctatacttcaaaaaaattaagtctacacataaacaaagaatccgtgactcttcctaattaccaaactttaccacatctatcttacacacaatgcattcagcaatacgtgaacgagcatcaagtccacaaagtactgatgtccaatctcaccgtccctccaccgcattttcgctggagctcttccgtaatgaactccatcgttgcaacggttatcgtagtgccacggatacgtcatatcgaagttatcaactacgctcgtgaccaatcccgcatccctcattttctcgagaaacactccgttaaacgcctccattttgctcgggttaaacgctagcattctcgcgtacccgcctgtcgcgattgtgttcctgaaaatcacttctggcggttgcaatcctctgcttttgaccccgtcaaaaacttctctccaaaacgcagctgcggtttcagcacctttcgcaaaggctctaagactagtccagtgaatcccgtcgtgtagacccgagttcacgatcatcacgtcgggaacacggtttgtttcttcgttgaagtacttcttgagcaattctctaaagtccctgtctttaagcgaatcaaggccctgatagttcttggtctcgttccaatgaccgttaaagatactcgtgatcctaacagtctccgaagggttcttcggattcgaaaacttcatatcgaacctcctcgggacagcggggatttcaggatgacccaagacgaaattcagcaagtttctgatcgaatcaacatgattcgaatctccccagaagaaaatccatttgcctttcaagcaatcccaagccttttccgcagagaagagcttgaaagagcaatggctagagtaaacccaaccattactctctatagctccaaccgcaccgtcgcaccacggtttccggcaagggaaatccgcagcgaggcagcggtaacgcccgtcattgctaatctgacactcatcattcttcccaagcctagtccatcgtccagaccaagcatctctgttaaaatcagattttttacatgaccggagctccggcagagtaacgtcaggcgtcttaacaaagcgtaatctaacattgcgaagctttcggtcaaagcctaaacgtgaggtactaaacttaagaccttggtaatgacggaagagtaaaatgacggtgagattgaaatctccggcgaactcaggatgaacctgtaaagagaaagagtaagttccgttgccgaaatctttcaccggtggtctcgatttccagttctcgccggatatatcagtctcgaaatagtccccaccaatgcaaacgttttttccagattcgtctatggcttgaaatttgaattcatgaatctctccggcggttaactccacagaatcaatcccgtcgacaccgggaactgaaatctcgacggtcttcgcttctctacacggcgctcctcccggagccaaccaacctctcatcaaattcgccgtgaaattcttctgagatccagcggttatccactcgaactggacccgggtcgagtttgaagtgagattcgtcttcttcggaaccagatttcgtggagccatcatcaaggtgagattttggcggtgaggtttctctgatactagattgggtttcgttgacataaacggcgacggagaaggactgattcgaacagagtaagcattgaatctccatggctgaacgaagctttgaatcgaacaaccgtcaatactccaaacgactaacataaggaagcagacgagtgctgtaagagcaccaagccgccattgaagaagagggcttggccgtaaaatcaccaattggctcggtaccggcgggaaaatcattcctttctccggcatctgaagatccgacaacaagaaacaaaaacccagaaaatgaggattcaataatttgacgacaaacaaggcaattaccgagaaaagattaaaagtcataatactaactttatagtaagataatattaaacttactttaaatgcttcaatggcggataacttctccaaactcgtaagtagaagaagaagaagattagatgatgacaatgaatgatacacaatccacaattggcaatttttttaatttttggacaagaagaaccttaaaatcctcccagatttccagaagacaagggaggattaaaaagtcttagatttttcttgactagacaaaacgaaatgtatactaataagtgcaaagataaggaaaagaactcaaaatttgacagctaaaattgatctcccaaagaaaaatttaggattctgatttctcagtgcagccaaaaaagcaatttagaggaggcggacggagagaaaaagacaattttacggattgacggttatacccctgatgtttactggatttaccatgacaccaacccgacgaccgcgctaaataattgcccagcggacatgtgggcaacgaagtcgcgtcggtgtgccggtaggggtactgttgtcttttactttaaacaattaatacgtcgtgtatggtgttgattggcgtcacatgcatttgttttgttattgtcctctctctctccaccgtcgctcctattttctctgcagaagtgaaaagaaaaaaaattgttttgtcaaaaaaatggctcaataaataagacgattgtcactttaaaaagaaaatagtaattatccaaatatcaatttcagagatttttttggctaaaaagataaaagagctagctcagatgttataattatcagtaaatggaaaaccgttggagatttagtacaactaacaatttttgataagacaatataagaattttcttcttcttagattagtagttgtctattttcaataccactttagcttaatcaaagtgtccattcacattattcacaaaaatagttcatctattttattaatcttcttactttgattcaagaattccttttttttttgttgttgctcaagatagaatttagcttatacataaaaatgatactttttcgcagttttaaaattctctaagaaaccaaactgataaaatttaaagcgcaagagaatattaaagtaagaaaaagagtaaattattacagaatctcctcactaaacgagcttatacgttaatggctctaatcttgaatatgttgttgttggccgttgaggctgtgtttaatcatgtgacttttaactccaaagctaccaaaagtcttcggcccaagagaaaagagctacatgagtacattctacattcttcagccaataatgagactccctactatcttaattattgggccgaatatgggcctacattaactatttaatgggcttgatagtattgttagcatctagctttttatgattttgtttcagtgaggagaaaaacgctttctcaattatgaactctgcatctttgtcactgattcttctcacctgatctgttgcagatatttggtcaaagagtttattaaaagataacataatataaagtgaaaaagcaatgctgctttctctcattggttgtgcatagagcaaggacagagaaaaacaggttcgtacgtaagaaacacacattaactgtgttctgcttcctttgtattctctcacttttctcttttttcagaattcaatctctggaaattttcttcctaaagattaaagagaaccgtttggaccagatcagcttgcctcttggtaatggtctctcttctctttgttcccaatttctgtagctttcttctttctccctaactcgtctgctctctttgtctcttcctctcacagttcatacgtcttccatggcttccggtgatgttcttcctagattcttcactgtcttcctctcccattgcagctccgaatccatggtgagatttttctctggaatatttcatggaaaaagctgcttgggttgatatgtttcttggatacagtaacgatgtgaatgagatctgcaacattatcttaattcttaactctatatgtttaaatctcttgacactgacaaaagttttaactttcttcactaatgagctcaggattatctctgtttgtgttacttatgtttgaatatgatagagtatgtcaaactaaacactgaatttcctcaaagagttttctcctttgttgaaaaaattgaacaagaggtcttggtcttgttgtttgtctgtttacctccgcttgcagacagagtctttagcttatattttgctcacttttaacagtttagtttatgctacatctttgtgttgagcaggtgataccaaggtcttactacaatcttttaccacgtccgttgcccaagactgcgattctcatcggaactggtggaagattttggaaagtagcaatgacgagcaagcaagagcaagtgtattttgaacaaggctggggaaatttcgttgctgataaccagttaaaagagggagaattcttaacttttgtgtttgatgggcacaaaagttatgaagtaagtatctatggtcgtggagattgcaaagagactcgagcagtcattcaagttgaagagatctctgatgatacagaagatgacaacgtttctcttcatagccctagcaatgtttcacttgatagccttagcaacgattctcatcatagcactagcaacgtttctcttcgaagccttagcaacgattctcttcatggtgatgctgagatagagagcgacagtgagtattctcccgagaacctaccctcagcctctatatctgttgaatccgttgaggtggtgaatccaacaacaagcaggcagagaagttgtaagtaaacattgttcttttaactgatgcttataaccgaagctgtttagaatttgatctcaaatgggaattttgcagacaagaggaagaccattgagaatccacatctgtatttggatgatccaaacaatgtctgttttgagacgtgtcttaagcttagaaagtttgagctggtaagacttcattagatattattatctcgtctcattaaaaatcctttcacgagttgatgattatttttctaactaaagctctatatacattatgcacagttagttcatgcacagttggtgaaagactacggcttgatattcagcgacaatgttgactatattgacggatatggaaaactaaccgcgaaaacgaccaagtgggcagatcaacgggtttgcataaacaaatggcagaaaatatgcgagagaaaccagttcacagagaatgactccatcctatgtgaaattctccgcaacgaggacaaagtggtttatgcaatcaagattcacatcttccgcgatgcagcagcaagcacttgattctctgatgcagttctgcaattgtgtttcttctctttcgagtctagtcttttgtagtaaactattagaatgtctaatttcaaaacatgtttaagacttttgagttctcttgtagactttgaagtaaacacaatgaggagcaggcttaagcttacccgttaatcactctgtttctcttacaagttacaatcatgtaaaatgggttagaatgatcgttttaatatgttaggtacagatttcgtaatttctcgaaaatgtgatatctcttcttcacaacagaagaacagattattgtgaaagtcaaaacaaaaaaaaatctctgaaacaatggcgtgttgcttagcttcgtgctgtgcgtcggcgacttgtggattatgctcgtcggtagcatcggggatatcgaggaaatcagcgaggatcgcttattgtggtctcttcggtgcctctcttgtcgtctcctggattcttcgtgagactggtgctccgctcctcgagaaactcccttgtacgattctctcatccttttctgaactgggtttgtgaaaaaggaggttccttttagccgagattgatgattggaattgaaagagaccatcaaatttcgaaattgggttttctttgatcttgtcaattggaattgaatccggtggttaacgatagatttgggtgatgtcttgtgcttgaatcttactaagcgtttaagtatgaatcttaatttgtattggttcagtggaaatttggttgctttgtagctgcaacagattgataattgtgtactagaactttagaaatctcaatctgtgttgatttggatgtttttcaactttcaattgcgtttgtttatgctttgtgttaacctgcttgatctaagagagaattttgagtgttgcaaaaggaaacttcatcgcctattgatacaaatctccggttttggatgttgtttgacaaacagggatcaatacttctgattcatataccaaagaatggtatcagcaacaagctgttcttcgtgtgagctttgggaatttcctcttctttgcaatatatgctttgatcatgattggtgtcaaggaccagaatgacaggcgtgactcgtggcaccatggtgggtggggtttgaagatgattgtctggtttttgcttgttgtcctcatgttttttgttccaaatgttatcgtctcgttatatggtaagttttttttgctcctcatagtttccaacataaagtgctaccatatcacgttatgtttatgttattggaaattcactggtttgcaaaattccattgctgttattttatcaagtattagttgatgatcttaaatcgggctggttggcaatttgtgtgattatatattatactttggtgtagctgcaagtatgacaaggaaatttgaatatctgctaaaagactgagactttaaagttgtggattttaatattaaaccatatatgcgggctaatcttagtgcttgcacattgttctaggaacgttgtcaaaatttggtgctggagcgtttctgttggttcaagtggtcttattattagatgctacacataactggaatgattcatgggtcgaaaaggacgaaaagaaatggtatcatcagcatctcttctatacatttgtcctgtgtttgttccaatattctgttttgggccttttttttttgttgaagtttgataaattataattttctgactaatgggattctttgtgcaggtacatcgctctgcttgtcatatcaatcgtgtgttacattgctacatataccttctcaggaatcctgttcatctggttcaacccatctggtcaggattgtggacttaatgttttcttcattgtcatgccgatgatcttggcttttgtttttgcgattattgctttacatcctgcggtgaatggcagtcttttaccggcatcagttatatcggtttactgtgcttatgtctgttacacgggcctctctagcgaaccacatgactatgtgtgcaatggccttaacaaatccaaggcagtgaacgcaagtactctcatccttggaatgctcactacggttctctcggttctatactccgccctccgagctggctcttccaccacattcctctcgccaccgtcttcacccagatcaggtacctgagccaacctcttcaacacgcctgggcattggttttttcggttttgtgaataataattctgaaccagactcggatttctgtttcttcttttttactggaaacgttttttttcaggtgtgaaggatgcattgttaggggaccctgaggacgggaagaagagtggtgaagccgaggcacggcctgtgagttactcatactccttcttccatatcatctttgcgcttgcgagcatgtacgctgcaatgcttctctcgggatggactgactcatcagagagtgcgactctgatcgatgtgggatggacctcggtctgggtcaagatatgcacgggttgggtcacggccggactctacatatggacactcattgcaccactcatccttccagatcgcgagttctactaaacagagggtaacatgtatatagtccggtccgttgaatgttatgtatatgtttatgtagtcacttatagtgggtatggtcttgttataattatggtagtagtttgtgtcgcgttctagacttgtaattgaagaaacctcaactaaaagaccttggatgctgtttgaatgattgtgttgttttatgataaatagtaggccactaaatttggactatggtagaaatgctcaacttgaagtcaaagaatcattagagtcaacaggaaaatttcagtaagaatccaatcatagtttaaatttgatctaatcaatcattaaaataactaaaaccactagacattaagcagccttttcccttttgttatcattgctattagaattagttttagttatactattgttgattcttccttgggccttctccttggaataatcctcaaggacaaaatcttttatgttaatccgacaaaccatgttttttttcttaattctttaattgtatggcttatagcaattattcatatccttttacttatgaccaatgctttatacacacaaaaggttccaattctaatgtactcttaaattttcctatatctctctatcgacaaattgtacaatcatatgacaatgattagtatgtaaaatgttgttgtccccagtccccactatgatacggacacaaatttacattgtttaagaaaatactgataacaaaccatttaaatatctttaaacaactatttcgtatggataaaaaaaacgtagaacaattacacatatttgaccatcttcgcattaccacataagaagagcgtatcaatcatcatgtgatatagaccaactttataaagcttataacctctttgtttgttttttggactgtaaaagaaacctcatttgtcagtcttgaaaatttgaaagcaagccaatcaataaagacatgacatgacttattaaacggctagtgaaaccaaagacatatgacatacgtatgatttgctgaaaacttagatgaatataagtagaaactatcggcattaaagtacaccaatagcaaatctgaaaattaattgaaatccattatagttaattttcgtccgtgtgtatatagttattgacttattgtattctccataatttcaagtgagaagatggacgaactcttctatgtaatgttgttaaccatgtggaatgctgattagcatctatatttcagattaaaacaacaacatcgtttacctctaagcctctaacataggacataatttataactttaatgaaaacgatcttctttggtctttggtagactttagctactaactctagacatttttctaccgttttattttttagttcagcttctgaccagaacagatttatgataactcaatcatgctatagaagtacttaattattttggtcatttgtatttgacagaattcttagtattatgtatttactctttcataatgtactctagattttaattttataaaaatactatagaaagaaagtaaatcattttcttataattaaacaagaagttatcatacataaatgtaattagatttttatatcctagaacaacaaaatgttgatataaatatacaccatagattgtacataaactttaatattattcatgcacttattaactattttctatggtttcaaacaaaactagtctatttcaacaatctcttatcctagcatgcaagattttttttaaaaaaatcaaaaataaatatgtataaatttaaaattaactttaaatctaagtgatcattttatttcagtatatttatttatatattttcagttatgagaaatctgtctcccaaattacagttattttatttagctttccctgagaaatggttaatgagcaaataaataatgtatagatacatataaagacataataagtatatgtaaaggaggcatcaccgtcgtcgtcctcctaacatgctccatctccttcttctctccgacgaagaacattccaccaccaatagcatgcccccttcctcctccgcctctagatccgcctccaatcacagctcctcttcctcctcctcctcctcctctctccacctctgcaagcactctccttccgcgactctcgacctcctcatcctaatcctcgtcctcttctccggcgctttcctcctctcctcttacttctcctatctcttccactccttttctctcctctcctctcacttcccttccctctcctccttgatcttctccgacgatgaagatctctcctcgatccctcccgcttcctacttcttcgccttcgccgtcttcttcgccgcttcaattgcgtttctcgacctttgttgtggacccagatcgaggaagtgtcggaatcccaagtgtaaaggtttgaagaaagcgatggagtttgatttgcaattgcagacggaggaatgtgttaaatctggagctactaaggagatcgatcgattgccatggaaaggaggtagtgagagcaatcctgattacgagtgtttgagggctgagcttagaaggatggctccgcctaatggtcgtgctgttttacttttccgatctagatgtggttgccctgttgctaagcttgaaggttggggtcctaaacgaggccggcgtcataaaaagtaagtcaaaccctttccttctcaatccattttcatttggttgttcaattttgcctgaaatgaacttgcttttagccaattctcttgactctttagataccattagccatgaatgtgtaattatggattggtagctttggttctttcttttgattgatgacagtgtgattacttctctatgagtcattgtttgtgatgaatgaattgtgagtttctgggtaaaagagttgtctttttatattggtcatggttgtgttgatcagatctgctgcaagtttgaatctttaagtgtgaaatgatagggaatcagaggatatgatgtttggtgttgtaatgttcattcggtgttctgcatcttatgttagcggtattactggagttttcagttgtagtagattcgaatttaagggaaatagtactggcaagtcagatgtgaagaaatgtgggaatttagttaatagagtatgattcttctgccttagattgttctaattagaattcaggttccttttaagatcgaaactgtagtgaaggcattgccttgtctcatattgtttgaaatggtggtttcactgtattaaaacctaagaatacagttagcagcctctgtctagttgataaccaacctcttttcgtcgagaatctacatttcatgtatataactttgagattccactttcatatactggaacttggaccttgttttcaatggtcatttctggctcccttgacttcaaccttgagtattattatacagcctagcaccaacaatatctaaaaattggagatttactcgataacaatacatgcttttataaagcacaatacatggtgttgtcaacaaccttgagtagatgaatgccttctttttattgctttgtgtgtaacttgtaatattatctactcatctactgactaaggtcgttggttggttactctcagtagattttgtgatttgttttgtcatatgtgttcttatcagacttgttctctttctttgtttgactcacatctctctttcaatccataatcaaatcaaagtatttttggttgacattgtgttctgaagtcattttgttcttctctttgcatactgattcagtttacgccgttatcttctgcagatcgcaagcgaacttggctctgaagggaggggtcgaccatcgctgatcaggtcgataggaactcttatatctatcattataaatttatcacattcaatgtttgcatagttcatcttggaaactagagaaatccagacagctttgtttgcggattttttaatttcttttaccttagaaatgtcccaatattacaacttgaacacttaactttttattgaactacattacataccacgcaaaaaaaggcagaaacatgtttgttcactttatcatatggatcactcgctgcactgcctcctactaattggtttaggcgacgaattttctgtgtttgcttttggctcttgctactgattaagaaagttggtgtcgttggcgtaggaactgctctactttgtatagatatcaattctgttcagttccttggattctggaattagggatttcaaaaaaaattgggaaaacgtttttacaactaatacttgcagttctaggcgtttatctttgattacttgactgaatttcaagttcactggatcgtgtgaccagatactcttttgctctgtttctgaagatgcaacctaatcaactgttttaagtttggccatcaaaactgccgtttccttgaattcagtctctgtccctttctagtaattgaaaactttgttgtgtggttgagacttaaatagttgtcctattggacatatcaaaaggttattgtctgggacctcaaataagaaagcttagtgaacttttttgttcaaacatattagaaccagtttctgcaatgatttttggcaagtccaaatttatcaatgaagtcacatgaaactttttccttgagagaaccggttctggtcataaaatcctgggaaaacaaaagagaaaagaaaagaaaaaaacccaacatttcactctattagctagctgaacaacacagatcaaccactaatccttttacaatgacaaatacacaaatctttactcttctaaaattctgtttacttcaccatcatcttctcaggctctcgaagtgacctctctctctctctctctctcaattagttgctaatgtaaccgttgcttcacacgtctcccatttaagtcacaaccatcagcaaataactcctttcgatgccctgatgatgttaaagagtgctcactcagcctagccacatactccaatagctcacttagtagggacgggcagctttccttcagataatcaaacccatccgtttccatcacagctaaagaaattacagacaactttttgttacaagggcggccttcagatttcagacatgatcaaagcgattcaaacaagcaaggagtgatcttctgtacctttcaggttttctggcaaagctataaatttgaggcaggcggctttcagctggaaacaatgatgctgctctgcaagagccaaggtggttgctaccgtatttatgctgattccttcacagagttttgactcgcatattgttctaagccgctcaagagcataacggtctgcagctgcaagcagatgctgagccacaagagttgatgcccatttcaagtctgtgccgattaagtcttgcatatcaggcatttcatcccagtagataaaatgaagcaacatctgcaacaacaacaaaaaagtacaataaaccaaaaggaagggaatttgtatcaaccttaaatttacaggagccatgatctaaaactcgcacatcgactaaagaccaatcttaacaaaaaaaagcaaagctgaaaagcagaaaatttgacatgaacatgatgatctataacataatttctctatgtatttactgcatgcgggaaatcgagacaatcatgcaatccaaaagaaaagtagaaagattaaaccttatcccgggtgagtaatatttgagaacgggagcagcaccccaggagaaggtcccggattgtacactcgtaaacagaaaatcctgtatcacaccacaatcactcacccgagaaaaggcaaggaaccaagaaagctatctcttcttataaggccttatacacttaggactaaaactaacagcctcaacttctaaagctacaaatataaaattctacaaagtcatgccaaggaaaaacaggttttagtccagaaagagagttaaagggagaaccttgaaaataggggcttgtacgtcttctatgattatacaattggtattttcacttctcaacgggccaaaaagctgtgccctgaaaactgcagaacgtgctgcaagaaccaatttgtgagcaggaaatgtttctccatcaacttcgaaagtaacgtcagctcctttcccactttccaaaagctttccaaactgctgacccaagccagaaaccggcaccgggatattgtaacacctcggtccttctgtgcgtgacttcaccactccaacacaacaccggaccaagagaccattgtccttcagatagtccgatgactccaaaagagacctcttgaaaaatcgtttgtatcccctaaaaattaagcaatcatcaacaaattaaacattatagaaaccaaaaacatgtcacattatctatactcatcagtacaaggcagagactaggcaatagcatttcttaaattcactcaaagctgtaatttttttccaagagaaggataataatttactcaccacatactccctcgatatttaagagtatagggtccgctttcgagagttctaccaaaatggctatgaactttgtgcctttcgttaccgctctgatccacgagggtaagctcaaacaaagccctaacatcggctccttcactcgcaagggctatgaagagagacacgtagacagaattatcctctggactctttccatctgggtagaagtagatggcccaggagtatccaccgaccatgaaagtatccgaggcaacgtatttgccaatccccatgcctttgaccaaagagtagccgctgatcttgaattcgtgggagccattgatggtttccgtgcgagaggtcgactccgtgagcgactgtgcggtcgatttcgaagatccaggaacctccttggaaaccctaattgtgtccatcaaacaaagacgagatccaagaatcacgactttggtaagaaattgatggtttcttcgatcttattacccggatagagtatctttgcgctgctaaagtcttcgaattgagagattttccagattgataggcgaaattagggtttcgaatcacaggggcaaatatcggaatttgagagcacgggcgagaagagaaatgaggggttcaacggaaccagaagtgagagaccgataatcgccggaactcaagaactgaatcgtcgtggatcgtgaagacgacgacgttggccaaaaacgagaggtagagagagagaggaaccacttgcttgatagatcggtttaagttttaaacacaacagtttggtaggttgcgaatatataacgtcgcaacttaagaaatactaaaattattacatctcctttctaattgtgtttagcagcaaatatttgtttgtttatttttaggaaggagattaaactgataatattttctttactctctttgcaaatcataatctgaaatttctcacaattaagatttgtgtttacctacaaaataataataatacataaattagcgcataaaataagttcaagtgttattcgattttattatgaccaaccagtaaaatagaacaatacatcaaataaagagatacaattttttttacctttttaagttttttcattctttttttatttatctttttaacagttttgtaatcgaatctcaagtcgaattgtatttaccaatacaaaattacatgtgttttatttttaaaacatgagtcaattttaacttatgtcaaaaaaaatcattaggctaatcgagtatttaataaatagatggctaatcgaaaaatattatgctgctaaatatagattattctgtgcaaatttcatcataaatcgaatattttgtgtatatattaggctaatatctaccaaaaggaattttgaacaagtaaaccctagttgatatcgtgctaagctcttaagcgaagatacaggtcaaaatcgcggcaaagcatcggtggctcgagtgacccaatccactccaccaaacttctttgggaatcccaaaggttgctactttactcctcaaatgattcgcaagctctgttcttcattctctcgctccatcatcttccccaacaaacccatcttcatcccccgctcttttcctcaaccactccgtcactcttctgctctctcgtactcctccttgaaaatgaccgatacccatatcccaggaaaccctaattcgtcccctatccaatctcccaccaaacccgagtcgcttcgttccctcgaatttcaattgggttcttctttcaccgccgatccaatcatcccgccgccgaatcagatcgtcatcgttattagcggtccaagcggagttggtaaagacgcagtgatcaacaagcttcgtgaggttcgtgaaggtcttcattttgttgttaccgccactagtcgtccgatgcgacctggtgaagttgatggtaaagactatttctttgtctcgagagatcagttcttgtcaatggtggagaacgaagagcttcttgaatacgcacttgtttatggagaatacaaagggattccaaagaagcagattcaggaatttatggccaaaggggaagacattgttcttagagttgatattcaaggagctcagacgttaaggaggatacttggtaactctgctgtgtttatattccttgtggcggagagtgagcttgctatggtggagaggttgattgatcggaagacggagagtcaagaggagttgcttgttagagttgctacggcgagagaagaggttaggcatctaaagaactttgattacgttgtggtgaatgccaaagggaggcttgatgatgcggttaaccgcgtggaatcgattatcgatgctgagaaatctaaagttcatcaaaggattgtcaggatttgatgtgcagaggtactctacttgcttgcttgctttaaagcactccactttccagtgtctgattgatagaaaaaccttgacttgcttagattcaattgagcaataagctttggaaagttcgatgcactagtactaagtttttatgggttttcataatgatatgctgtcgcaatgacatcatttgttagagaatctagataaccacctggctaaattagttgattaggcatgtttcaatatgtcttgaatccttgaaaacacttccaagtataaggaagaaaggtagctgctttgctgagggagtttcttgcaaaagttcataggcttgtattgtatagtctgtaagtttgggaactatgttttgggaattgcgggtatacggaatgcacatttttctgtaattgttaacgttttcatgatggtttcttgcagatgccattgtctgtaacaacatattggcttgctgtctccagacacggatccatcgaagaccgagacaattttattatcggtatgtgcggcaacccattccaaccaaagatttagatgaatcctggcccctgactacagagaacccttttgattaagcatcgtatctttatacatagctacatggattatgttatcatcatacagtatgtgattcatactcgcattttgaattttgttactttataaatgtttatggagcattgttcataataatttaagtatcatctaacttttcaagatggcggctgagttccaacaatctcggaacatgtttattgtatccaatttctaaaaccagtaagtaaattgatatggtgataatgatgttgacccaaatataagccttactgccttagagcttgacacagaaagagttatgccggaagcaagtcatcaccataaaccataatcaagttcctctcaagaaatattttaatttacgattagttcatacattattctagtgcattacgtcaactcttaatttccagtaattccatgacctatgtgaacaagaaaatgctgacttcaatatccgcttattataatgagtttgacgtatcttatgatgttaatcaataattgctaaccgaattttagattaataattttataaaatagctttttgttttgcttgtttaggacaatcaatttaaggtttggtttgtacgtgacacaaggcaacataaagggtttaggggcggcttttctagaacacaagtcaagcaacaggcctctcataaagtcaatgacagaaaattttcttcttgataattatttacaaggaagatcgtcttcttaatataatgattggatgaagaaaataacaccttttttattattgtttgacagaaaataaaacaggaatttgaagttacactttcttgcactcttccttttcgatttttgcctcattgttgtcttcttctccactctttgcctttcttaagtcttgctgtctcttatacacacaaatagatgcaacatatatatataatcatgatgccttttctcatttgtatccatcatcaacgaaatcctaattaataacgaaaaggagaattctcgtaaggtataatgtattccgagaatattggagaagatgatcggagcatccatttgcaggttttgtttcttcttgaaactacgcatataatacgttcaattagtagtgttcaacacattgttgatcacgtagatttgatcattgtatatatgatatgacatgcctcgataggtttgctctaatagtagtcgttctacttggaatgatgtttccatatgtaattggaagcaacttttcagcttaatttgaaatgtcgatattgaactctctataccttcaatccttcaataaatttcttataagtagtaactactttataataattttaaaaaattctgcaaatattaagattgttttataacaaatcttcattttatgtcatacaacagccaaacgtgtggttatgaaactaaattattatccatttatttgcataaaaagaaaagaaaacttcgaatataaaaactttctaaaattagtaataaattttcatttaggtgttggagctccaaaaattggaagaagcacgaggctcaagcgacaccgttttggattatagaaacagcgtcgagaaaggagacagcggcgaaaccgcagacgcagcgtctgtatcttccgcgatcgcgtttcacagatcaacatcacccgcgccggagcagaaactcacactcttcgctctccgccttgcaatcatcgagaaaatcgccactaatctcggaaccctaggtttcatttgggccacggtggttcttctcggtggattcgctatcacgctcgaaaaatccgatttttggttcatcaccatcattctcctcatcgaaggcactcgaatcttcagcagaagccacgagctcgagtggcagcaccaggccacgtggactgtatccggcgtcggaatcagtagcttccgcgtgctccaatcaagctcaatttcacttctcagaaatttaaaacgaatcaggtttcgataatctcttctctctttgcttaatcgaattggaatcgattcaatttagggtgaacattttagtttctctgcagcgatgggatctttaagccgatcctcgacaatggattgagagaagcgacgacgagaatcggacgacaagagatctttgatcgtcgaacaactctgacatggaagaactcagaagttcctcttcttccatatgcgagatggctttacatctccagctatgtgagtcggattctctactggctccagcttttgtcagcgagtgcttgtgtggctctgtcttcctacaagctcgtaatgcacaactacggagatgttcaagacggagacttggacaaaaggaatagacaagccgctctcagcatcttctactcgcttgctcttgccgaagcgttgttgtttcttgcggagaaagcttactgggagtgggaggtcagtgtgtgtcacttgcttgagaatgtgactagagagtgtgggtttggggttactggaatggtctctatcaagagattcttctatgatgcttactccaagtctgtcaatgggagtatctttgatggtgtgaagatggatatggttagctttgctatggatctcttgggctcgaactgctctgatgaacagctcatcggagcgaggattcttaggcagtttgctgtaaatgagcggttcgcagaggatacacttgagaagatcggtatcaacttacctgtcattgaaaggtttgttctttacaatgttaagatgccaaattttgtagagagcttaatcatattgagattgcagttcgtggaaacagaaacaaagctgatctcattctttttgtctaggttggtggagatgttgaactggaaagatctgcaagaagaagagattaggagatcagcggctgagatactctcaaaactcgctggcaaaaagcagaactctctcagagttgctggaatctctggtgcgatggaatcaatttcatcactgttacagaacacaagatctttaggtgaagctcctgacgagattggagagaagaaactcttccacgaccatcatctacactacgatttctggaggttcaacaatttaggcctcttgattctaaagaaattatccagagatcatgacaactgtgggaaaattggtaacacgagagggcttctccctaagatcattgacttcacgcacacagacgcaacactcttgaaggatgagaacgcagatatggttctgtcacgagtccttacagtgaaacggtcgctgcagctagtgaaaatgttagtaagcacaagtggcaacaccgggaaatgtctcaggagggagatctcagaaatcgtcttcacaatcagcaacttgagagacgtattgcggcatggagtgagatacccgaaattgcagaagctcgggattgagattcttagcttcctcgcgcttgagactgatgggcgggagagaattgccgttactggaggtgtcttgaaagagctgttcagcattttcctaaaaagtaaaatacatggggatgagaatgaaaagcgggtcaggatggctgcaggtgaagctatagggatgcttgctttggagagcagaagcaactgcatccaaattctaaagctcggagtctttggaagacttgtggaggcacttgaagttcctttgatccgtgtcaatgcagcgagagtgttgagaaacttgtgcatatattctggacatgaatgctttctcgacctgaggttcattaaaacagcagcgcctactgtgagtatgtctgtctgtcggtacaaatactgcgttgaacccccaaaagattaaaacttgttctgttttcttgcaggtactgaagtcaataacatcaggtgacaataaattgctggaagtgatgctaggattggcagcacaagtgttcaaattcatgagttcagaagaagcaaacattgttctgacggattcagggatcaaaaagcaagaacttgcaaactcactggtttcgattctgaaaaagcatgacaagccagcaatcaaggttccaagaatcaggaggtttgtgatcgagcttgcgatatggatgatggaagatgatgtggagaacgttgggatgttcagggatttgggtatggagaaagagctcgtgaaggttctggaaactacggctgagcttgagaactttgatgttttctctggcacggttggagtgagccgacagagcagaacggttcattggttagctgaattggctttaaaaatgcttgaggatgaacattcttaaggttcatgttcctcttgagaaactcagagcgtgctaattatgatttatgaaacatatcgtttatttttacaattatttaaaaagctgctcaaagttcaaattagagatatatctcaaattccatcagtatatacacataccttgtaaagaaagatacacttctctcgtaatagtgatcttcattaaaccattgtttaaacttctggtaatagtggcaatttctcagatacaaatagagtttataatcctaacaatgacgaaaacaacttcagggatgaagtgatataagagaattcatgtccacagaggaaaagtgaattaaacatacgaatagttcagcatcaatcagatgatttaataatagtcactatcacttgcatcacttatctcttccactggcatgggagttacgtcaacaacgctatcacaagaatcattgtcaccttcagtatcatcagagttctcttccgctggcatgggtgttacgtcaacaaggctaccaagagaatcgttgtcactttctgactcatcagagatctcttcaacatgaacgactgctcgcgtctctttgcagctaccgcgaccatagatacttacttcataacttttgtacccatcaaaaacaaacgtcaagaactctccatcttttagctcgttatcggccacgaaattttcccagcctcgtgccaaatacacttgctctcgcttgctcatcattgctactttccaaactcttccaccagttcccgtgagaatcgctgttttgggtaaacgacgcggtaaatgttcgtagtaagaccttggtatcagcttctcaacacaagaaaatgtaacacaagttaaaactgtagaaatgaatgagaagcaaaacaacataaacgagagactctttctgcaacagaggctttttacacatgagacaataaggagagtgatggttatatgtctcactagacaaacaaaactatgttccaaatagcatactcataaataagttcaaaatccaacaaagatgggttatgtttaccaattttttcatctagggatttgtaaacactactaaccatacgaatttttgtttaaagaaaacctctgtttttgaatctttaaacatttgagaaaaacttgagagatccaactctatactcttgacagattctagcaatatcaaccgaagttggtaaaaaagttaaaatctttaaagaattactgacgtaaattactcacaacaaagacttaacatataaagcaaatagatttttcctagaaaccaactcagacacataacctaatttgtttcagaaacaaactaaaaatcaagagaaaaatcttaccaaagagttggaactgacacaggaaagaaagacagtgtagaagcgaggaagtacatcaccggaagccattgaagttgctggaactctttgtgtctgtgaggtaaagagagagcagacgaattatgtaacgtacgaaatgtataaaaatttctaagaaactgagagaaagagaggaaattattaccaagtatttgagctaatctggtcaaaaagggtcacttagaagaaaaaaaacaagtccagagactgaagcaggatttggatcaccggagaaaagtaacttgtgtgagagtgactgagacagagagagagagagtatagagagagaggtggtggtgtacttgggttaatcatctttactttatttaccatttgaccccatataatttttcaaaacaaccccatagtttgtactatattacagtcaatgatagcagtaaatgaaaagatgagtcaatgacaacaaccaaaatggaaataccacagtaaagctttctcctcttctgtacgtcatcaatctctctgtactcttttgtcaaaaaaaacttattgggggtaattgtttagttaatattcaattttgatatgaaaaaaaaattctcaacaaacttataaatcttttacgtgatttgaaattttgggaaataataatggtatgcgtatctgatcgatccaaaaccaaatatgaatatttgacatgtaaactaaatcatgaaaataaagaatttcaaaaaaaaaaaaatgtggattcctatattaatcaattgttattgtccgaccctctactctcaaaaaacaaaaccctaattaagctcttgaagatcgatcattcaacaacaagaagatggttatggttagagataatcaattccttaacctcaaactgtctcctatacaagctcctactactatccccccttgccgcttccccatcatacccgctacaaaagtctctgcaacagtttcttcctgcgcaagcaacactttttctgtagctaatttggacagaatcagtgttcttggcagtggaaacggaggaaccgtattcaaagttaaggacaagacaacctcagagatctacgcgttgaagaaagtgaaagaaaactgggattctacttccctccgtgagatcgaaatccttcgcatggtcaactctccttacgtcgcaaagtgtcacgacatcttccagaatccttccggagaagtatctattctaatggattacatggatcttggctcgctcgagtctctacgcggggttacagaaaaacaactcgctttgatgtctcgtcaagttttggaaggaaaaaattacttgcacgagcacaagatcgttcatagagacatcaagccagcgaatctgctacgtagctcaaaagaagaagtcaagatcgcagactttggagtgagcaagatcgtggtcaggtctttaaacaagtgcaactcgttcgtaggcacgttcgcatacatgagtcctgaaagactcgatagtgaagctgatggtgttacagaagaagacaaatcaaacgtttacgccggagatatatggagttttgggcttacgatgctcgagatcttggtgggttactacccgatgctaccagaccaagccgcgatagtatgtgcagtttgttttggagaaccaccaaaagcccccgaagaatgctctgacgatttgaagagtttcatggactgctgtttacgcaagaaagcaagcgagagatagacagcttcacagcttctcaaccacccttttcttctccaccaagattagggttagggttatctccgaagatattgtattggttactgaaaacattagactctcagtgatccaaagagatcaaaagatgcaccaaagtaggttttggtctaccacttgtaaaggatcggagatgaagtgatgatattagtggatttccgggagtaaaactcccggcgagatgtagggtctccacattggagatctgaactcgttaaattcgttgtgtcttttacgtttccgtaagcttgatcttgatcatatatatcacaaacgaaagatcgagacaggaagatgcgaggctaaacatgagagtgtacaaagagcgaatttctcggctactacgtttcttggattcaaagaaagtttaatcataatataccaaactagtttaggcctgaaaattaatttagaatatgaagttacagtctctttgagaaatatctgtatagtatttcctatgtgttctaactaacttaaactcatacccgttcaggttatgttccttccgcattaacacatgatgatgataattgatgtttgtgatcacctttgggaaccattaggatcaagattcatcaaaagttggaaaagtaaaataatcctaaccagataaattttggattgaatttttcaaatcaaatcagaatacattgattctgtatatcttattgaaaaatccatcaatttacatcaacaattttatatctaataattaatttaaagagaaaatttataaaagtttattagagcaaataactcaaactcggattttatagtcgttatgacccggtttgactattgaaccgtttaaccgagaaattgggactcaattaagacaaccgaaactagacccggatccagtgttagcgggctagattaaggtgtcgggtcatagcggagaagcaaccagacgccaacaatgaaagcgatccagttgctgtgggaagcgataatggaggcgacgaagagagaaagacggagagaagatgacgacggcgaaaaagcttcaccggaatcactcgttcttccaccagagatcattacagaaattcttctccgattaccagccaaatcgatcgggcgattcaggtgcgtatcaaagctcttttgcactttatcgtcagatccagggttcgcgaagattcacctcgatctgatccttcgaaacgaatccgtaagatcgctccaccgtaagctcattgtgtcttcacataatctgtactcgttagatttcaattcgatcggtgacggaattagggatttagcggctgtggaacacaattatcctcttaaagacgatccaagcattttctctgagatgattaggaattacgtgggggaccatctgtacgatgatcgtcgcgtgatgcttaagctgaatgcgaaatcgtatcgaagaaactgggttgagatcgttggatcttccaatggtttagtgtgtatctctcctggtgaaggagctgttttcttgtataatccaactaccggagattccaagagattacctgaaaattttcgtcccaaatctgtagaatacgaaagagataatttccaaacttatggatttggtttcgatggtctcactgatgattacaaattggtgaagcttgttgctaccagtgaagatattctcgatgctagtgtctattccttgaaggctgactcatggagacggatctgcaatttgaattatgagcacaacgatggctcctacacgtccggtgtgcatttcaacggtgcgattcactgggtgttcacagagagtaggcacaaccaaagagtggttgtagcatttgatattcaaaccgaggagtttcgagagatgccagtgcctgatgaagctgaagattgttcccataggtttagcaactttgtggtcggaagtctcaatggacgtctctgtgtggtcaatagttgctacgatgtgcatgatgatatatgggtgatgagtgagtacggtgaagctaaatcctggagcagaattcgaatcaacttgttgtataggtcgatgaaaccgctctgttcgactaagaacgatgaagaggttcttctggagcttgatggagacctggtgttgtacaactttgaaaccaatgcatcgagtaatctaggaatttgtggggttaagctcagtgacgggttcgaggcaaatacatacgtagagagcctcatatcacccaactcttatggtatagagagctgaggaagtctgctttttgctaagatataataaaccaacattcggattagaaatgttttagaaacataatcatgtaatatgtatcatgtaattaacaacgaatggtcaatgggtattttaagtttctttctccttaattctctcttcccgctctaacttttcgtcacttcctttttgtttgttaaagattacatcaaattattcataataatgatacctgaggaactgcaagtatttgtctgtaaagaaaaagttaaatacgagtgtagagaagaaggagaacttgataacgattttacatgacatcctaagtttctactagattcatatgaacttccaaaatgtcctgaatcttccaaaaattctaacttggtaggttcttcactttcttaagatatttaggaaacaaacatgaaaataacagagaacatacatgtcggtcactaaacccaccgatttatcaatggatacaaccggcctcaccacatcgacgacctccaccaccgccttttctgatgactttaagttaacaaaagggttaggatttacatcggcggccacagattccatcttcactgatgaggtaaggcttcatcttcttctgatttctcaatctgtaacagaagaaagtgaactcttgaagaaaataaagaaatcaattgatgcttttctggtttcacagcaaactcattcttgaatttctgatatagataagaatatgtcagatttctttgctagaaaatattctactttcccagacaaaggagatagtcttacaaaggagatagtctctagtctataccaaatgacgttgtttcacttcaattcataataccatctctgttacaagaaactggatcaatcatttttacgacatgaagcaccagcgtcattaaaagctaaaccataaactgaatctaatggcaaaatgatccaagagctcagacataaatgaaacaatgttattcataaggaggcagaacagagggagagtctgccgccgatgaggcaaccaacacagcccaaatgagaatctatgaaggacaagaacagaaaacaacctcgctaccaaacagattttgaagatttagacatcttagattataaactcgagaaacaaagagaatcaggacaactgaccttacttggttttctcatctctgccaacacagtttcttcccaccctctcgcatgatctcatatgcaagcttatacttctccagagacgatgtcccaaactctatatactttgaagctgcttcccttaggctccagatcatcaaggccttaaggtcctgagaagtcacccctgattctacatctcgtacaaacccaaactctgcgtttttggtccagcgatgaagtatataccgagatgggagttctcgaatgtctaagaggttaaacactttcaagatatgtctgcagagaagtccttcgtactcaaacatttgacaactgcagcttgcattgagattcgatgcactgaaagtcacggcgtgcttctcgttctcgttcccacatttcctcactagaaatctgctgatggctccctcctcgtaggtctttaaaccgaggtaattataagactgagcaagctcgctctggaaaattctgaagatggtgagcgtgtacaaccttctgcattgttcttcaacgggctcttttgtctgcagaaacggctgcaagttataagaattgaaatcttcttttctttcctcttcacggcgctgctcgagtccttgctcataccgtgagatgaactccctaagagacgttagagaattaagggaagtgccgtaaaacggatcaaaggtgccgtctacatggattccaccaaagaaactggctcttagatatgccggtacccatttctcgcgcttttcatatatttctctaagccacatgttatccctaaggccgtatttgtttacaagagaactccacatggtatcaaactcgaccgttgtctgagactggtataaacatttctcgtactcgtacttgaattcattcgggaacgacctgagattttctcgttctttggaccttatttgccacgctgagaaccggtgatgagtcccgggaaagacttgagccacagcttgttggataggcaagtcttgatcagctaccatagatctcggacgacggcctgacattgcacgaagccatgtctgaaacaaccatgagaaagcctctttagattcatcagcaactaaggcacccccgagaagcacgggttgcctatgatgattaaaaccgataaatgttgcaaacggaacagagtagtctccttttctatatgaagtatcaaaaacaacagcatcaccaaattgactgcaggcgaatcttgaccgactatctgcccagaaaatgctcatgcagcttccgttactatcaagctcgatggcgtaaaagaatcccatgtcttctgcctgttttgactgaaaatagtcaagaagcactggataccattccttacctatggtgttttctcgggtactactgatgtgattgcttaagtcgtttagttcaataagatccacagaatccaaccctcctgtcacatcatctgttatctttttcataccggcattcttctttcccggttcaaggtcatgattatgatccttattgagacggtcgactatccaacctccagagtcttgccttttgatcctcatgtaagctccacaacccattctcgaaggatgttgaaacccctctttcgaacaaacaaatcttctggatgtgatcgaaccgtcaacttttgatcgaaacaactgccctattcgaactctaaaacctacaacttcagcatacgcttgataaaactggcacgcttcattagctgagttgaactccaaccctgcatacggttcagtggccttgggctgagtttgcccatcactatcttcagctcctttgaagcgcttaaaagagatcacaccagaagggcatgaccttcctttatcagcctcgtcaacaactttcatcttgggtctatgtggaaccgatatgcctagcttagtgggagccggtgctctctgttgtacagaaggacggggagtagtctgagcctcctctatatgacctccaaggtcatggttgtgctctttctgaatctggtcaagaacccatttgccagtatctcgtctctgaactcggataaacgcaggacaaccggttcttgaattaagctgaaaaccttcctttgagcaaacaaacctcctcgatgaaactgtaccatcggtcctagatctatacaactgacccgtcctaaccttaaaacccgtccgcgtagcataagagttgtagtagtcccttgcttcctcagcagtatcaaactctaatccaacataaggttcaagaccagaatctccttcgttttcagcaatgccattgttagtcccaaccattcctaatggataagttttgacaaccatgttgttcccacaatttaaactggtaggttcagtatctgcactgcatcaaaaccaaatgtacacagacagttatctaatatgcaaccaatgtcagtgatgcgaaatcaaactacacattcttggacacagaaaacagtaaatacaaaacaaagacagatagctactgaaagattatgtatctcacacctaagcttagatctctaattagcctcgcattcttttttttttttatgtaaccaaaaaacgcaaaaatggaaaactcctaaagaagaaacaatgagaagatataatcagacaactagagaagtgcagattaatcataacccgtatctgaatttaattgaagctaaaaagaaatgaaatttgagggagaaaaaaagacaaaaaaactaatcgaaacacatatctgaaatgtattgtcctccgaagattacctctccatgtccatagaagcgaccgaatcaggaaagaaaacgcaaaacccttcctttaattaacacgacggagattgcaagaccgctcggaaaggcttcaagtttgtgtgccgattagacttcactttggagtctctcaattcttgaccctcttcaccattctcttcgtagagaagattgcaacaaagaagatacacaatttagggcttgaaacgaagaagaagatagacagagatacatatagagatagagagagagaatgagaagaagcaaagcaaaaaagctccacctttatttttgaccaaatgtaataacattacttaaaaaatactctgttttttattaactttccaaaggacatggtctcgagtctcaactcaaatttaataataataataaaaaagtcatctttatcattataaattttacagatttgaaaaaaggaaacacatttattcttcccctgaagatacaaatcgatttcgaggatcggaggtatctagggttcttctgtatatcaatatttttctctaataatcagctgaggttggtttgctcgtcctttagtttttttcccgcgttatgttagttacaaatcagagaatccgttagttagtgattcgccattaccagacaccggaatctaacccaaagaaagacacgaaattgatcggcggtgtaagcttgtcgtcgggaattccactaaaccgagaccgaagcggacaaaactataccggccaaaagttccttatgcttgcttgttggagaatcctgcagatttgtgacgtctctcgccttaattctggtaaaacttattgtcttcctgttttgttctggattgatgtagattgatttcagacagccactgtctgtaaccggaatttcgaaacagtgtcgctagtttctgtgtcggatcttttttctttagtgataaagttttgatgatttgtaaacaatttagattcgattctctgtttataaaaagaatgaatttaatcctccattttgtttgtacctatgtatattacacgaggaatattctaaaggtttgaatcaaagagagggaaacaaaaccgaagaaaggagaaaaaaaaaatgatgatgatgataataccatctatctcttcttgtgatgaaacacactctgagctcaaatgcacaacaatgtgtttaacattacaactttttttcactttgtaatgaaacatttttggctctctttgatcgctaaaaacccctgctttcttttgtatcttctcctctcctatatgtgccatgtttaatggtttttttcttttgcctctctactcttctaatgaatgtcttgatgaacggtacagatcatacggtgcccatagatgatcaacgatacaaggcttccttgaatctagtcttaaccatggcttcccttttccactccagtgaagaagacttatcggtcccggatgcaacgttctacatcttccttcgaaattatcacctcctagaccatgctggttccacctatgattaaccgcttttatatcaccggcgaatatcagcagaaacggaggtaatgatcccaaatggtatatcctcttctgcttctgaattgtcatccactcttctaccttctgtgtatacattcctttcctccatttgtttacatccacaaccatcacccctgtgttgaaataacacggacgttttccttcaagaactttgaccaataccgggtctgaccagaaagttcttgtgaaataatgggtgaagtttgcgtggcagtactcgggagcagccaccactttaccttccatctccacatgccacagcttctctatgtcgtctaccacaacgaggtctgagtctaagtagatgatcctgtcaacgctgctagggatgatatccgcgaggtagattcttgcgtagttaagaggctgatcaagggcttgcctgatggatttcgatatcttgctgcggacgaggtttggatcaaactgataaatcttgaagtttaggtaaggaaaggttgatttgatgctggtgaaaaggtcgttttcgaaatgaggaagggacaggaaatgaaaagagaggttttcagggcaagtggaatgttgaaggagagacaaaacggcagccattgtgccacggaggtagtttgtgtcgagagtcatggcgatatgaatctgatcagcctcacgagtcccgcattgatcaccgtttcgaaaagccggggcttctctgaaaacaggaagagttggagcagaaggcttatgaagaatgactccaacacgaaccgccatagtggtggttgtgaccaagaggagtataaaggacaggaggcctaggagttgtgtataggagaggctccttgaggccatcctgaacctaattctcaggtaaactcttttattattattttcacttttttttttaatttttttttaaaaaaggtttaaacattacaaattaaaaagattgattagttaatagagccattgttagggaaaggctagaataaaggatttggggagaggcttgttttattagcagtctaaatgtggggaagagattgaacttcggactgtttctcacacaaaattttgtctccaaaaaaaatccatttcctatgaaataggaacaagacaagtctgttgtccaatgaaatcggagtgaatttttagattttgtttcttcttctttagattcttagaaactggtttatgtttttttttggaaacaaaaattattgtttatttttaggacaaaattggtctgatcaatttgctttgctgtcatttctttttacacttgattgcgtcggcgggtttttttttttcctttttggaagtaccaaaattagaatactgtaacaaactcccctaaaatgtattaatgcatgcttttcatgcaagaaaataatgatttttatgtgatcaaatccctgataacatcatacgatctcatcatatatatagtggtactggtaaaatctgtaattccaaaagttaagtaaaatagtaagaaactaacttaagaaagtgtgtgttactccacgtttcaagaaaagaaaaatgtcttatatactccaatcttcatgcatggctactaagacagtcgcgtgtcaatcggtcattctcatgcctaatactaatccatatatataaataatatatgaaccagagagaagatctcttgaaactctttcgattacaaatatttgagttcaaacttattctttcaccaatactagccatttgcagataagacaaatagaaatcgagtcgaatctttcttgcttgagtggtagaagatttctttctctagttccatgtaattggtctaaatcagtgaactcataatttcatgtacacaaaaaaaaaagactgtttcataaacagtggatatatggattggactcaccatgtcatacatggtctcgaggtaaattacacttactaagtaatcctttatattttacattttttaccatgttgtatggtaatgtgatagctacctaattcacagggccttaggcccattaggttttcaatattttcatggattatcgggtcgagaaaatgttatgatacccgacccgaaacggggagaaaataaacgagaaaagtaaggaattatctcgaggaaaagaaagcatcgataatctcaaaaagtttttggtttgatttgggaactcgtgcgcggctgtggcagaggccaaacccacccgtgtactccatccgtcggatccaccaaaccaatattctttcatctctctctctctctctctctctcttcttcttcgtcttcttctctttttattctttcttcaggaacaaattcctctgctttgggcattttagggtttctcaaatttttgacgctttctcttaaaagggttgacgaaataaccctttaagggaaaaaacaaaggttgaggaagaccaccaaggtgaaaaaagaaagaagaattcgaacaacagcagcaacaagataaagttacgaatttttcctcttttgtaacctttgtttctcttcttcctcttcctccatttttttccattaaagattctgcctttgggttccaatttcgtctttcctttttcgattttgccgcgtttaacatgacattcgcaaaaccctacacttttctggacgccattgttgaatcccacgaatttcgtttccctagagattgcttgttctagccccagcttgaagctaaagatttttcaaggaaagcacgtttttttgtttgtgcaatcgaatctgtttttctgcgttatgggttgtgttcaatgcaaatgttgtagccgatatccttcgtcatcatcagatggagattctcgtggacctttagaagccaatggtgttcttaaggggaaagatcagaaacctcttggatctattcacgttccttctcctaatttcgatatggtttactctgtgttatctcaacgaggctattaccctgactcacctgataaggagaatcaagacacttactgcatcaaaacagagcttcaaggtaacccgaatgttcatttcttcggtgtctttgatggtcacggtgtgttgggtacgcagtgttcgaattttgttaaggagagggttgtggaaatgttgtctgaagacccaactctgcttgaggatccggagaaagcttacaagtctgcttttttgagggttaatgaagagttacacgatagtgaaatcgacgattcgatgagtggtactactgccattacggttcttgttgttggggataagatttatgttgccaatgtaggagattcgagggcggttctcgctgttaaagacaggaatcggattctagcagaggatttgtcttacgatcaaacgccttttaggaaagatgaatgcgagagggttaaagcttgtggagctagagtgctgagtgtggatcaagtggaagggttgaaagatccgaatatacaaacatgggcaaacgaagagagtgaaggaggagatccgccgagactttgggtacaaaacgggatgtatccgggaaccgcattcacgaggagtgttggtgattttacagctgagagcattggagttattgcagagccagaagtgtcaatggttcatctctcgcctaaccatttgttctttgttgttgcaagcgatgggattttcgagtttcttccaagccaagctgttgttgatatggtaaaatacccttttgaagatctcaatatgtttttgttggtttggggtcttaatgtgattgaaaaatgttgtttgcaggtggggagatacgcagatccgcgcgatggatgcgctgcagcagcagcggaatcatataaactgtggttggagcatgagaataggacagatgatatcacaattatcattgtacagattaaaaagctgtctaatgaatgatgcacattcctatttgcccctttgtttgatttttctgtactgtaatgttacaggtttcatccaactatatagcaaagttaaaagtaatgctctctcttttgtgtatgagcttcttttaccaagattaaatgacgtgtttaatacgctatttgctcttacacgttgcttgttgcggagaataagctcttggcgacccaaacaagtttacttgtgttcttttttttcaaattaaagaatgaaaacatcattataaagcccgccaattatttacaaagaaatgagactctctatgtgattgggaagaatatggtgacgttcgtatccaagtctattacgtcgcctaaattcgtcgtccgcgagtccttcatatatgactcttctaaagctgtttctctgtggatcgaaatacagagcatgaaacggactctgcaaagttgttggtgcgtaaacaaactcaccggcttcagtcacacccgttagttctaaaaaggtgtccaaaattggatcatcgagtggaaaagttaaagaaaatgttctaaacgaccacgcatgtctctctgcatcctccagaacccatagtgaaataaaggctttcacataggttgcagaagcaagagaagctaactttccctcgtaagttaagaggtaaccttgggaactttccctgagcacgatcaaattcaccagattcataatacagaaccccgttgatgcatcgtccacgagggtagtaagggcaatgttcaaagctaccttggataaatctccatgattttttagctcttcccaatgtaagaacccgaggctggttgctgctttttgtctttgtcttctcttcacatcttcttcttcttgtttctccatcatcaaaccctatctttttctccttcttcctctctgttagattacgcgtatctatagggtttagggttttagacaagaagtttttcatgttaacttggtagtaattataaaaatgatgggtctcacgcgctcgctggaggcatgctttatttcttctctatacataatacataagtgtatgggtttcgttcacgcgccgagagtgcgagtgttggaacatataagactagtagtaataatgtactaatggtcagtgaagtacaaaacttctaccaaactgatgatgacacgtgtaggggaagcaaaataccttctttgacaaaaactgacatgcaacaacaacaaacattaacaaaaagggctgacgaaaatcagaagtaaatacagagcttctcggctatgctattctgtaccatgttacatttttccaacaattcatctaatctctcactctctctcttctctatcgtcttcttctctgccgcttctctacctttacttctccatgatctctcgcctaactcatcatcctcagttatcatcagatcaatacctcgacaagcttctctgttcttttccaacatcgattcctctatatctctatgatcatcgatgagcattcctgtctcaacaactctctgggctttgtcatcatatggaggaggcgacttcaaggggctgcagctgatttctatcatttcatgaagcaatggaagatttggaggacaagatgggtatgatgcatcttcagccaagaatttatctgcatagcttgaagttgacatgttgagatcagacttcagtacgtaagctgaggaagatgatgcatcaaacaaacccattatccgccagttgaagatcctctggaagataccaatccatctcggggtgatatggtagcggcttgagttatggagttcgagtctagtgtttctttctagcatcactcctgtttctttagtagctaatgagactcccataagattgcttctctgtgttaagtactcaattaagcatccctcaagcctttgcgtgtggttctctatctcagcaccagaagcacatcctacggttagccatgtcaaatcatcttcaaaatctgggagcttacaattctctagcacggaactgagtagttcgacgttctctgcactgctccagtccaggttgggaagataccgcttgaccattaaacattcttttctattatcctcgagcaacattgtctcagggcaaggccaaccgatgggatttgcttcagcagcagaagtgatgtttcttcgtgatgtttccaatgcgtcgttgaaggctgatatgcagatgttaggaccaacctcctgatctggcatctgcttaagcaactccaaggaaaaactgaaatgggtcagaaacagttcccggagtttaacatgatgaagatttggttgcagaggtgaattgcttgctagccatttaaacccatctcttagccgtgaatcattgaaaaaatgaacttcctgccccttttgggacttattagcaatagaaacgatggaaaagcttgctatctttgacttgtcaatatcatggaggcctaatcccgagacaatgtcggtatcaggctccatgtgttccccattgcatgagctaattactacgagaaggggaagaactgaaccgttgggtactgattcaagaatgaggttaagctgttctctctgaagattcaaagggaggcctccagatgcaaggaaaaggactgcacttgcaccacatgttgtttcacacatatcattctcagcctccacatccctagctactgagagacagcatgtgaaatctatatcagacccatttgcaacccatttgttccatacagacacgccgggagctgaaaacagcagattatcatcgttgagactactatgttctgcatgaggcataagctttgatgataaccatcgactggctgctgaatgcgtaacctgacttgcagaagatgatgagtttactgatttagtctgagtacataagacgaccttccagcttatgcattttgattctggattccttccaactagtatatcagctatcacatcagaaatattcagccttgaccatgatttctcacgttcttcaaatctcctcctcatggcttgatcaatgttaaactcaccacacgccctcgattgctgttgtataaagagagaactgatattagaacctcaatagtacatgccttttaagaattttgcttccttgacaaaagactgatgatcagcatgttatggggaagaaaactgaaacttacatcagttttgctaaatcggataggagtacccagggatagtgaattcagtgcagcagctgctgctaactgtcgacgctcccgcaattcactttgacgtgaagaccaccgcttccataatctgcaaatattattacagaaaatttaaaaataacttaaatcaattgtcaatttgcatgaggagctggcaaaccttatgatcaacttgagttttgctttcgccacttcctcatcatactgatttaagatgaccccatcctcatcctcgtcttcctcgtcaatgtcattgaactccttttccaaggtacaaatcattgcagcctccggtactgattcttccaaagcatatttgttttctacacttgtcggacactctgcaatggtagttacaggcataatctccattggcatagacttcggactttgttgcaaagctggtccaggcacatgattcgtatatacatcccctatgattgaaaatttaatttccccaggagacataccgatgcgatcgtcattaggttgtttctccaaattcgacgatttagtttgaggaaatttaggggaaccaaaaggagaatatagcttcacgggagaatgaaatccaccagctgatgtaaggtcattttgtttctcttgatgcaccactggatttataacgaatggccctggtggattcataacaaatgtccccattggcttgtcctcctctgctaagagggaagtcttggagtcagccacttctttatcaaatagacgcattgatgtttgtttcttaagacttctcgcaggcggcatttcgtgtttatgggcggtaatacactgttgatttccgatagttgcttctgtgatcaaggaaggcaatggaaagggagtagaaacatcttccactactgtgggagcagaaacatcttccactatggttcttgactttttcatgtgaacaagttttgagcattttgttttgtaatccttatcagcatggagaaataggtcattttttaccatgtatggctcttcaaaaacctttatcgaaaacccatggtactccaacagggcttctatgtcctcttcctaaattccattaccagaagaaaaatgtaagatctctaacaacttctctgtgacaaaccaaaaaagggatacacaccaagtaacagagtgatggaagaaatacctccatccctatccaatttgacatatctgaaactgggagaccctgattaatttggagacccgagtgcagagaggcaagcgcctgagttcttagctgatgaaacagaataaaagtttaaatctcagtgaaataatcacacatcaacatggtacgaataatagcttttgaacccacaccacaaatacacccttactttcgaaaaatgagcatgcattagacatgcttgaagatagcttgctttccgtgcaaggcgaaagaaggcgatgaagttgccagttctgcaagctctgttttgcacgactggtttcaatacttagatcaagttaaaaaactaacagccaacaaaaaaatccaaggaactacctggctacattgcgggcaaagagaacttctgaagtttgccttatttctggagtcatattggcaagatcaagagaaagttctgaaggttcaacctaacaagaagaatttattgtcgggttaagaacttagcacacaattctgactgcaaattcacccagaaggacttaccttatagccaggatgcttgtcgagtttgagaagggcataatagccacgaaactctttttctgtaggaacagttattcctttcttcctgtgatcatcatacatttgaaacaactcaacagatgtcttgttcatctgctcaatattcaggtgtgcatcaaacccctccgaaaagccctctcctttagtatattcacatagctcatgcattgcaatgatgtgaagtctaatctgtaacaggaaaatcaatagtaagaacacacgcatttaaaaaagaatattgtttatcatcctgtttaatgagatttatataagatcagaaaacacaaaccatttgctccagcaaagtaatagcttcttggttgaaaatatgttgcattcttagatccatacgtatagctctcatcctatcccataagaaattgtacatgccaagaaagttttcattgtaaggtcggtctagcaaactcagcaaatattccattgtattttgcaggattggcattggtcgtatcaaaattgcttctcgctccgccgtcctagtatactatccaaaggcagatatataagtagtcatcatggcaaatgagtggtctagtatatttcatctaagaaagaatctgaagcttaaatgatattaaaaaggtgagcttactttcttcacagcaagggatttgcttgtctggttcctatctccatccacacgctcataatggtccaagtcacccttcctctcacgctccccccgttctgactctgggaaaatgaagaaaaaagtccatcattatatttgttctgcgatcagattactataactagaactagccatcatttatggacaaaataaatatcgttggcaacacaattctttttttatcagattatatgaaccaaagactatttacactcagttgtcaatttaatgcatgtctcaggcatatgcttaccaggacacatgtcagggcatactccaatgataagagagggctgctccgagttttcataatcaggcaaggcatctcccttcagggcatccctacttgattcaagcgaattgaatgtttgtttgttgtccagaggcttcatagttttatttacaggtgatttagtaagttgaatatcaacaggtcggtctgcaataggctccagttcacccttgaagcgggccagtctctttgccctggcttgctcttctctataagaaatccacaccgtttagaaaactttaagaactggtccacagattaatgcaaagagtcaatactgcgtgattaaatattgtacccttctgtacaatcttgagaagggaaagagtttcgcgggatatcctcttcaattggatatacaggtggagatctcgtcctttttgttgcaggtgaactgtttgtcttacgcgcattattgaaactatttacagaggagggctgtccaggaaattgagaatctgaacttcttgaaagtgtatatgactttgtgcctgacgtaggtggagatgtcgaaaacctatcacagaaacagcatgcttaactaggaggaagctcaaaggcacatcaaaccagatagagaaaagtagatttgttgcaatagcattaagataaagctgcaggagaagtaagcatgacttcaaaggctagtagcagaaaaatttccaagcaaccatctaagtttaaggtgaatacgctcataagccgatttgctaaagataaagtttcttaagccgatttgctaacgataaagtttcttaggattgtaactctattctataatcgtgatttctcctgccattcatacgtacacgtatggcacagagtgggtgaataaaacataataagctttagaatgtacgatgagattcatgctgtctacctttgagagtcatgttgagacaatatggggtcatctccaaggggtttatcagaaggtgctacagccgaagactttcttctagtagcttcctgaatttcagctacttcatgtgcataggggaatgacgagtttccggtttgttcttgatgaatcaactgattgggattgctcctcgacctcaccggattattctccgcagaagacggagagcgcctacacaaacatgagaaaaggttccaggaaataagtttcaaaagttagtgagaggatagaacaataaattagtataaagatcaaggagcaaagacacaggtatggttcaaatcattatccacaaagagtaaagacaccacaaaatgaaatattttatgacctttttaaaaccaatcaaaaccaacagcgaaaagagaatgagaaacgaaaacattatgacactgacaagaggataaaaagctcacatccaagttcggctagaaagtggctgaaaaccatctaccaagtttccattctcaaaacctgatactggcgattgatttcttcgagaaaaccccatattctggtcaggaagaatatctgaccgactgcaacaaaaattgagaattttatagaccgatattagttacatcaaaaaaaccaggatatcagtaaacaccatggccatgtctatgacatctcattcataccacctaggccacacaacaaactgataaaatctgaaagagtaagatacatgatgcagaacaaggaaggtgtaaactcccacaaggacagatgttaaaaggttaaggataagatagggatacaaaacagacagaatgtttatttcagaaagatcctgctggcataaatgaccttgatctaaaggaaatggcataaacgacctttttctttttgaatcttgtgatcgaccaatctcaacagcatcagttcccattctggaaagaatgtgagatgtagcaggtggagacgtggctcgactatgttcaccatgatctttcaagaaattccttgatccatcgtgcccatattgaggatttaaattaggcctgtgaggaaaaatgaagcaggtaaattcagctaagtcgttaagaaaaatccagcagcttgcttattaaaggctataagccaaatccagcgataatgatctctttagagcttcaaagccgctgccatagtaagcccttatgtattaggcagagaaacttatagcactccgccacactctactttcttcctactgctataatttcaattgcagaaactgaaagcatttgagatgtgtgattaacacagccgcatatgagtaatgacactcttcttagtcaaaatatgtcacgtacacttttacctctgaactccaggaaattggtaaggtctcacagaggggcttgtacgtgaagcttctggaccccatgctattccattgaaaggttctgggatcctgaaaaacatagcatcaaagtgttcttataactttctcggcgtaaaaattagtgcaacatatagaagattcaagcagaagttttacaaaaagaatcaaagccaaagaaaacagaaaatttggtttatcccatcttcactgttttgggttcccgaagatcctttacaggtataaggagtgaaaaaaaaaaaagagagccataatagtaagttatctgacctttgaattccaccaggttggtaaggttgtcctgaggagggtgatggattttgaaaagccgacggagatggtattctattaattggaggaacactgcaagcaaaaaccataataacttaggctagaatctaaagaagaagaaaacccgagagtagactgaaaaattaataattgaataagtaaccaacctaacatcatcattagacacatagaactgaaagagaaaaggaataaaagcaagccatacgattaagaatgtctaacctttgaaccccacctggtcggtaaggtttccctatagagagctgagggttttgagaagccgacagaggtggtgctcgctgaattgaaggaccactacaagccaaagttacgaaagaaaactgagcgaatttacgaaagaaaactacaacaagtagcacaataggctcttcctatggaggctcagaaacaacctaacatactcgcatagaaagaaatcaaagctgtagagctaaggttaatctaaccttcgaattccaccaggtccaaaagattgtcctgcaaaggctgaatggttttgagacgccggtggttgaattgatgaatcactacaagcaaatccaacattcgcagtgtgtaagaataaaaaagaaaggtacaatctaagaacaaaaagcaaagtaaagcaactcgcagcttctcctaaggaagatgaagaagcaaaacccgactgcctaagtgatatagaacacaatatcatagaaaattcaagatacttctctcattctcatgatcctaaacactttaatacaacgatagcatatatgtaaatttgacagttcaaaaaaatctctgagtataatagatccatagcgtgaaatgaatcctaaaaatctcaaaactcgaagaaaagtccgattgaagcatagatacatctatagagaatgaagagcacacctagtggttgaagaagcaccgaacggtgtaaacggcgctggcttagagctcatcggacctaagtccttcccgaaaggcctaaacgccattctctgagaaaattccttgacttgattatcgctgcctctcttctaattctccttcaaccttcgtttaattacgtcgccggctaaagtcgaaaccggagcaaattgaattttctgttctggtgacgcctcttccgtccggcgaggattattttacgtttaaaaccaacgacgtcgtttttatttccgaattttatgttgggccttttaagtaacaataggcttattatgggctttggtcaaggaacaagaataattgttcaaccaagaagaacgtgcgcatgttgtcaccatctcccttgagcctccttgttttaggtagaacatcaacttttcatgaccgttgacattttttttccctctttattttccgagaaaaaataaataaaattatcctctagttttcgatctcgatcatctggatccaagaaattactacgattgctataatgtcgatgtctcggctcggattgttgttgttcgtcgctatattgctcgtcttgcttcagtcttccacttgtctgattagttctccaagttctatcatcaatccttctaaagtcaaacaggtttcgtcgaagcccaggtttgattttactctttctcttgtctatttagtgagaaatgaagcaaatttggaaactttgaacctccaactgtgtgtattgactgtttcttcagggcatttgtgtatgaaggttttttgacggacttggaatgtgatcatctaatctctcttgtgagtgcgaattttgctctttgggtttgagctcaaatttggaaactttttggcttaaatgtgctagtttcagtatctaattttggtttttttttttttggggaaaggcgaaagagaatctgcagagatctgcggttgctgataacgataatggcgagagtcaagtcagtgatgttcgtaccagctccggcacttttatctccaaaggaaaggtgcaattttaattcggcacatcagatctcattgaatggcttgattggaattgatcttgattctaatttatgacactcgacctcaagaactctgaatctctgatgtgatttctgatactaatggatctgataagtcaaacccctcaagatctgatggaaatagaaattttagaataattcaatccaaaagttcacacacatattgaactggtcatcagagtttgataaaatgatgttgataagtcgagatcttagtaaattgaccccaaattgtgttgatttgtgattgttgtttactactaaaaaggttttagggtgatagctagacataaatttacttctgtgtatggatgaaggatgatgaatgatacttagtgattattaggaacagatttgagaaatttagatatctcagtgtgattacaatcttaatgtgaagcttcgtttgtttaatgacaggatcctattgtttccggtatcgaggacaagctctcaacatggacatttctcccaaaaggtaactttaacaatctgaatggtttttcaatagtggtctctctgtttcacaatgtcaattgacaaggaaccttaactgttgttgagtttcttgaaagggtttttcagaagatattattgtttcctaagttcttcactttgtggtcacagaaaacggggaagaccttcaggtattgagatatgagcacggtcagaaatatgatgctcactttgactacttccacgacaaagtcaacattgcccgtggtggacaccgcatagcaacggttctcttgtatctgtccaatgtcacaaagggtggagaaactgttttccccgatgcacaggtttgttgtttttcagacaataccaccaatttccgcttacatttccacaattgctaatcttgtattggttctctatatacgtggacaaataggtctttactctttttctgtatgatgaatatttctgcgcaggaattctctcgccgctcgctttctgagaataaagacgatctttctgattgtgcaaagaaaggaatcgctggtgagctatatataaaaggaatcatgacttgttctttccatgttatctctaagaatgtttgtgtttgatattggttggtaatgttattagtgaaaccgaagaaagggaatgctctgttgttcttcaacctccaacaagacgcaatcccagacccctttagccttcacggaggttgtccagtgatcgaaggagagaaatggtcggctactaagtggatccacgtggactcattcgataagatattgacacatgatggtaactgtactgacgtaaacgagagctgtgagagatgggcagtgcttggagaatgtggaaagaatccagagtatatggttggaactccagagatccctgggaattgcagacgtagctgtaaagcttgttaaagactttaaactcctctttttctctgtaacattaaaagtttttttttcttgatcgagtttcattttcttgtttctgattgttgttacatgtatcgtctcgctttatagaatgatttttttcgtctggttaacttgaattatattaaaacaacttacgttaaatatataatacaactttttgtgatgaaaaatttgaaaatagattatttttccccctgaaatagttgcgatcgagtctcgtgacttagatcaactacaaaagtcgtcgtttctcgtagatctagggttgtttactccaacatggattccaaattgaaaaacgcggatgatgataattcgatgatggagatatctgaggagaatgaatcgaggaagcgcaaggcagatgatactttcccggtggattcttccgatgtttgcgagaaagaagaacaagtcgaaatgttgtttacacacagctcctaaaatatattatatcggagcactttgacgttgaaaacataggtgttacactaatagttctcgatatagtagaataaagaaagaaggaaaatgagttgctttacattgaaacccaaaactgacaactgtagttacttgacatatgtcgttaaagatccccaagatcaatgtactaaacccaacactattgttaattgatatagtaggataaagaaagaaggaaaatgaagttgctttacattgaagcagaatatgagttaaagctgtttcaaaatgaatgcttagtgcttggccctttcacattctccatccagtgttcacacgcactctcttgaggcttcttgtttcttccagcacgaatcaaagtcctgtaattcaattaaccaatataaagaacaacttatattagttcctttgttatgaaggtataagaaagctggtgcttctacgagatatttttgctgaaggtaactaaatcaaaagcttaattctaggccaacatgtagctgtgatcaataatacaaaaattaaacaaccttgtaatgtttagaaagtatgttttggttacataccttgatctggatctggccagaatgccaaacaactcataccatcatctagtataagtctttcatacccattcatgccccaagtattttcccatgagtttttgtacaatgaaaaagtcttgtccctctagagttcgtccacggcccacaatcatcaatgcgtgtctatctaaagatttacctgtacgtggccgtggcacagctctaattttgtaaaatccctgaaagcaagtaaaaaagtagaaaatgggctcacgagtttcacatccaatggtttagatggtttagatggaagttgaagttgttggttagaaactaattaacaaaagcaagggagttacatatctatttctaagaagtagagggtcatctcaatgattctcttacggtaagtttttgagtcagaaagactgttagagcttattctaaagagataagtgtgttacgttgtctttgtttggttgtaaaaacatctaaaatggacatatatactcgatttaaaaaaatttctgaatccacacaatgaagacatatatatatatatatggataaaatttggcatattcttaaaaatatttcgttttggcgctgatgttgaatccttagaagtttttgacctccacgttgggggttattgagaggatttggaccttttcttcgcatcctccttctgatatgtgttttaggccagctccaatatttctctccataattacaatgttttttttataaagagctctattatcataacattttgcactttcttcgtacgacatatggcatatataatactttaatatttatatgatattaattatgtctttaaaccatcaatcatctacactaatatccctacatttaataaaaagataaattttcatatttcaccttcactactcaactaaaagacaaatacaattgattttctattattaaaaaaaattgaatgagaaaatagtctcatacaaaatattgtttttacgacataaatagctcttatataatatgacaaggttttttataaaaactctattattatgacatttgacactttttcgtacgacatatggtaaatatgatactttaatgtttatatgatattaattatgtcgtttaaactattaagactgaagtttttttttgttttttcaccttatactgcaactattttttaattttgatttctcggtaaacattgagctgacaaaaagcgagtctaaaacttatctcagctgtaaattagtatcagtaatagtatgttcgttgattaaaagatttctattttctttgttgtcagattagtgatttaaaattgttaaccgaactctaataccccctcctaattttttccattatgcttctatttttgtgattatttattacgttatgtttgcgtgtagtgtgtaacatgcactagtgaaaaccatttaacaatcaatttattttagtaggagaatcaagattagttataattaaaagtaatcaaaatgtcgttagctcaattggtaaagaccctagatttttctttcaattttttggatgaattgtgcaatgaaaaccgaataaagaacgtgaaatgttaaaaaagatttttaaaaagtagagagaaaaattgtatttatggatttgggacgagtgtaaatgtctcatacgctctttattcatagtatttatgtataacgactgtgatttgggacgagtataaatgtctcgcactcacttcattactatcatgcatgacaactcaccggaactaaccggtacgtgatcatgatttgtcctgcatgatagcatctatcggagccggatcatggacatcacttctcagaaccttccagcaatcggaccaatttgtccgatcatcagaaaccaactagacaattaatggatcatagtattctatgaagggacgtctgcattggaaacatgcataacatattcttccaacgaaaacgttgtccactaaattaaagaccaaacgaattgcatgagacagtctgtacgttttaaaagtaagccatattcgtcagcccaaatccttggaaatcttgtgtttcttgtacaactagtacttgatttcattatgtcaagtaaaatagttttaattatgatttgatttaaatagacttggcctcaaaaccaaatttgacgacaaaaaaaaaaaaaaaaaaaacagagctctatccatattgatcgctctttcaaaagtctgtttctttcgtcggacattttaaaatcgctaatgattgatgatagacttattttagtttcaatttggagttaaaacccaatgtcaatatatgtgtataatttatagaaaaccttgtttacgactaattaagctctgtacttgagagtcaattgcacaagtaaccaaaatcgtttccctcgggagaactggacaaaggaaacacgacaatattacatggtttaaaggtcttccattaccagaaaaggaaaagaagcaggcagcgatggaagagtgattagagtaacgctccagagtcaaaatgaacatttgcttattaggagacagataaaaacttgactttctcatttcaacggacacactttctcaaaagcttcttgctctttccgacacaactcaaactcgttggtgtagtaatacatgcatccaacgtaagcatccatctcctttgggcatctctggtgaagatccttcagcctgcaatatcaatcatttcaccagttttaagaacaatctaagtcaccaactgcaaactactcaacttcagattgttatggacaatgcatcatcctccgcaaagttagtgaactctcaagatatccatcactatatcactaactacacaagagtcaaacaactgcttcctagatactaaacaaatggctagttgtatagggcttttgggttcagttttcaatctacggaaataaaggctcctacaaacacaagtgtgccatgaattactttcaaataggccaaatatttgatcatgatccataatatacaaagattactcaagttctagaaatgttcataactcgatgaacttagcttagtgtatgttcatggtcttaaaaaaatacactgtaatccacatcaaaaaaagtctaaagattcttcatttcttaaactatatgatcaaacccctaattctacaatgtgacattatcctcaatcttcatcaagttttaacagaaagagcccaaaaattgttatatgactaagatcagctaaattaagaacttgtagagaaattgaaacgagaatgaagtagaagaaacgtacaggccaagaacacagcgagtgacgtcacgtcccttctcgaggcatttctctgggttaggatcattcttcttacatttcaggaacgccatgttttccggcatacacctgattcctatatgcttcgccgaagctgttaaaaccgccgacgtagggatcggattccccgttccgtccaccgccgcattcgcctccatagctcaagattttttccaaatccctaaaatcttatatgatccaatccgatcgggaatctgaaaaatcaattgaatccatcagaaatttgagaaaataagtttcgaaatctaaatgaaaatttgcaaacattatctctcaccttttctgcagatgactcgagtcttcttctccactgagagaactaaaagcgatgatgaagaacaacaacaaaagcaaattggctctcgacaattaaacgctgcgttttgatgatgtcgctttgctgggctgatattgggctcaacttaatagcccatttggtttgattcaaaacccgatttctcattgtagggtttatcacccgtcatcttcgtcggcgaaatcaattttcggactccgtcgaattcgaattttcaggtacgctaatcattctagcttcttggattttgactcatttcttgctaatttttcatttctttgcttgtatcgtgttcgtcttgttgtagtttgttctcgaactgagatttctttgctggattctaggttttagatctgttttccgcttgattttcgaatctctaggttcatagatttcaaagaaaagtcattgtcccatatgatttagaaacaaatccatttctaaagtttgtgcattttcgaattatagctataaaaaaatggaaactttatacgttttgtgacctctgtttcatcagttcggaggattttagttatctgtaatgaaaagaatggtaatgtaatgtgatgtcattcttgataaagaaatgggagacaagaggaagaagacgttcatgttcatccgtctagtttcagcagctggaactggattcttctatgtcaagaggaagagtaccaagggacttcttgagaagctcgagttccgtaagtacgatcctcgagttaatcgccatgtcctctttacagagcagaaaatgaagtgataagacaaaagaagcttgcttttgcctgttatggctatcatagatcaaataaacgtttcaatttagagttctatcgaaactctttgtaggattctctaaaacttaagtgcagattgattgtattgtgatcaatttcgacacccttgttgatttccaaatgaatgtactgtgagtgttaaatcgaattactcatgcgttcatctaatctaggtacttgaaaactgatcacaagttagattgatcagcaagcgatatgtagcgagcacgatagatactataagtttcttacccgacgagctaaccactcttatggtttgcctaaaagaagaaccaaacaaaagcctaacaattggagatctttgtctttttctacaaaacttaaccatctctcaattgtttggtcttcccaaggaaagctaaaaattggctttaattagatagcctagatcgacccaccatatttatgtaaagcatgactttgagtagagatgagtaagccaaatctttgatatcaaatcgaatttttattccatttaagaagattcaatgaacacacacttctcttgggttggtagttatatgatgatgtttttgacatatgatactttgaccagtgtctactttcccattgtgtttggtaattgatagtgataggagtgggacacgatgctccatcctacgaggttcgaccatactaatcgttgaactaatttacttgtcaaacacattaatttcagtgtagaatgactaaacacaaatggaaagttataaatttccattatcttttgctttaacgatggagacaaacttgtcttgttacagcttacatgttgcagaagaaacatagaatccaacatgagctataagttctccggagcaccgtgtggattctattacgatgacgatgattgtcgagtgttcgagacaagctcttttgggagatgtgcatcgcatttcactgcattcaaacttgtttattactatatataggtacatacaaatataaaatatattgcgataacaacaaactgttagaatacgcgctgcataaacaaacggctactaaattttcatataagaaaacatagatagatgttatatgcgatgttgatttataaatcatgtcctatgaattggttcgtgtagaactacaaatttgattaagcaaaagttgtaattttgtttaagagattctacagggtttgccaaatgttgtattaacaaatgttttagtgctctttaaataaatgcgtttaaaaaaggtttgtacaaaacatcatatatgtatgtttgaatatttgagataaatgtacacaacaactatataaacaaaacccacttaattaacatatcattaactctcttttttttcataaaacatatcattaacttaataccatatataaatctacacaacccaccaaagtgcattatgggtttctttggaatggtataatcatagcaccctggtggtctattacgtgggagataagacgagtagttagtttatacaagaaattctggtcatgaattaaaaactcgattatttgtttagtagatagataaagccgcttataaagttcatcaacctaaatttaaagttttttttttcaaaagtagctttttctttctttctcactttcaagtattttggaaaggtgagcttcctttaaatttcttctttttttgttgttggtaaaactatacatagaaaatcacataatatagttagaaagaaaaaacagtagttaatttaaatgcgtaagaagtaagggataatgatatgtttcctggaaagtgacggcaatcgacaagaacatgagggtctgaaactcgtaacgttgaattttcatcgtcatcaaatcatcatcgaaaatcaacgacaagaatatgattcgtatttttcctttgtcgattttttttgttaattagtagataatggaaaattaaagaatcttattaataaatgaagacagaagtaaagaccagtaataaaagagtagagtgacaacaacatacgtatatttaattattgatataagtggataaaaaaaagtaacaatgtcattgtcagtcgtggattcagcttaaatttaatgaatataaaccacaactatttcttcattactagatttatagatttgattctttctctctcagaatttttgtcgaccgaatttcatattcatatatagttttattaaataatctggttagatgaagatgcaagattcggcagctcaagaaccggaaattgctataatcgtgggagattcttcttcttcttctcttcattcttcttctcaggtacatacatacatcttccaaattctgacctttttttttgtctcctaattcgctttttccggggttgttgatagattatacaaggtaaatctgaaatctttacatcattagcatgtgtctgatctttatattatagcataatctctataaaacgtatatggggtttctcttgttaatttctcagttttttttgtttctctcttctgtctgattgatataaggtttgattatccatgaaattacctgtgaaaattctagggtttatattgattgatatacgttatcttttggctcttttctcttcctttatccatatggaatctggattttgatcaaacctgaatcacttagtagccataggatctgcttttcatttttcttttattaagagaacaaactaagccacttggaattgttttagacttataattatgatttcatctcaaggattaatggcaatgtaaagttgaaggatttgttttcatgtgagaaattggttttagcatttttcgttttgttgttagtgtgttatggtggatatgagattggcctgaactttgtttgacatgtattatactttattgggtgatcatcaggtaacagaaaaatctactgaagatgtgccgagctgctctcacttggatctttcaatacaaataccttccagatcacttccattcggtaacggccgtaacccaaagggttcattgaagtccactccttcattcaaaagtggcactacatcctcaccaagaggaatcttgcggaatttaagcttgaaaaagaaagttatttctcaacccgaaagcgagagaagctccttactatctcctggtctcatggaaaccgctaaaaagcctaatgctactggttccacaacttctccatattggaaaagatgcttatcgcttcctagtagacaagctgcaaaactgtctcctgtggtttctacacaactttcagctggggtgcctggtgacccgcctaatgtgagttatttctttcttacaatatagtccttccttgctcaatatatacaagtaaagatttaatctttgttgcagaaagattattcaaggtccttgtccatgcccggaagaaacaaagttattgtgcgatccatatcttttgacaaccacaaagcccgtgtttccagtgaaacaagtgcaggtacatgacatcatacatgtttctaatacatgttagtatctctgtttcctgtctttcttatgtttattggttcctccatctttagatcaagtctcttccgttcctcctgaagaaactgatgaagaaattcccgaagaagaagccgtgtgcaggatctgtctggacgtgtgcgaagaaggaaatactttgaaaatggaatgcagctgcaaaggtgatctcagacttgttcatgaagcttgtgcaatgaaatggtttagtacaaagggaacaagaacctgtgacgtctgtagacaagtagtacagaacttaccagttacattggttcgtgtgcccacacctaatcaacaaaacaacagacgtggtagcagtcaacagaatatgccgtcacaaaccgttaggtaactttaaagattcttctttctttcatcattcatggaaataatacaactgatcactgaatggtttggcgcagtgcttggcaagagtttgtggtgctagttctaatcagcacagtctgctacttcttcttcctcgagcaattactggtagccactgatacaaaatatgtattttggttgatactttgttgcaaaaggcattgacaaatgtttttttggtagattcgtgacttgaacaaacaagctatttacatcgcagcaccattttcacttacgttaggcctcttagcatccatttttgccattgttctcggtatacagaaccactctccctcataaactctaagtgcctctctttcctttgtttgccaacaaaatttgaaaacgtttttttgctataatctgactctgcagctatcagagaatacatatggacatacgcagcactcgagtttgcgcttgtgggcatgttggttcatatattctatgctacagtaagcaatactctctcacttattcgggtttcctcattccattactgataaagggaaaccaatacattttcccaatctctctatttcaggttagactatcggcgacctattctatactctttgcagggattcttggttttgggatagccgtgtgcctaaactcgttgtaccttcattatttcgcttggcgtgtacgcgttgcacaaaattcaagtcctgtatgaaatctgttttcctttgtttctcgttcttcctttgtgtatgtattatgaaagaagaagttgttagtgaagagattcatcagcttcagcagtttcctgtaaaatgtaaatatgtacactcttcctcgaaaatgttgctgaagttttgttttgtacccacccctacgtgtttttccggagcacgatgatgatttgtgaaagagaagacatttgtgtagtaatgtatgtgatctactttctgttttgttttacaacggccacttggtgtctctggtgactggtgagattggaaaaaaaaaaaaaaaacaggtgtagttacttaaaatggggcattccgagaatcgaactcgggacctctcgcacccaaagcgagaatcataccactagaccaaatgcccttatgaagttcataacaagaatattaaaattacgcatccatttttatgaatgtaaccaaaaacaccaaagaatctgttatttgcgttatcgacctgagctttaacagaaatcgaaactgatgctatattacaacttacaagtgaacaatggatagtacaagtagaatatggccaaaaagggttttcaccacttgtttcaacagtttcttactctagcaacaatgaagtatttagacaaatactggttaagtttcaagtctgagagaacctaaaacaaaaacagaaacgtaagagctagacatataacaaaaaaaattcccaccagaatcatgactcgagtatgtcacaagacaacagcgaggtatcgggcttaaacgatgcctctgaggagctttggtttctcttgtctgtaaacctgtacgcctgaacaaaataaaacgagctccaagaatttcgcgttgagcaattcatggtcacaaaagagcctctgactgagataatatcaagaggcagatcctgaaggtggagactggcggtctcggtcttgagcagcttcttctcctgatagattttgagagacggaggctggcaaagcagctgggtcaagctcataccaacccttggttatgcctcttccttctgttcctgttaatctgaatgacggaatgctatgtgagaatctacagaattcatgaggtggaatctcacaagtgtttgactcatccttcggcatcggacagaaaacacagttaaagccttgcactttagacaagaacccaactgataccgtggctccctctgcatggtcagacaggatctcaacaaattcatactcgtacttcataggagaaactgagtcagcggagcagttgatgtcccagttcttgaaaagggcccatatttctcctttctttgggaaaacagtaaacttgcgagtcctgatttttgttgtgctgtagacaaaatgagagaaaatggaacacaaattcgtctcctcaatattcccaactacaaacttaccaacagagacgggcaaatttggtgtttcattctcttgatcttggtctacctcgaaccagacgtacctaagcatgaaatccggagttgtaactttttttatgagagcataaaatctaggcattccctcttcttcatcatacacagcccagatctggccagcttgaaaacagcttttctccctcaacttatcgaagtcattgaaatcaggatcatcatagttgatcaaatttggtttttctgcactccctgaacttaaatcttcctctgaatcactcgcaccagaaggggtttccacctgatcaacttctatcttcccattcatgtctatgctttcagtggagctatgattctcatttgtctgcttttcttcctctgtttctttttccctttcagtatcaatgtttttcccggacccttccccattgtcgttgactaagtcgacatcatcatcgctcaaattctcattataggaaaccttctgcttgctacggactgacctccgaggctgctctcctccattggaccctgaatcttgtgctgccgtagtatcattatttacatcatcttctgactcactgctactttcactgtcagagctttcactacattcagccacattcttcctcttcctcttcccattgtgttttgcagtagaacccggcatagggaaactcgccttgctagaggaaacagtgggaggattttctggacgcttgtgtggttcactgcaagccctttggtctgggaatttgctctgctgtgggaagcaataagtagtctgagatgggcctttcgcctgtggtgcactctgcaaaggttcttcaaaagcagtgaaacgttttttacaagtctcacaagtgacttccttgttgacatgtgcccgatcatattcatacctcacccggcagaagacacaagaggtcccaaaggttttaaggtgagtgaaagcagctggttgggcttgagctttctggaaaggatgcctgatttcgggtctcaactcagtgaagatgtttctcgtattgacgcttgcccgaaaatgaggttgtgtgtgataattcggcatctgttgggctttatatggcggtgctgcaggctttctccaagttttgcgtttattgtcatgaagcgtccttttctctctgtccaaaagaatcctctgggcttcaccaatcaatttaaaagcagattcagcaccggggagcttatttttgtcagggtggagaagaagcgcaagcctcttgtactgtttcttgatgataacatcattagcgatctgctcaacctgaagaataccataccaatccatctcagttccaaacaacttctccgttgcagcacagtgaacatcacaaaccattatcatacgagatatgttctccaggctggaatccattttttgagccttcattgcaagcttacgagcagcagtaaaatcggtctttttcatcaaaccctccgcaagatctttggctctaagagcctcatctctgttgatactcattatcaatccagtacaagtatcatagaacccccaacccagagaaagtagtaaaaatgaccttgtccaattccacttttgctctgatcctgctacagaaagaaataaaacttgtgtcagtgtggtacaactttaacttgaaggatcattgctaaggcaaaacgtggatgcaatatcaataaatatgattctacactcgcaatatagaaagaaaaaaaacatgttaaaaaggtataacctttggagattaattagaacaaatgttccttttatgacataccaggactgaggaaacaaaattgaaaatttggaaaaccaaaaaccctagaaatgtgtctacgttctctgcaaatacccattttggtcggaagtaattaaagcaaatgagaaagaaacctaaaagtaaggagctcaacaaaacaaaacagttgaagaactcatcggagaatcgagaattcgaacagcagagacaaaaccggcggcgaattgtggagcggataaaacagaggagggtggattctccaaattaaaacctttatacgatcagaggaataattatgaaataggaggtaactcaattggagagtgagagaaattacagaaactcaccggagaggaatgaatccgactaaagttcacgacgcctgtaatgtgaaactaaatgccatctaatttcttcttttgatgattttagtaaatttaatcaactttggggttaattagaaaagatgacgtattttaaagtaattgcatatcaaaccttcaattttagttagaattaagactcctccgtatgacgcagagtattctaaacgaatcatcatcaaatcaaattcaagttgggaaagaaaaaatcaaaatggaaagtgaagtacaaagaaacgaagcccatgtgatgtgaatgtggatagagagagagcaataaacgctatggttgagaatcagttctgaatcattttttaattctttgctggttgagattttgaatcaatcaataatggaaacatgaaactgaaagaaaaaaaagaagaaaaaagcttactttggtgagagaagacgaggagacggtggagagaaatgtgagctgcccgcgaaaataagacagagaaaactgaaccgaaagttcttttgtgagattttataatccattttcaatttggcgggttaaactgtaattcctatatttgctctatttgctttggcgggaatcaaataattcgttcgtgcgaaattaataaatctcgaaatccgatgcgttttctttcggttttctaataatatcaaattacgaaatttacgaaattttcaattttgagtttcaaatcaagctttcattacagaagaacagtatttagaacaccgagtcatagttggtgtagttcttttttgggtgtgttggcaaaatagtcactttttcaaacttaattaggaaagtagtgactttactattcataatttgcaaagtagtcatttttcacggtttgattcgtacacttggattgtacatcacttttagtgtgcaaatgtaaagtgtacgctgtgtattttttatatacatctgtacactaaaaatagtgtacaaactaagtgtacgaatcaaacagtgaaaaatgactattttacaaattatgaatagtaaagtgactacttttccaattaagttttaaaaagtgactagtatgcaacttaacccttcttttttatagtagactcatcaaatcaaagaaacttaaaaaagattaatgttaggcttaatagtttatacatatatataaatacaaagagagaaccagtcattcggcttatggcctcaaaaaaggacattctcggaacatacaaatggcaatctaaagctttattgaatcgacgacttttcatggaagtacacacacacacacttaagctatgtctcagtactttgacattatttgccagtagagttcctttggagctgcacaacaaagggaccaccattaagtaggcttcttttgtttaaattttaatacaacacatggttttgttccagtattagtgtcacttaccgggtaaaccggtgaagatctcaaactgctcgtaagcctgcctgacaaacatctctgaccctgagacagttatggctccactttcttctgcttccctcaacagtctggtgattctcggagtgtataccgcatcaaagaccagtgcatagtgcttcaatgcatcctgggggaaacaaagacaagctagcttactaatttgtcttatagatttaagatttcaacaaagtttgcatgcgataagctggcttttggtatttcaataacagaaaaaggatagaacagttccttcgttacctatagaaaacaaaaggatgagctgttacaaggagagcttaccttagaaattggagtctcctcaacatttggttgcatacccatagatgttgtgtttgccaaaaccatgccatcttctgggtgatagttatctaaatctgtcagagataacgctttgcctcctattgcttctgcgagttctagtgctcgttctttagaaacacaacatcaggaacaaaacaaatcatatcatcagttactacatctaacattataaccaataaaagacgaggagaagaagagtattgtcaaggtcgagcatgaccggtaatagaataatctaaggtgttcacaaagcgaaatttccaattaaggacatgtattttaccgtaagttcgattagcaattacaactttggcccccttttcttttgcaccataagcaagagccttgcctgctccaccagcaccaataaccaccactgttttactggccaatggcgaagaagaagaaggtacactgcttggatcacctgaacctgaaaaaacaaacagaggagaaggctccatgactaaaaccgaaacttctccaaatggagcaaaaagctgtgaacatagacttacttcgtaggccatcctcaatagcagaaatggaaccaatacaatctgtgttgtaacccaacaactttccgtcactttttctccttagtatagtgttcacagctcctatagactgtatgatattaaaagtaaacattcaggttgaagcaggatggctatttatgctatctgatagtgattggggttgcgaacaaaattatctgctgtttttagcaaatcagacctttgccaatggatcaacttcatcacaacattgcaatgcagcttctttgtgcggaattgtacagctgcaggtaaaaaagatttacatcattcaccccaaatttttctatgcctagcaaaccttaacaaataaaaataaaatctgtatgattctgttcactactctagagaaaaaacaatttttgtcaccgttatagcatacctgaatccagcgaaatcagaggatgagtatgcttgaagaaagcttacaagattatcaactaacaggtggacatatactccattaaaatcaactgatttgaaagcttgattgtgaacaataggtgatttgctgtggctgacaggcttgccaataattccatatacctttgtgtcaggaccaattcttctaaagttgtaaagatccaacagatccttgatcgttggttgacctggcgcagaaactttactagaatctaaggtgccaaaggtcaaataaccaccaaatttcgaacaaagaatccgagacatcaaacctctttcacccataacaagtccaattgtgggaacctgaaatttgagtgaaaagttcagacgatgacaacatgaaatcacaatcagaaatcagcacacaattgatttaactgcatgctagtacgcacttacttgagcttttgaggttatatggaacatgcgagcaacatctgcaatgtccacagcagtagtagcaatcttaacaatgtcggctccagtctgttgtattcttgcaacaaggccatcaaggtcctcaacagaaggggtattctgatagttgtgcgatgaaacaattactttgaactttccaggcttctttccgtcaatagatttgatgaactcacttgccaccttaacatacaaatataaagtaggagaaactaattagcatcaaaaacatcttctaaaatatccaaaatatattacgatggtcacctgaagttcaacatcaatataatcagctcccaactccatggccagacgaagcacatcccgtctctcattttcatcaccttcatactgaccaccttcccattttggtctaaagagcagacattatacaaaaaacaacattactcatactgcagcccaataagtagctcgtaacttattgaaagctcgacacaataaagcacaagaagttcgatatcaaacatttaaaaagtctcaagcttgaacacacaaacctgtaggtgaataaagtgggtagaggagatttcttaataatggtttttagatcctcaagaggattgaagtcctttagccaatctaatcgaatttcaaccaagtctgcacccaattcatgggctttactcgtttcaatcaccatcttgtctattgaatccgccatcactggagcacagatcaagctcggattcttcacgatatcatgacttccgatctccatttccgtggaatttgaagccacctgagatcacaaaacaggataaattccacaatcaattaaaaatccaactacttctcagaact

SEQ ID NO: 1273 - DNA, 86022 bp, Arabidopsis thaliana
gaattcgaatttgtgattttgcggaactttgaattgatatttgtgttggttgattgtctaagtgttgttggttcttattagatttttttggatattgtagatttaatgtaaagttggtgtgagattattatttcaagcttcttttaattcaaaggcttttaaagctaatgctacagtgaaattgaatgcttagaagattgtttggaacgaaaacagattttggcatttttgtggatgatgtgttatgttgaaacgttgtctcattttcatgttgtattgtaggtgcgggattggtatttggaatctttcagggacatgagagcatttcctgagattaaggattcgggtgacgagaaagatttcactcagatgattaaggctgtcaaagtaaggcataacaatgtggttcccatgatggctttgggtgttaatcagctcaagaaaggaatgaattctggaaatcttgatgagattcatcagtttcttgatcgtttctacttgtcgcgaatcgggatccggatgcttattggtaagacttgtttctatttttttttcaatctcttttccctgactgaaaagtttttgtttgctgatgttgttgtgttaatacttgttgtggttactatggaattctcagggcagcacgttgagttgcataatccaaatccaccgcttcatacagtgggttatatacacacaaagatgtctcctatggaggtagcaaggaatgcaagtgaagatgctcggtcaatttgtttccgagagtacggttctgcaccggaaataaacatatatggcgatcccagtttcacctttccgtgagtttcaagttgactgcattttttatttcttagattcagtttgtagcttttgttctcatgtggttaccaatatctttttcttctactcctgtaggtatgttccaacgcatttgcatcttatgatgtatgagctagtcaagaactctctacgtgctgtccaagagcgatttgttgactctgatagagttgcaccaccaatccgcattatagttgctgatggaatcgaagatgttactataaaggttggttaccctgcactttttttctcctttttgctagccatttcgttctttgttgcatcggtttgatccaatcattgttgtgagttaatataacaggtctcagatgaaggtggaggtatagcaagaagcggtcttcccagaatattcacctatctttacagcactgcaagaaacccgcttgaggaggatgtcgatttaggaatagctgatgttcccgtgactatggctggatatggttatggtcttccaattagtcgcttgtatgctcgatatttcggtggagatttgcagatcatatccatggaaggatatggtgagtcaactacttcttcttccgtttcatattttcagatcaatagacataaaagtctcttaacctgaaatatctcaatcagcattcataagacagattcagttttgattaatgtgtattgttgaaatgtgcagggactgatgcatacttgcacttgtctcgccttggagattcgcaagagcctttaccctgagaacatctctatgtcaggcaaagtaaagaaagctttgacatgtatttatggtagatgagggatatctacaatactcaattatttatgcttttccagtttcttctaatgtacagactacagacattattttctcgtattacgctttcttgattttagactcagatatggagctttttccaagtgagttaatctcctatgatttgttttgattcgatccaaaaccaccttgtatccgaaagtcagcaaaacattattggtttatattcgataaaacagctacaagaaggtcctggatttggatcggttactttaaatattcttcactggttcaattttttccaagatttctgaagaacaaataagagatcaacacgacggcgtttgtgacgttgacgattttataacagccaaacgtcatcgtttctggatttatacataacgacgtcgcgtggtttctcttttttttttttttttttttttttgtcagagtttcctccttgtctttcgtgaacccccagcctcacttcttcttccaaaagccgaacccagaccctgttctctagttcccatcgacgttcttgatcctctctggttcgcacccgtgtttttaatcaattctggttcgcataggtgactccggtactgtttcttcgtcgatgtaagtcttttctttgtctcttgtagctcaaaccctaaatcgttgcatccttttgtgttatgatgctcaactatgacttctgcaaaaccatcttcggatttcttcaccttaaatccatggctcagttcccttattcgtttgatttctgtatagttactctaatttgtgattgagattgtatttgttggatttctcggcatggttgtgttatggtctcgtggaactgtacgcgtgagcttagcttgattatatcgttgatgaatcatgtggcattaattctttgatattgtgaaagcttaggtcgaattatgtagaatcaggtctctggaagatgatacctgtatgtcaaagtttttgtatggtaacatgagagagttttctcttcttgcagagccttttcctatggccacaacagaagatactccagcttctgctggtccaagatatgctccagaggacccaactcttccccaaccatggaagggacttattgatggaagcacaggaattctctattactggaatcctgaaaccaatgtcactcagtatgaaagaccttctgcgcctcctccccactctgccacaacaccgaagctagctcagattcctgtaccctcttcaggacaaggtcaccaagctcagcatgaacaagcaaaaccagttggtcatgtgtctcagcagcatggtttccaacaacagccacagcaatttccatcccaacatgtaagaccccaaatgatgcagcagcatccggcccagcaaatgcctcaacaatcaggtcaacagtttccccaacaacagagccaatcgatggtgccgcacccacatgggcatccttctgtacagacttatcagccaacgacgcagcagcagcagcaagggatgcagaatcagcattcacaaatgcctcagcagctgagccatcagtatgctcattcacaacaacattacatgggttttcggcctcacatgcaaacgcaaggacttcaaaattcacatcagacacctcagggtggtccccatggtcagcagtttccgagccagcaagagtacaactcattggctccgaagagggagggggatgagttccatgggggtaagaaaactgggttttctcaaccccatttaccaaattctgaacgttcaccatctcaaaatacccactttgaagccaatgcagcatcacaaaagacgaatgcaaacttggctatggctcagaaatgcaatggacctcaagcaaatgctgcagtcacacagtttcaacagccaggggcgaacctaattcaccagcaacttggacctagggcgccaaatcaaatggaccagacaatgttgcaccagaagtctcacgtttcccctttccaatcaaataatacttatgagaataatctacaatctaggcctggtaatgactcgtacgttaacatgagaatggaagtgccggttaggggtgcccaaccacttcatcctgcagcaatgcctaaggttagctgcagatgatctcttctcctatctgtcttgttaaatatttctgcctcactgttatttcttacgaaaaataagtatttaataaaatgctatgcaggatataaggataagtggtggtccaccaacaaatgctgatcccgccatggggcaaacagggcatggaacatatggacacgctggtccagcttttccaaataaatccttggtgcggcctcattttgtcacatctcctgatgttccccatctctctcccgttgaaatataccgaaaacaacatgaagtcacaacaactgtaagttcatatttcttgaattcctttgcttaacttgtcagtttaatgttttaaagctataatgtgctgtaatattttgcaattgttgtttcagtgaatgtttgtccataaaactctactgagaatgtgggattggacgaacttcaactggaataagtaatagcattttagaatagtgttaaaccttgcactttctcatgtattctaatctgtttacggcctttaataattaatcgtttgttgcgcagggcgagaacattccagcaccatacatcacatttgaatctagtggtctcccacctgaaatccttagagaggtcagttttataatgaactttatcagtggcgtaggttcttcacatatatggtgtgctaatgtttttgtctttgtttttcagttgctttctgctggatttccatcgccaacaccgatccaggcccaaacatggccaattgctctgcaaagcagggatatagttgcaattgcaaaaactggttctggtaaaacattgggatacttgatccctgccttcattcttctaaggcactgtcgtaacgactcccgcaatggccccacagttttgatcctagctcctactcgggagctagccacacaaatacaagacgaagcactaaggtttggacggtcttccaggatatcatgcactgtaagtttaatttgagtctcgttgacagttatcgctaggctgatagagccatactgtgtttttgtttacgaatctatgttctggtcatcagtgtttgtatggtggagctccaaagggtcctcaattgaaagagttggaacgaggagctgatattgtggtggcaactcctgggcgtctaaatgatatactggagatgaagatgattgatttccagcaggtttcccttcttgtgcttgacgaggcagaccgaatgcttgacatgggttttgaaccccaaatccgtaagattgtgaatgaaatacctcctcggagacagactcttatgtacacagccacttggccaaaagaagtaagaaaaattgcaagcgatcttcttgtgaaccctgtccaagttaacataggcagggtagatgagttggctgctaacaaagcaataacgcaggtgatgatcatctaaaccattttatatcactgtaaagcaatacttacacataacttggtgatgaggttactgaagcaaacccatccttataacgcagtatgttgaagtagtcccacaaatggagaaagagagacgtttggagcaaatccttaggtcacaagaacgaggttcaaaagttataatattttgctccacgaagaggctttgtgaccatcttgcacgtagtgtcggacgtcattttggcgctgttgtgatccatggagacaagactcaaggtgagagagattgggtgcttaaccagttccgaagcgggaagtcttgtgtactgatagctactgacgttgctgcccggggactcgacataaaagacatacggtttgttgtaataattcctggtatatatctctttgcttgtttgttatcaagattacttacctttgttcgtgtttatactacttcagagttgtgatcaactacgattttccaactggagttgaagactatgtccaccgtattgggagaaccggtcgagctggtgcaactggagttgcattcactttctttacagagcaagattggaaatacgcacctgatttgatcaaagtcctggaaggagcgaaccagcaagtaccgcctcaagtaagagatattgcaatgcgtggtggtggtggtggtggtcccggttatagccaggatcgaagaggtatggttaaccggtttgactctggcggtggtggtacccgttgggattctggtggtgggtttggtgggcgtggtggtgggtttagtggccgtgagggtgggtttggaggccgtgagggtggatttgggggccgtgagggtggatttggaggccgtgggggaagatttggaatgagagatgactcatttggacgtggcgggaatcgtggtcggggttttactggtcctgatgctggtcatatgaatgtgggtggtagaggcggatttggtcggtttggcaataataataatatggagagccgaggctttggtcgtggtagtggtagaggctttggtcgtggtgttggacggtttgacaacagaagaggtagaagtcgcagcagaagtcctgatttggttcggccacggcgccgtagctcgagctatagccggagtcgaagccggagcgggagctatagtcgtagccgtagccgtagcaggagctggtcacgttcaaggagtcgcagccctagacatagccgtgaccgaggtggtcataacaggagcagaagctatagccgtagtcctagtccggtttatgaaagacgagatagagcgccacgtgtttctgggtttgatattaaaccaccagttgaatctgtagtgaacctggacatgaatgccgcggcagcgattgaaaacgtggttcctacatccttgtctgagagacaagggaatggggttgttgaatcggaggtagaagcggctttagtacgaccagtggttgatgaagaaccctaaaaccaaatcatagaatgatataaatcctcactacggagatatcacaagctcaccccaaattttttgggtattgaatggattcaccaaatcagacagctgacacgtcttctcagatttgttggctgaggtttctttattttcatttttttatttttttctcatgttcttgttgtatcatggagaattagtttgtaatgtatttgagaatttttatcgtttatgtaaacgccttctattgccttcagaaaaatctagactagcatcaaaggaagaacttgggaaaaactgtaattctagtcttctagatagacagatacagcatttagagatgataaatttacaatgttcttggaatggtgaacgatgtttaaattcaattcttgcttacatcattgcatgaattctttagattgaacgtacttttcagtcaaagaattagagatgatgagtccatgtcatgacttttgtgatattttgatattttctgtcatcttatattcatacaagtacaaaagtatctcaacatttgcaagtacaacacagacaaaaatttcaaaataaacaacaattcaagacaattaatccttttgtgtggaaactaatcaacaattcaagacacaatgagaggttttacttattgtccaagaaaccaatctaatcgctttttttgccatcctctctcgttggcttcttgacataattctttgaatggaagttggaaaagagagccaaaagagaagcattaaatgcagcgttgaaacaccatccccaaatcccggtgcaacccgacccgaataagtgctctcggagcatccaaccggataacccgaaactgaaaacaaactgaacaatctgacaatccgtcaccaatctcttccacttgggcctcgatccaacggcgcagaggaagtagtaaccgtacatgatgacgtgtaccgtcgaattcgtcacgagcgcaatcggaaacatcgattggcgagttcggagccagagataacacatgaccacaaccgtcgcgtggtggtacacgtggaggaaggatagccgttggattgatttgccgagtatgatgaggatcgtgtctccgaactcgaggatcttcgagaggtagaagacttgagcccagaagaaaagcggtccgttaggtttaacgtcgacgggaaagcaaatcgcgtgaaggaaacgcgccatcggatctgaagacgcgtgagatgaggttattgagagagtgcaaccgacggccatgactaaggagaggagacagaggattaggctgtggacggctgtgatcggtttgaggatacgtggactgagtgatgggagtgaatcgatggcggatcggaggaggaacgtggcggagaggtaaacggagactacgacggatacgaaaaagacggtggagcctagggtttcaccttcgatccaagtaaaattggagatgtaggggtggttaacgagccagtaggttaaagaggagtaaattgatgccatagcctccggtgaatcgccgacgaagtttggggagttgacgtttgaagatatggtttagcgagagatgaaggatcaaaggcttacccaattggctaattttcatgaaagtgggtcccagaggatcttgtttttatcttttttaagtatagtatcgtataatattatatttagatgatatgctactgttgttgttatttgttgaattgggccacgccgccgtagcccgtagttctagcccggtttatgaggactacgagataggcccattgtagcagcggcggctcttaaaaaccgtggtcactctctcctccattatcataaagagagggtttggtacgaccagtggttgatgaaccaacactggtaggcataaaaaatattatagaactaatctcagtgtccaatcctttaaagaaacgttggttggcaaatgttgtatagaaagatgtatgcaataagaagaatcagacgatcatgatgattttatgtgacatttttatatattttgtcatcttattcgttaatatataaaacaatttcaaaccatgcatcccaacattttacagtaacaactaacaacacacatcaacatatccaaactagatatatatataataatcatgacaatttaatcgtttttcttggaaaataatgtaatcgctttatttgcccacctctctccgtgaataaatataaaggattcgatcttatacaaaggcgacgttgtagtcttctcatagttcttggagtggaagttgtagaagagagccaatagagaagcagtaaacacaccattgaaataaactgtccaaatcccggcgcaacccgacccgaaataatgctctgggagcatccaagcggctcctaaccccatgccgaaagcaaactgaaccatttgaaaattcgtcaccaacttcttccacttgggcctcgatccgatagcgcagaggaaatagtacccgtacataatcacatggaccgtcgagttcaacacgagcccaacaggaaacatcgattgacgtgttcgtaaccagaggtagcacaaaatcacaaccgttgcgtggtggtagacgtggaggaacgagagccgttggattgatttgttgagtatgatgagaagtgtgtctacgaactcaaggatcttcgagaggtaaaagacttgagcccaaaagaaaagcggtcccttaggtttcacgtcgagggggaaacaaacggcgtcgaagagacgcgccttcgggtccgaggaagagattagggagagagtgcaaccaacggccatggttaaggagaggaggaagagaatgaggctgtgaacggctgtgattggtttgagaatgcggggaccgagtgtggggagtgaatcgacggtgtatcggaggaggaatgtggcggagaggtaaagggagacgacgacaaagacaaagaaaacggtggagcctagtgtttcaccttcggtccacgtgaagttggcaatgtaggggtggtggacgagccagtaggttagggtggagtaaacagatgccattattctctagcgaagttagtttggaggagttgaagtttgatatggcttatatacacatactaatggagtaaacggatggtggcgttgcgtcttcttatttgttttggaacatgaagtacaacggtgccattgcgtcatgaatactctaagtcacgcaactgctccggtttcccggcactgatatgggagagagacgatggggtcatcagaggcttaccaatttgaataacgtgggaaggtaatatcgtaatgaatgcatcatcaatatttttttatcatgcataagcataacgtgggaaggtaatatcgtaaaatctagttatcaatgtgatgatgattaatgctaatggtgttttaaaaggagaaaaacttgtctttaataagaggaagtttaggcttggtgactgaaaattgtcgttttttcaaataaggctataggtttttaaaacatttgggcttagaacccatttcggtagggacttaaccaaagataactgaaacatttgaactcctaggccttgtcatctaacacacatttcttatttacataatggcttgtatgatttgaactacaagccaaaaaacttcaaaagggtgtaatctttttgaagatggatgttggtcttcatttcttggccagtaatttcttcgggagcttatcgaggggcgttgatttaagtaaaaatagcctcgcagctcgctctcgcaatgtccctctgcatttcagaccgcgtgactgaagctcagtcttcaatctctccatccccaaaacctccatatctgtggctgctttgaactcagcaaagttaagcggttcaacaggtttgcaacacactctttctttcgcagttcctcctctctttacgacaaaatcatcgtttccacttgatttctccaccttttcaagttgatccattgcatcagcaacagcaaaatcatccatcttctcttcgttaattctttgaacaaccgtgatctctcccttaactacatctgaactttggtgcactacaaagtcgttctcaccatcatgggatccatccaaaacagagcctgagctttcatcagtatccttatgatctgaatcaacttgaccaccaacaacagatttctcatcttcctcgtcactgctatcatcactgtcactatcttcaacagctctctttccattccatattttgattcgtttcgatttttcagattctgcagtacccatcttcttcccttttctcttattcccattcttgaaagtttcgttcaaagccaaatgcacagccaaaatacacttatcagatccccccttatacttgttgacattcttctgcgtagctccatctccaacaccttgtttagcattattggattgctccttcagatactcaagagcctttttctcaaaattcctcccttattcaccatccttccactcctgaagcctgttctcggcgtttacatctccgttcactcatatccctacacgaatcgaaattgtttgtcttcttctgtccagctttcataaccacattacgaagtaacgatccgagtccacctttgcctccacggagggacaggacaagattcatggtggtgtcagactgagaaatcgcggatgcgccggggatttggaatcctccgcttatcaatctctgtagatgcgtcggaatcttcgtttgctcgaagatccgctgcttgatctgctcgccacacgctatcggagaggaaaaggttagggttactgattttccgtcgagtagtctcacgaaaaactgcaacggcttacaactttgatccgccatcgattttcgattctaaagcttggacgaagaagaagaacaaagttcgattcgatttctggagagaaattgggggaaagttgaaaaacggatccctaaggtagtctgagtctctctctctctctgcttgttgggctaagaataagatttctttttggtaatgtgttgggctaagaataagattgatatctcttctgatgcggtttcttcttgttgggcttcatagttgggcttttcgttttgaaaagtcttaggttttatgttttgctttggctagtttgttgtctatgacctttttagcttgatgtatgtgtttcgtatcttaataaaatacaaaagagtgtattacaaaagaaaaaaaaaaagatgtttgtagagtgaattaaaattatagtataaattatgcgagaaaaatgaatactataaaaaatggttagcaaactagtattttctaatcagtgagtgctggaaatcaccgcccattagtactgtagattaggatgccactagctagtaaatagaagatatttattaggaaaattcgtccaaagaatttgtaaaaaactaaaaacccattaaatcaagtaaatcgtcattgtcagaaaatgtgacatgtttttggaaaaagattccaattcatcaatccgagaaaaatgtatgactcaaaaatctaaaaatgtcttagtttggaagagatgagaatgagataaatgaaccaacttgactcttaacttaatctcatttatagaaaaattggtaaaagagtgataagagacatttaaacgccgtgttaggcggaagaagtgtacaaaaccaatcacgagcattgtctgaaaccggagtcaaagagacacagagacagacatctctctcctctcatcagatctcaacacatcacactctcttcccttttttaaaatccaattttactgttgtttttttctcctccagcagtagtttttaactgataaaaaatctcccacggctcttgtatagagactagagaggtcaagcctagaaaacgaaagctattttctctcagtcttctaaagttgtgttcctttagtcattttgagctgatttgtctctggtaagtgtttttctttctttctctctcagtcattcttgaatccaagctcagagatcccatgacttttttacttctcgccagcttttgatttttctatgagctttccgtactaaatgtgttgtaaagttctcacctttttgtttgccaaatcacccattatcaaatctacataactccttttaaagacatcctccgcaattaacgcttttgaagacatttctttgggtttcttttaaggttcctgcaaatatttgtattcggatctgagtttcttagtaattaaaagggtattaagatttattcgttactctttgtttattttggttacactattggaatttttttcaatctaaatcattctagttgtatcagatttcctatcttggttactacatgctttatcttaatcatgcatcataatcctgggttttgagttttaacagaactgagtgttgttttgtaggacactgaaaacttgaacacaccaaatctacatggacgaagcagagagctttgtcccgtttcagggtataaagaaagatgtcaaagggagactcaactgctacaagcaagattggatcagtggtctcagagctggatttaggtatattcatttttcaggaaatgttgatgcttgagctttgatagtaacttaatttatgcaaaaatattataggattctggcaccaacaacttacatattctttgcatccgctattccggtgattacatttggagaacagttggaaagagatactggtatatgataactctttttgttccctcattcaaataatctgtctttgattattgtgagagtaacagaaaacttgtgtgttttgtttcttttgcaacaagatgggaagattaccgctgttcaaaccttagtttcgactgcattatgtggagtgatacattccattattggtggacaaccattgttgattcttggtgttgcagagcctactgttataatgtacaccttcatgttcaattttgctaaaagtagaacggatttgggctctaatctctttctagcgtggaccggatggtaaactcaagtttttctctttgcatagctcagttcctttcaaaagcttttaaagtctcaaaaatttatgagaggggcattgtcctttttgtttttcatggatgatttctttttaagggtttgcttgtggacggggctgttgttgttcttgttagctgtattaggcgcttgcaccttcatcaatcgattcactcgacttgctggggaactgtttggtattctaatagccatgcttttcatgcaagaagccattagagtaagtaaaagagctttctttatcaattacattcacaacttatactagcatttgcaccaaaggcattcctttatgttgaaactctacttttcagggcattgtggatgagtttggtgtccccggaagaacaaatccaagatcagctgagtttcaacctgcttgggtgtttgcaaatggaatgttcggtttggttttgtcttctggacttctctatactggactaaaaagccgaaaagcaaggtcttggagatttggtgctggtaaggaaccttgatatttattcaaacagtgaatcaaaaaccaaaaaaatctgtctaaaagtcatttacttctccaagcaagaacctcaggaacatcggtatccttgtcattgcagaatggttacgtgggtttatagcagattatggtgttccagtaatggtggtagtgtggacttgtatatcatacataccttggaaaagtgttcctcaagggataccaagacgtcttgttagtcctaatccatggtctcctggtgcatatcagaattggactgtcattaaggcactaatcacttcctctacacttattattctctttactattaatgcttcatgttgatattcatgaaagtgcatgatgaataaactgcaggagatggtggatgtacctgtgctttacattcttttagcggttgttccagcgtcaatgattgcggttctttactactttgaccatagtgtagcctcgcagctcgcacagcaggaagatttcaatctgagaaagcctcctgcttaccattatgatctgtttcttctaggtttcttggtaagagatgaagtgtatgtttttcttgactgatttattgacttgaccagttacgaaatatgaaaggttggaactcttcttttgtagacaatcctttgcggtctcatcggaattcctccatccaatggtgtcatccctcagtctccaatgcacacaaaaagcttggcaacactgaatcaccaggtttgattacatattgtagtgtgttttatgtaggccttcaattgtatttctcaaaaggcatttaaaaactggttgatgtgcagttacttcgaaacaaactcgtggcagctgcgcgtaaatgcatcagaaacaatgcaacaattggagaagtctatggaagcatggaagaagcttaccaacaaatgcagagccctctgatacaccaagagccttctcgggtatgttggtatcatctatatattagtttataatttgacctttttaactcatccctgatcaagcacggtgcaatatcagattcaaggactcaagcagtcacatattcaaaaggcttcaaacgccgatgcactggtcgatgaaacagtgttcgatatagagacggaagtggagaatattctgccagtagaagtaaaagaacaaagagtaagcaactttcttcaagctatgatggtggctggatgtgttgcagcaatgcctttgatcaaaagaatcccaagctcggttctttggggttacttcgcttacatggcaatcgaaagcctcccagggaatcaattctgggaaaggatcgtgcttctcttcactgccccaagtagaagattcaagtaaaaaacaaacctttcttcatcaatctgaaaatcttgttgttggtgtattctcatggtctctgtgaactttggtctctttttttgtgcagagttcttgaggataatcatgctgtgtttattgaaacggttccgtttaagacaatggcgatgtttactctgtttcaaaccgcttacttactggtctgctttggcatcacgtgggttccggtggccggagttttgttcccgttgatgataatgtttcttgttccagttaggcaatatgtgttgcctaatttcttcaaaggagctcatcttcaagacttggatgctgcagagtatgaagaagcacctgctatcttatcattcaatctcaaaccggtaattaattctcttcttcttctcttcaaaagcttaaggctttatcgagaacataccggtaatatactggtttcttcgtggttgtgtgcaggaaggggaagtgagccgtgcgacgtcgtttgcggatagtggagaagtgatggacggaatgtttacgagaagcagaggagagataaggaaagtgagcagcttgaagctaggcggtggaggaagtggatcgacggtaggttcgccggcgggaggaggagtggagttgatgagaagagtggtgagttttcagaatccaagggtgtcggagaaagtgtacattcggagcttaagtgatttcagaggaggtggagagattagtccacgatcgtccgctggaagagctccgttcagtccacgatccgccacgggtggtggaggaggagaacagagactttctaatttaggaaagtctgtttagtaaacagtatagtgtagtctctctctctattcatatttgttctaaccaaccaatcctatatagccaagttattccatttgcctgtcattatgagatttaagaaatgaaaagaagattatctctcggagaatttgtttatttcaggaaaatttgaaatgattttgatctccaagtacaaaaaaatggacaaaaaaaattattagagtcctagttagtagtccaagagtacaaaacaaagcaatacaaaaaagttaaaacgacatcgttttcattgtaaataactgacatcgtttcgttgttatataaaacaacgtcgtttcctatagcaacaagatgctctctgcttcagctggccttcgtcgtctctgcctgggctctgaaactgcatttggctgatcttggatcttcatgaattatgtacttgaaagatcatcgaaattcaatataaaacgggtaaagcttctcaattttacaataaacacaacttttcagctattgaaacagtgactaagctgtttttcttttgagctatatttctttgttagtgctaagtaatagtaaacaacaatttactatgatcttgcttctgggtctccttatatccattaaagactgatcctttctgcaccaattcagtttaatctttcttcttttagcttaaatgtctctggttagttatgtctgaagtatacaacaccggttccaaagttcgttgaccattgtttgagttcttcttttattaggattgtgagaataagaatcggattatgctaactctaattcgtaatctgcgttttactttaggttactcaatgaagcaattcatgtcagtggtgagattcaaatttggtttcacttcagtcagaatgagggattggtcggtgggagtctccattatggttcttacattgatcttcatcatccgttatgaacaatctgatcacactcacactgtggatgattctagtatagaaggagagagtgttcatgaacccgcaaagaagccacattttatgactttggaagatcttgattatctattttcaaacaagagcttttttggagaagaagaagtgtccaatggaatgcttgtatggtctcgaatgcgtccatttcttgaaaggccagatgctttgccagaaactgctcaagggatagaagaagctacattggcaatgaaaggtttggttttagaaatcaatagagagaagagagcttattcttctggtatggtctctaaggaaattagaagaatctgtccggattttgtcactgcatttgataaggatttgtctggtttaagtcatgtacttcttgagcttccttgtggtttaattgaagattcttcaataactttggttggtattcctgatgaacattctagtagcttccagattcagctcgttggctcgggattatcaggagaaactcgtcggccaataatcttgcgttacaatgtgaacttttctaaaccatcgatagtgcaaaatacatggacagagaagctaggttggggaaacgaagagcgatgccaatatcatggatcattgaaaaatcatttaggtaacagaactcacatatcttttctcttgtatgtcatctcgatggattgttgaaaagtctcttggcaaccattgtagttgatgaacttcctctctgcaacaaacagaccggtagaatcatttcggaaaagagttccaacgatgatgcaactatggaactttctctttcaaatgctaattttccatttctcaaagggagtcccttcactgccgcattgtggtttggcttagaaggttttcatatgacgataaatgggcggcacgagacttcatttgcttacagggaggtaaaggatgactataccatgttagttttgaggttgttgctttgtttaaaactgacatatctaattttcagaagctcgagccatggttagtcagtgcagtcaaagtctcaggtggtttgaaaattttatctgtcttagccacaagactgcccattcccgatgaccatgcatctttaatcatagaagagaaacttaaagctccatctctttccgggacaagaatagaactattggtgggtgttttctccactggaaataattttaagcggcgtatggcattgagaagatcttggatgcaatacgaggcagtaagatctggcaaagtagctgttcgatttctcattggccttgtaagtacctctgcaagctaacattcctccttggatttatacatatcttagcattaacttggcgtttcttttactcagcacacaaatgaaaaagtcaatttagagatgtggagagaatctaaggcatatggagacattcagtttatgccatttgttgactactatggtttacttagcttgaaaacagttgcgctttgcattctcggggtaagctactagtagtttacacaaacatagaaactatgagatatcacttcttgccttgtcttggttaatccctctctgatggatgtttctccatgttgatacagaccaaagtcatcccagcaaaatacataatgaagacggatgatgatgcgtttgtacggattgatgagctcctatcaagtctagaagaaagaccgtctagtgcccttctgtacggtttgatctcatttgattcatcaccggaccgtgaacaaggcagcaaatggtttatccctaaagaggtaaaacttctcaatatttctcacacctctgtgggctctaatcctcttagagactcatatatggctttctctttgtgaaggaatggcctttagattcataccctccatgggcacatggccctggctacatcatctctcatgatatagcgaaatttgtggtgaagggtcaccgtcaaagagatcttggagtgagttttgtagtttcatcaccatagagttaagatataacgaatcctagatatcataagtgacgttgttcttatgttgtttgttgaaagcttttcaagctggaagatgtggcgatggggatatggattcaacaattcaaccagacgataaaaagagtgaagtacatcaatgacaaaagatttcataacagtgattgtaaatcaaattacattcttgttcattaccaaactcctagactaattttgtgtctttgggagaagctgcaaaaagagaaccaatctatttgctgcgaataaatctctcgagcatgtacgtatgtaacttttctggttctgtttcacacttcaggaagaagttctcccagttaaagacacactggctcgagtatgtcagagtatattggctattatctgtctttgtagattctctcaatcagcatatctacaaacatattcgaaccatagtttataggccaggagcgtgtcaaaggtgccattagtgtcttattcattgtcctcgtaaacgttgttgcttttgttgtatcggggcacacttatccggatttatcgattatgcaattgccctactacatcacattattatttaaatttgtcttcaagtttttatttcgcatagcacatatataaagaaaacgcttcgttcaaactcgtctgtgaactccataaaacttattaaaaaatccgtccaaaaaaatatatagtatagtttggatcgcatgaaaacatatctaaacataagtctttgttaggggtcggattgggcccttctcaagtagttcatcagctcgcccttctcaagaagctcgttagctcgctccacttcgtcaagctcttcagatcgcctttaagctcttcaaactcgactcgtcctcaagctcctcagctcgtcttcaagctcttcccatcactcagcgaccatttcctcgcctagctgtcagctagtcagctcgtccaactcctcgtctagctatcagctcatccctcgtcaactacctgccgacctacctccaatgacggcctagctcacttattctaatatgaactacgtgtggcttgatccctttctaagggtacgtaggcaaccttttacaaggttcagctataaaacgaataaactctattcttcctcggacatcaagttcgtcttccggcctcaagctcgcctttcatctacaatcagctcgttcttactccatctatgctcgttgaagaaatcatcctttgtaatccgtccaattcgcctaagtcgcaggctcgtctttaatagaaagattcttccttccctagagatcccattttcgtacttgtgtgattcgtgcatcaacagttggcgcgccaggtagggggatagctcgaagtggcttgatccctttctaagggtacgtaggcaaccttttacaaggttcagctataaaacgaataaactctattcttcctcggacatcaagttcgtcttccggcatcaagctcgcctttcatctacaatcagctcgttcttactccatctatgctcgttgaagaaatcatcctttgtaatccgtccaattcgcctaagtcgcaggctcgtctttaatagaaagattcttccttccctagagatcccattttcgtacttgtgtgattcgtgcatcaacagttggcgcgccaggtagggggatagctcgaagatatctctcaaaactacgaccccgcgacgaagcaaagtgataacaaacagactacatggagcattcgataccgactcgtcaggctctggaagtaaaacgacaacgtcgatccccgggagagccagtcactcgacctcttcattcgatatcgcagcatgttctccgacaagaaaaggacttcaaggaactatcgaccccatcatcctaggcgatgacacttccagcccggcagtcaggacaataacactgaccaacgaggaagtgccgccgatcaaagaggaacatcccataacctcattaaacataccgacctcgttatcactcacgcctaaccaagaacaagaggagaagtcatcaggcgggcgtcacttggagaacctcgacgatgacactcccagctcggcagctcggacgataacgtcagcgcacgggaagacaactcaaataaaggaagaatactactcggtatgtaaaaaaattttattattactttttcaacctagttatttgcaggtaaaaaaatcattactttttaaaaaggctagcagacgaatcaacacggtatgctattaactaaaaccaaaataaaaataaaacttagtggttttccaaaaataaaaaacagtgagcggatgacagttgtcaaaagcagcacatggttttacttactttcccggtttaaagaaagaagcaaaccctagttttagagcatctttctttctttctttctttttcccgtcgcttttaaagcatctttcttatccgtcgcagttcatcttcctaactccatctctataaaagaaaaaccccggcaacaatggccaaaaaatctaagcgaaaccaaaataataaaggaaagacgaagattccccagagagttgaagtgtttggtgtgaatgatccagtaaccagatttggttggactatcatggcttttctctgcgtttttggagctgtgggtgctgtgaatgccttggagatccagatggatgtctcttatctggtaatgtttgttgtagctatctatgtgattccagtcttgcattccattttctctgaagctccatctccagtttacagagcacatcgatgggtgagaactgttatccctctcatactgcttaccataatctactttactgtcttcaatttccaaacccttgcagcatctgttttgatcatatcagtggtttttggaattttcgtgttggttcagttggttttccctgtagaaagattttactttttttatgtagtgctcattttgttatttggatgctgctcagctgtatttgctggtcagtatgatcccaaaacccagccatttgggttctgcctattaactctctttgtttttgaaatgtttttctactttttctactatcctgggcctactaatagggcattcaaattctattagattactctcaaaatgattgtcagatctaattcacaagagactttttttgcatgtataaatatctggatatttaagcatgacttagactatctatttttttttttataaattatattagttgatcttgttagtttggttaggaaggtattaaaatattacaaagtggatttttttcttaaatgaccgctacactgcttatctcgaatttggaatatttccatactaatgtttgggagtagccatatagcctattgttggactaccatcataatataaactgttagggtctaatctagattttcgatataaatgtgatatttgttttaggaaagctcgaacccttggagagtgttttagcacatcccaaatctcactaattacggataactatgtatatatctatttttagatctcttatatttgaaaactagctagatagattttttgagacaaatcattaccattcaaagcacctcatatctaactagatgaatgtggtagatgcaactctttttttttctttattagaaatttaggatacagtctttattagtgagacgctataactcaacggaatattgttgtgaccaacatttacctaattcgtatccttacaatctcaagatggcagcatagtaaacgttggatatatgctttatcttcttctttttatatccaaaatatataacgttgtttaccgtaatgccgtcgaaaatgagtatcataggggaacttttttgtagacgttgacaattcagtagggacctcaagaatacagaagaaggaacaaaataaggaatgcttctgattcattgtccattgacgagagaacttattggccttttgcatgtaaactaataaatacatatctttttttttgtctaaaaaataaatacatatcttaagtgtcgtctttccactaagcagatttctcacctgtgcaaatattgtccctctaagaaaaaccttttctttatgtaaacattgtccctaatcatgttttccaattatgtcttggatactagaaaaaattcgaaaagacactcatatttttatatacatcccaatataaaaatttttatcctacactagaaaacacatataaaatagaaatggcgatgcatgtgaagatatgataaattaagtctaggcctccgttatgacccgaaacaaaatttctaaaccgaccgagccagttttgaaaagtatccaaccctattaactcatcataaaagtgtttattttctaattttcagctcaatatatgtcaattcttataaaagcccccaatatgaataccagttaaaaaaaaaaaaatgaataccagttaccacgcagttgcccaacgtaaaactacgatttctctattatagcattaattattagtaaacaaaaattgtgtagactatgattaatttagggtttgaaaacttacctaaacataaaatgaacaagcggatgaattttacaactcctaatacatttggtaatcatattaaattattctactatatgaattaagcttattaaactaaacaatgtctttatccaagaagaaattaagtactgatgatgctgaccggatgtcaaaagaaaaaaaaagtattgaccaaaaagtccaaaaaaaattgttgccgttggggaagaatcgcgaccttcaatcccgtcgctgtcatcttctttatattcttatttttttattttttattttttacagaaatcatcttactttatataaaagacaaaatacatgcgcttttagggttgttttattgtttactgaaggagtaaataagtaaatgtttatctacagaaaaaaaattaagattaccacatcaaattgtgttacttagtactattaatataaaattttaaaaaggaaaatgattaccactactcattattggaataccctggatacttattaggttttttcattatttgtttaaagtaaatttttttgtctgattttttttctttctaaactataaaaattcaaataattcgggtcaattctgaaattacaaaatacaaattatgcataaatacatgtaaacaaaaacatcatttgtatgcttcaatacgaaccttatgaaaaaaaatccattggtataactaattaaattaaagtttcacacaaatacaactgaaaaaaaaagagagggacgaatgcacgtgcataaacgacaaacaatgaatgaaaatggtaaaaaagattttatttttcttataaaacaacccacggtgccactcctatttcctctcgctcttctttctccaccattttcagatccatttctaagcttcttcctttccctttccctttctacattgtcaatggttaattttggggattttgttttcggggtttatcactttgtttaccagtttgttctccatcccatttaccagtatgttatgcgtcctatcttcctctttgtttaccagtttgttctccatcccatttaccagtatcttatgcgtcctatcttcctctttatattgagacctatttacttgggtatcaatagggttttgggagggatctcgtggttgtatgggtttagatacactctgatggtgcaaggtatactttgttactggagaacgtttctatactttgagagatcaagtttgtgggaaaagtttgtagagaaacatgagagaaatcacgaaaaatcttatttaatcccacttttgtggactatgaatggggttttccttatctttatcatccttctggtttttgctgcaactcttgcgggagaagccaatatgaggaaagtttttaatattcaaggacagattggagttaacttttattgtctaggtaagagtaccggggaagtatcaattttaaggttaatggtttatataagtgaccatgttgcagataacgtcgacagcaagcggtgaataaaatgttctttagcaatatcataccccaacatatgaagatcccaagtactctacaatgataggcttcacaataatgggtgaatatagataaggctacagaagctatcccatctatgaaccctaaatcattccccacatagcaaagtttcataagactaacaacgcttagataactacacacaaagcatgaagcaacattcatttcagctaccgatttatctgcaacaggatcacttatataaaccattaaccttaaaactgatacttccccggtactcttacctagacaataaaagttaactccaatctgtccttgaatattaaaaactttcctcatattggcttctaccgcaagagttgcagccaaaaccagaaggatgataaagataaggaaaaccccattcatagtccacaaaagtgggattaaataagatttttcgtgatttctctcatgtttctctacaaacttttcccacaaacttgatcgctcaaagtatagaaacgctctccagtaacaaagtataccttgcaccatcagagtgtatctaaacccatacaaccacgagatccctcccaaaaccctattgattcccaagtaaataggtctcaatataaagaggaagataggacgcataacatactggtaaatgggatggagaacaaactggtaaacaaagaggaagataggacgcataacatactggtaaatgggatggagaacaaactggtaaacaaagtgataaaccccgaaaacaaaatccccaaaattaaccattgacaatgtagaaagggaaagggaaaggaagaagcttagaaatggatctgaaaatggtggagaaagaagagcgagaggaaataggagtggcaccgtgggttgttttataagaaaaataaaatcttttttaccattttcattcattgtttgtcgtttatgcacgtgcattcgtccctcttttttttttcagttgtatttgtgtgaaactttaatttaattagttatgccaatggattttttttcataaggttcgtattgaagcatacaaatgatgtttttgtttacatgtatttatgcataatttgtattttgtaatttcaaaattgacccgaattatttgaatttttatagtttagaaagaaaaaaaaatcagacaaaaaaatttactttaaacaaataatgataaaacctaataagtatccagggtattccaataatgagtagtggtaatcattttcctttttaaaattttatattaatagtactaagtaacacaatttgatgtggtaatcttaattttttttctgtagataaacatttacttatttactccttcagtaaacaataaaacaaccctaaaagcccctgtattttgtcttttatataaagtaagatgatttctgtaaaaaataaaaaataaaaaaataagaatataaagaagatgacagcgacgggattgaaggtcgcgattcttccccaacggcaacaattttttttggactttttggtcaatactttttttttcttttgacatccggtcagcatcatcagtacttaatttcttcttggataaagacattgtttagtttaataagcttaattcatatagtagaataatttaatatgattaccaaatgtattgggagttgtaaaattcatccgcttgttcattttatgtttaggtaagttttcaaaccctaaattaatcatagtctacacaatttttgtttactaataattaatgctataatagagaaatcgtagttttacgttgggcaactgcgtggtaactggtattcattttttttttttttaactggtattcatattgggggcttttataagaattgacatatattgagctgaaaattagaaaataaacacttttatgatgagtttatagggttggatacttttcaaaactggttcggtcggtttagaaattttgtttcgggtcataacggaggcctagacttaatttatcatatcttcacatgcatcgccatttctattttatatgtgttttctagtgtaggataaaaaaattttatattgggatgtatataaaaatatgagtgtcttttcgaattttgtctagtatccaagacataattggaaaacatgattagggacaatgtttacataaagaaaaggtttttcttagagggacaatatttgcacaggtgagaaatctgcttagtggaaagacgacacttaagatatgtatttatcttttagacaaaaaaaaagatatgtatttattagtttacatgcaaaaggccaataagttctctcgtcaatggacaatgaatcagaagcattccttattttgttccttcttctgtaatcttgaggtccctactgaattgtcaacgtctacaaaaaagttcccctatgatactcattttcgacggcattacggtaaacaacgttatatattttggatataaaaagaagaagataaagcatatatccaacgtttactatgctgccatcttgagattgtaaggatacgaattaggtaaatgttggtcacaacaatattccgttgagttatagcgtctcactaataaagactgtatcctaaatttctaataaagaaaaaaaaagagttgcatctaccacattcatctagttagatatgaggtgctttgaatggtaatgatttgtctcaaaaaatctatctagctagttttcaaatataagagatctaaaaatagatatatgcatagttatccgtaattagtgagatttgggatgtgctaaaacactctccaagggttcgagctttcctaaaacaaatatcacatttatatcgaaaatctagattagaccctaacagtttatattatgatggtagtccaacaataggctatatggctactcccaaacattagtatggaaatattccaaattcgagataagcagtgtagcggtcatttaagaaaaaaatccactttgtaatattttaataccttcctaaccaaactaaccagatcaactaatataatttataaaaaaaaaaatagatagtctaagtcatgcttaaatatccagatatttatacatgcaaaaaaagtctcttgtgaattagatctgacaatcattttgagagtaatctaatagaaactgaatgccctattagtaggcccaggatagttgaaaaagtagaaaaacatttcaaaaacaaagagagttaataggcagaacccaaatggctgggttttgggatcatactgaccagcaaatacagctgagcagcatccaaataacaaaatgagcactacataaaaaaagtaaaatccttctagagggaaaaccaactgaaccaacacgaaaattccaaaaaccactgatatgatcaaaacagatgctgcaagggtttggaaattgaagacagtaaagtagatgatggtcagtatgagagggataacagttctcacccatcgatgtgctctgtgaactacttgagaaggacaagctacttgagacggacgagctacttgagacgggcgagctactctttgtctctaagtgtcctggccgaatccccctcgtgacaggacatgctattccgtatttatagcactatgcgtgtagggcattcatcgaaggatttgacgaaactacccttcgccttaatactccttggtttggaacttattttgggtttttgacttgggtttgggcattgggccaagtaggcttaatctgtcgtccgaagaaaccaaagatgtcgaaactattgattccgtcgaaacggtgcgagcgcggagctcggcttaatctgtcgtccgaagaaaccaaagatgtcgaaactattgattccgtcgaaacggtgcgagcgcggagctcggcttaatctgtcgtccgacgaaaccaaagttgtcgaaacttccgtcgaagcggtgcgagctcggcttaatctgtcgtccgacgaaaccaaagttgtcgaaactattgatttcgtcgaagcggtgcgaggagctcggcttaatctgtcgtccgacgaaaccaaagttgtcgaaactattgattccgtcgaagcggtgcgagcgcggagctcggcttaatctgtcgtccgacgaaaccaaagttgtcgaaacttccgtcgaagcggtgcgagctcggcttaatctgtcgtccgacgaaaccaaagttgtcgaaactattgatttcgtcgaagcggtgcgaggagctcggcttaatctgtcgtccgacgaaaccaaagttgtcgaaactattgattccgtcgaagtggtgcgagctcggcttaatctgtcgtccgacgaaaccaaagttgtcgaaactattgattctgtcgaagcggtgcgagcgcggagctcggcttaatctgtcgtccgacgaaaccaaagtttgtcgaaactattgattccgtcgaaacggtgcgagcgcggagctcggcttagcactcccttaagtgtaggttttatccaagaccgttttaccgatacatggcatacttaaggggttcgtgcgttcgtttatcgatcgaatgccgggccaggacaccgatgtaaattagctcgatcgctacgaggtccagcggaaccctttttaagaatactgacgaattgaattacgacaaaaacgaaaattttacttatctcaacgcaagagtttgtggtacgatcgagttttgacggtcgagttcgttgatacaattatcgaaaagacgatgctcaatgtctgccctagttcttgtcagttcgttcgtccgacgtgacgttatgctaagcggcatcgttttcttcgttttagtgggatggcgttggaacgagatctccgacgttttgagtgacgatgtgaattttgctgttgtggagagtttggcttttcttcagttcgcctagctccagcgggtgctgttactttcactctgcaagatggcgcaaatggcgtttggttggttgcgtcattgtgtacgtccagagccgtctggttctttcgtttagcttctcgtagcctgccgacatgatgtgttttgttagtcgttttggtgtggtcattgctttgcggtattcgctaaacattggcgtcagtgtcggatcgtcgatgtcggatcatcgatatctcttatggcgcatccgacctgatggaccctggagatggctcaattgatttgggagtgaaggtcttgcacttggtatctcgtttatagcggtctgaggaattgccgagctgggttggtttaagacaacctgaatttcttcgcgtaggttgggtatgcgaataacgactcatgtgcatgcggctaattttatcttgtatgtgctcttgggcggcggttaataatcgcgtcgcgctgctttaaatgatcgatgatgatgttgagtagttcttcgccgcgttggttggctttagccgtatcgtccaggcgatgaaatcggctaagtgaagcttctccttggtctttttgcaacgctaggtattcaggcgtgggcgataacgaggtcggtacaatagatgacgccgagtagtattcttcctttatttgagttttcccgtgcgctgacgttatcgtccgagctgccgagctggtagtgtcatcgtcgaggttctccaagtgacgtccgcctgatgacttctcctcttgttcttggttaggcgtgagtgataacgaggtcggtatgtttaatgaggttatgggatgttcctctttaatcagcggcacttcctcgttggtcagtgttattgtcctgactgccgggctggaagtgtcatcgcctaggatgatggggtcgatagttccttgaagtccttttcttgtcgaacatgctgcgatatcgaatgaagaggtcgagtgactggctctcccggggatcgacgttgtcgttttacttccagagcctgacgagtcggtatcgaatgctccatgtagtctgtttgttgtcactttgcttcgtcgcggggtcgtagttttgagagatatcttcgagctatccccctacctggcgcgccaactgttgatgcacgaatcacacaagtacgaaaatgggatctctagggaaggaagaatctttctattaaagacgagcctgcgacttaggcgaattggacggatttcaaaggatgatttcttcaacgagcattgatggagtaagaacgagctgattgtagatgaaaggcgagcttgaggccggaagacgaacttaatgtccgaggaagaatagagtttattcgttttatagctgaaccttgtaaaaggttgcctacgtacccttagaaagggatcaagccacacgtagttcatattagaataagtgagctaggccgtcattggaggtaggtcggcaggtagttgacgagggatgagctatagctagacgaggagttggacgagctgactagctgacagctaggcggcgaggacatggtcgctgtgatgggaagagcttgaagacgagctgaggagcttgaggacgagccgaggagtttgaagagctgaagagcttgacgaagaggagcgagctgatgaactacttgagaagggcccaatccgacccctaacaaagacttatgtttagatatgttttcatgcgatccaaactatactatatatttttttggacggattttttaataagttttatggagttcacagacgagtttgaacgaagcgttttctttatatatgtgctatgcgaaataaaaacttgaagacaaatttaaataataatgtgatgtagtagggcaattgcataatcgataaatccggataagtgtgccccgatacaacaaaagcaacaacgtttacgaaaatttaacaagtccaaaagtaacagacatgataataatatcctcattacaaaactcaacacacgatcaaaataagtgaaacataacataaaccataaaccctcaagtttcaatacgtatcaggagatttaatgggggggggggttaaaatcatatactcctccttgccgaactattaggggtcggattgggcctacttggcccaatgcccaaacccaagtcaaaagcccaaaataagttccaaaccaaggaggagtattaaggcgaagggtagtttcgtcaaatccctcgatgaatgccctacacgcgtagtgctataaatacggaatagcatgtcatgtcgaaggggggaattccgcctgacacgcagacacagagtagctcgcctttctcaagtagctcgtcagcgagcccttctcaagaagctcgttagctcgctcctcttcgacaagcttatcaactcgttctcttcaccaagtccctcagctcgtcttcaagctctccaactcgtctttaagctcttcaaactcttcagatcgccattaagctcaacaagctgctaagctcgtcttcaagctcctcaactcgtcttcaagcttctcagctcgtcttcatgctccactcaacgaccatctcctcgtctagctgtcatctatacagctcgtccaactcctcgtctagctatcagctcatccctcgaaaacaaaactcatctacctcctcgcctagcggcagttcgtccattgactgcatagtccacctatctcgtcgtccagctcgtctagaccttcagcaaacaactcggtttatccaactcgtctctctaccacggttcatccagcttgtcgcacatctgccggctcgtcaactacctgccgacctacctccaatgacggcctagctcacttattctaatatgaactacgtgtggcttgacccctttctaatatggactacgtgtcgtctcgcttgactatcaccgagacagcacattgtcagctcgcccgtctcacgaagatcgtccgtctcaaatagctcgtcagctcgtccttctcaagtagctcgtcagcgagcccttctcaagaagctcgttagctcgctcctcttcgtcaagcttatcaactcgttctcttcaccaagtcccccagctcgtcttcaagctctccaactcgtcttcaagctcttcagctcgccttaagctcttcagctcgcctttaagctcttcaaactctttagctcgcccttcttacaaaaacaaaaaaggatatcaattatgtagatcaaaacaaaaacaaaaaaggacttacaaggacgtagatatcaattatgtagatcaaagaataagcagtccaaattccagcgttgatgaaacgaactaacgatagccaaaacggcatgtacttgaaggtcttagtctccggcggcattttgtcctaattgtttcacgcattaaaaacttatcaaaaccagtttaatagtttacttatctatatattcatcaataagtgagagccagagagagagagagagcttactatggtaaataaaagatagatgataacaatgttgtaaacgttgcaaacaacaccaatgaatgtatgcttgccggccggataaactcccaaatccccagatagtcatacaatagactgttgccacaaaactaaactccaacggaagcaatagataaaagagtaatatctgcacatcaacatcgacatcatcaaaatcaatatacaatatttttctggatttgttttttttttctttgggatatttctatagaatttagtcaagattgtgtttgtttgttaccaccttttgtgcaccagtcaccaatccttatttttattattaaatctatttttgatactataattcgtgattttccttttagttttatatatatatatacttacagagatgcgagcttcatattattatttttatctttttgaacaccaaaaaaatagcctcgtattatttttaaatgatcaattatgtgatcatatttaaaaatacgatccggtttttaagggatttgaacggatcaaatgtgtttccggttcggttatataaaccggtattttaccatatccaaccgaaatgagtatcgacgggaattatccgtaaacagagtgacagtgaggtgtgaaggaagaagacgatggcgtcaatgtctctctccttttcttcttcgctatgttcatccagaatccccgaaggtaagcgtaggtttcgtcacagagatgtgggcatcgttagatgcgttttggctgcttcgaaatcttctccgggaagtgttacgaagaagaggctttggaaagacggcgaattccccggaatcacggagccggttaatcagagaagaactccgataaagaatgtgaagaagaaacttgacaggagaagcaaagctaacggatgggttaacaccgtcactgaaactttgtccgatctcatcgccaaaaagcagtggttacaagctctcgaggtatttcgattttctctcttctcgttcatgtttgattgaatttgaactcaattttgaatcacgagtataatttagctgaaagatgattttgattgaattgggtattttgttgatgatcttaggtttttgatatgttgagggaacaaacattttatcaaccaaaggaaggaacttacatgaagctgcttgttcttctcggtaaatctggtcaacccaatcgtgcacagaagctgttcgacgaaatgcttgaagaaggacttgaaccaactgttgaactctacactgctcttctcgctgcttacactcgcagcaatctcatcgacgatgctttttcaattcttgataaaatgaaaagctttcctcaatgccaacctgatgttttcacgtacagcactctgctcaaggcttgtgtggatgcttctcagtttgacttggtggattcgttatacaaggaaatggacgagcgtttgataactccaaacactgtgacccagaacatagttttaagtgggtacggtagggtcggaaggtttgatcagatggagaaagttttgtctgatatgttggtgagtactgcttgcaaacccgatgtgtggactatgaatatcatccttagtgtgtttggaaacatgggtaagatagacatgatggagagctggtacgaaaagttcaggaactttgggattgagccagagactcggactttcaatattttgattggttcttatgggaagaagagaatgtatgataagatgtcgtctgtcatggaatacatgcgaaagctagagtttccgtggacaacatcaacctacaacaatatcatcgaggcgtttgcggatgttggtgatgcaaagaacatggagttgacatttgatcagatgcgtagcgaaggtatgaaagcagacacaaagaccttttgctgtctcataaacggatatgccaatgccggtcttttccacaaggtgataagtagtgttcagttggctgctaagtttgagatacccgagaatactgccttttacaacgcggtgatatcagcgtgtgctaaagcagatgatctgatagagatggaaagagtgtacataagaatgaaggagagacaatgcgtatgcgattcaagaacgtttgagatcatggtcgaggcgtatgaaaaagaaggtatgaatgataagatctattacttggaacaagagaggcaaaagcttatggatcgcactgttgctacaaaagagatggagaatcttccggcaggatgattgcggtttgtgtgtgaatctctctctctctctctctgcaaggagagatcgatgtctcacttgaaagagtagaataaaagagtttgtaatacacttgattgttcttgcagctatgcgtgttatatattttgatgggcccaaaattatgaatagaggcccatagataaactgtgacgtgcacaagaaatcggacaagtccaaaaagtggataagtgcgtgtcgtctttctataaataatctcttttctctcatcttttaccgtttcttctcgaacaatcaaaaacgaactaaccaaacataaaattgaacacatcctcttcctctgctctctgcaaacaaaaaaacaccgattcggtcaggaatcattcgtcgtgaaatctgtaatggggattgttgtcaagtctttcaaggatcaattctcctctggtttgttcttcgttaatctctttctgattctttggaattttttttccttcgaaatgtgcttctgaagcaaagttttcatctttgtttgaggatatagatgagagattgaaggagtcgaacaacatcattgcgaaatatccagatagaatacctgtaagttatttcataaatttcatgtttgatttgtttcttggtgtttccgtcttagttgccgtgcgattgtggatttccttagggttcgaatgatttactcaattaaaaaaaagtcttcgtttgacttgcatctctcgaatttgctagaatctctgtttcaatcttagaatttcttcgccatggtttgatggatacgatctgggatctgaaatttgactgattttgtgcggtttggtgttgatccaatcactctggtcaatgtcggagacgacttctttagttgagatttgatctatcaccaacaacaacccaaaccaatttgatttagggatttggatctgttcttggtttggtttcttcatcagattccagcatttatggatgggttttatttacttatgtaggtgatcattgagaaatattcaaacgcagatctgccagacatggagaagaacaagtgagttgtgacatcaatttagctgttggaccaaaccaagtgtaacctgtctaactgtgaataatcttgtttttaactctgtatcccgcatttgtttattgtagatacttggtcccacgagacatgactgttggacatttcatccatatgctaagcaaaaggatgcagttagatccatccaaagctctctttgttttcgtacacaacactcttcctcaaaccggtaagataagaagtatcatcatccatgtagagtgagactttacctgcagttttccaaagctttccattaacacttgtcttgaattatgcagctagtcgcatggactctctctacaatactttcaaggaagaagacgggttcttgtacatgtgctacagcaccgagaaaactttcggctaacaaaagatttgtcgcttcatatcgaaatcgaagcgcactctgaataatccatttgtttgattcctatgtttgtgaataacgtcagctcttgttgttactgttattgttgttgttagctgacattgtacagaaaagctaaaaaaaagaaagacatttgactttgtaaattatgtataatccaactatggcaataataataagaccaagtgatgatgattcacacgaaactctttttgcgttttgttcttccctataaaaaaagaaaagaatatagatactttcgtggaagcacgtaagtttggggagatgtggtaaaatgagacctaaagaaattgcaatgtcggtgcggcggtaaacgtgtaccctacgacttggattgtgtgttttatgcgataaggtttttaagaaaaccgcaatttttagaatattgtttatgtatatccatccatcatatggttaatcttctctacaagtttattttgcctcttttgtttatacacattttatgttccgattacatattttattccttcttaatcatcacttctaacatgaggatttaaaacttttctgtttccaacgagtttataactacttaattaatgcctctattttagttcaatagtgattaatgacgcgttggcaccatctcaaactaaactcaatatttcggagcaaataaaacaaaatttcacaaggagaccaataattgatcgagtatattcttggggggatgttacgatgccatccatgtccaaaactatttggatcaaagcttctttttggaatttttgtgctctttcatttcatttgtatatagattcggttattccttgacaaaaaaaaagatggttattcctaattaactgccacattcttatttataaatatcaatgtcggttacaaacacgatataatgtaataaaatagttgatccaggacgtaataattgtgctcccagtgtgttagttagacttgttatttttatttgctataaaaaggattagattaagaaaggataaccgacaatttaattttaaacagaattttagacaaacaatgtatagtcgtaatctgcggtggttttattgtttaagatgatttgttatgtggatcgaaaccaagattatagtatttctatcacgactttaaccaatgtgaacaactcaagaaaacaaaaaacaaaaacaaaaaagagtttttctatatatgattgataaatttaaaagttgctacataaatttaaaagttgcttgataaatttcagtattttacattgtgaatgagtacaactctgctatttgggccagattgggcctctaatttaatagattcacagctacagtttgaagcttttgtgacttgcccaagaaacaatagtttcgttcaataccataaatgggttttatcttctcaataagcccgtcaagagtcgctcgagacagtttcttgcgagtgagagtactcttcctttgatataaacaggtctatggaattattcttgtttctgttgcgttagtagagcatgtggacattggcttgatgatctttccttatgtttctgacgataagaaggcatcaaagcataatcttgaggtagtaaatcgactgatgctttcaggtgtgacttggaattgagaacgagaaaactcaacacgtcgaagccccgatttgaagatgttgaggtatctatatcctctttggtgctgtctggataaggaataacattttagaatatatgtgttgttgactgtttccttggactttcttttaatctttctaaggtatcctctgatgaagatgggtgacaaataaaactcttaagctggcttcactatatgaaagaaaagaaacaaaaagaataaatgttatatatatctctcctagacacatcttttatatcagtctctctactttcttttttgttgtttcccccacacaatgattctacaatctttatgagtcaatatttatgtgtattcctgtcggtaaaagtttttggaagaaacagatgaactgtggatgaagatgccattgtgaaaaagacacaagaagttgtctggtgtctgagttggtttttaatttgtccggtttaaagaatcagcttctcttaactcttattcaccactaaggttcggttactggatttatttgtgttgttagacttagaaccaatgttttcatttcgactgattaaagagaacattgtatacaaatatcctttttagtttttaatactctttgccaagtttaagaaacaaaataaaaccctaataaactgaattaggattatttttcaaatatattatacttaatttctatggttttagttatcttgttcttgtgattaagatgtatttctagcaagttttaaagttttatcattatctctatatcaaaatccaaagtacgtacttaagacgtacttgtataatttaccttgaaaaagaaaggaaaacaaaaatactactaaaaagtatataagcaaatacgtcatgcaacaaataagacaacgatgttaacgtgcccaatattataagggactaatagtaattttaaaattagaaagcaatataatgtactgttaatataacgcaatttaattaataaagaaaaaaagaaagaattgatctcgccgacatttggtagatgaagaaaggagggatgttatggtccaaaagatcctttggggaataacaaaatctccaaaagctggtcacatgtggctcattcttgtccaagtcaaaccttcttcacatcttttgtattttattttattagtacaataacttattaatattactcttaatttccgttgcaatatgcttttaatgctctcattcggctgactaattttcacttttcgactttacagaccaaaaaaactttttatttcttgccatgaagtgacatggaattgatactcatggtttggtttactaataagtttctcaaataaggtcttaaccaagaagacttttttttttgtcctcaatttaactcttgtattattcgcattggatatgaaatttcttttgtatgtgcaagatcttggattcttttaatattcttaattatgcaacgtatccaaaattccaaattgattccttcaatggcatcaatgcctatactaagaacctcggaaagcttatttgaaatcataaaacgcttgagttgtcaaaaacactcacataaaactctatatatatgtatgtaatatagttatatagggatcccataaatacataagaaattattatttttgttcaaattatgaaaatagtttttgcatagtaatataaaagatgtgcaaaactagtttatctagaaatatagttgttataccacaacaaaaattgtgatggatactatttgaaaccactgtataatttttttttgacctctattagggttgtattaaaagactacaacaaataacaaactaaattgtctctcttttgtttaacaatgttcacacatatatattatcggatgtaaacatgggtttattattagatgcaaggccggcccaataaattattggatcttgtgctatgctccaaatttttttacctaaaactctaaatatttaaaaaactagaccctgttttgcaattatttgaaaatttggaccctaaaatataaagaaaaaactgaataaagaattgggacccggtgcactagcacactcagcacctcccaagagtcgggcctgattagatggtgaccatactgaaacaaactaatatgatatgtcaatgttttgagtttaattctatttggtttctcattattcaaaataactctcattaaatggaacaaaaactcttattagtttaaatcttaactttttttatgaagagaatgggcttctttacctactacactcaatgagccctctggttcgtttggtcatcagttcaaatggacagtgactttggaatagatctcgaccgttggtcatcatcaccctaatgctttgtgttgccgttggattggtcatgtcatgaccaaaccaatttgacttctttatgtgatgtaaaagtcttattgctctcaaataatcttctaaaccatccacgcgcctgactaaagcaactgaacgtcagacgctacaatagatccaaattaagaaaatgggaatacaattttttttttttttggttgggaaaataatatctctcacttcagagttcagatatgaaaataaatatttatatcttcttgttaattcgacataaattttaccaaaaaaagagaaaaaaaaactatcgtactctttgttttaaaataatttaatcgcataaaatacaattaatttatagcattggtttgtaaataccatggaaaactcataaccaagaaggaaaaaattgtattactaattgattggtgagtgggtgaccaaaatcatttgtaagaaaggctttcgattggcatgttgttcattgttcttgtaacagttgcatcttaagtaattagtatatacgtgtaagatttatggaaaatggagtttaatggatggaaacaaacaatatcagtgacacaatactattttgcccatgctcaaatggacatcatgttctattttttcttgacaagtagagagattcatcgctttttaaaatcaaactttcattttgtagtgggagccttaattgtatttgacccataaatccaatttcttcatggacgtgtcgtggtccattgattaaaataaaaaaagtagaataaacaatcgcttttaattctttttaaaaacaaagaaacaatccaatgtaattttcgattaaaatcattttgattcgatgtgatattgtgtagagaaaacttcattagcaattaatttactaaaatatagtaattgtagtacaaaatatatttcctataatctaagtacagtattttatcgatactaaatctaacagtctaataatcaacgtccctttcctatacatgaatgtacaattaaacaaaaaatagaaatttatagactcaatgatttaaagtacataccaccaaatatggcagcctagtgattgttgtaataagcttttctaaaatatttctacctgattttcaagctttataatttgtatttcagattcttatttatataccaacaaaaatatctacgtaaaatttatcattttcttaaaatatattttggtatttaaaaggaaaagaaatagagaagaaaaaacaagaaataaaataaaaaaagagaagagagagaggagaggagaggtcactaattgtctatgtttggcgcgtatattaaccaccaccggcaaaacacccacgaaaaaggcgaccacgcataaagaaagatcaaaacttccccatcacttccaaaaagcaataacacacacacaaacttgttaccagggaaattataaataaaaatcgtagccgaaaattataaaaatattttatttttattttagttcaaaaaagttttcagctttgaaggcagagagagagagagagagatcaagcgactagtgagagtggtgttgaagcgaaactacgatcttcttttttccttttcagattttcacaatcacaacactcttctttgatcggagctctaacattccgacaaaagctcaaaaaaaaaaaaaaaaaagacttctttcttttgctcttttgagggatttgtctccctctgtagagattagggtctatcaatggagcggtacggtcgccccggtgaagaagggtcgcgatcggatccatctcttgaatggacctctcatggtggtgaaaccgctgtcgaaggtaatgtctcttgttaaagttttgatttttcgggattaatctgcgattagagctgtgaattctgattcaaatgcgtgtttttgtagctccgatgtggcggttagggttgagcggcggcggcggaggtggaggaggtggagaatcgtacccggagagacctgacgagcctgattgtatttattacttgagaaccggcgtttgcgggtacgggtcaagatgtcggtttaatcacccacgagatcgtggagcggtaaatgatttctcagtttcagattcttctccttattcaccaatttcaatttcagatcagctactgagagtctgatgatcagatcgttaaattggtcactgggcattgttaaattaaagcacatataaacaaaccaaaatgcttaagaagaagttttttgtaagctctgattttgatgtttaggttattggaggtgtgagaggagaagctggagctttaccggagaggatgggacatccggtttgtcaggttttgttatctgaatctctttctgatcaaactatgttccggttttaagcaatgcagtttcaatttctctgcttttgtttatttaagagaaatctgtgaactttttttttttttttttttttttttctcagcattttatgcgaactggtacgtgtaaattcggtgcttcttgcaagtatcatcatcctaggcaaggaggtggtggtggttccgttgcgcctgtctcgctaagttatttgggatatccattacgcccggtttgtcttctaatctctctaatggttatgtggatgcttccacattgtattgtatgatctctaaaagctcttcaaaattttgattacagggagagaaagagtgctcttattacttgagaaccggtcagtgtaaatttggtttgacttgtagattcaaccatcccgtgccactcgctgtacagggtccacctcagcagccgcaacagcagcagccacagccacagccgcagctacagactatttatccgacacttcaatctcaatctattccttcgtctcaacaatatgggttagttttgactaggccttcttttttaactggttcatatcttcaaagcccttacggtcctccaatggttctgcctcctggaatggttccatactctggttggaatccttaccaggtaaatccatcttctaagcctttatctcgcttttgtaggattcttcattgctactctttttgtaaatgaatctatcgactttttaggcttctttaagtgcaatgccttcgcctggaactcaaccgtctattggatcaagctctatttatggactcacgccgttatctccttcagcgactgcatatacaggaacatatcaatctgtgccttcttcaaattccacctcaaaagagtttcctcagcgacctgatcaacccgagtgtcaatacttcatgagaactggtgactgtaaattcggatcttcgtgtcgataccatcatcctgtagatgcagttccacctaagactggcattgtcctcagctccattggccttccacttcgtcccgtaagtcttttttcatttttctagagatacaaactcgatccaatataagattttcaacgagtcttgatatgatacgtttcaatgtatttgacagggcgtagcgcaatgcactcactttgctcaacacggaatctgcaagtttggaccggcgtgtaagtttgatcactcaatgagttcttcgcttagctacagtccgtctgcatcatcactaactgatatgcccgtggcgccatacccaatcggatcatcctcactcagcggctcatcagctccagtaagctctagcaatgaacccaccaaagaggctgtgactcctgcagtttcttctatggtcagtggcttgagccgtcctgagccagctgagacgagtggtgactcagccagcgtcagtggcagcatagaagctaagacttcaagttaaaaaaaaaaaagagaggaaaatattctcaattcttcatgaactaagcaacattaagaaaaaaagagaaaagaagattatttttggggtctgagatttgatggaagcagagagactaaagcttctgtcattgaccatttgtccatatataatatattctctcatacggccatctctcctctcttgtttatttttcttgaataacgaattactaataaatggccttattcaagcgacattcatcagaagtcccctgtttttattccttcatgaatctggaggagtaatttaaaatgtctgcgaacgtagaaagaagcataaacggatatagtgtacacattttctcttcctcgttcttgtaagttgtatccaatgacatctacattcaatcactgcacattgcacgaacaatgcctatgtacatcttctttccacaaaagtatcagatctctcctctctaagtaaataaaatgcaaccgttgaacaaagaagtaataaattgtggaaaaaatcgtctgttcatatatccctcagaaactcataacttttgcttaagcttcagcctaagttgccatccaatggcctcaaatccttttgttcagtttctttacggaagagaagtctacaaaattataattaagtcatttcattaaatccaagtcaaaccaggacaaacattcatgaaagcagaatgaaatccatttgctatgtttttaacattagcttaactatatgtaacaacaaagactcgacagatccgtaaacacataatctcatctcatcgacaggtgcttccgcttcttcgtcgatgaaggactctcacttgcttgtcttcctaaaggtcgctttgatggtgttgcactcttcaaagattaaaaaccagaaaagcattaaccacctaaagaaatcaaatcaaaagaatacaaccttatacatgaaaatattgcattattttaccttcgcgagcttcttctctttgcgggcttgcctctctctttcatcaaactcctggttctctttctcgatcagtcgaatcagagtgtcgcatcttcttgcaagttcctgactcgtgcgggatttcacaaaccagtcaaacctgaacacagacgatgtcctaaatgctgcctttagctcatcccaattcccataaccaagtttgtgaatcatgcagatctgtttttcaccaccaaagttcctcaacagtcaaaaacttcatgatataattaatgagacagaacagcaaaaagggaaacgagaaaaagacataccatgaaacggtcacactcttcattgtacagcttgcctttgttctgaccatattgaatcttcagttccagccaagggtttctgtagcgatccagtttcttccctatggccttcatgatttcgtctttcctagagatccttgcctctcccctctcaatgttcttaatgattctatcatagtctacatatttagagggaaagatgataaacttacttagcataagctctttttggaggtaggaattacttagaaacatgtaaaaacactgcataacttagcattgaaaggtgttacttaccgttcagctccttgtaccgctctttaaatactttggcatatctttcaacttcttcctctgttttcccttccatctcagaggcaatgctttttatgtcgttgcggccatacttctcacaagccctgaggaaagtattaaaatctcttctgctccatgttgagaaaccctggagattgacaattacaaaaaattaattaaagcctaccaaatcaaatgtctaagaccactctaacatcaaacatattcacttgcctcctccaataatccctccttttcttctacttcttcagtagttaagggatccccaccttctaacaaaaaaattcttaatcagtaataggtttgctgaaaaacatgttaacaaagtgggtacatgttaacaaagtgggtacaagcttgaccttctggttcttcaacatcaattgtgtctttcaactgatttttctgatgtgtttgctgaaaccaaaaagcacaaaaagaagcaagttgcttttataaggcaaaaaaactcgctcttaagcacatcaaaggaatcaagtgtttcgttttgagagaggcctaccatgagataacgtacttccttttcatacaactcggtcaatctctgaatgttaaagaactggaaatcgtgcctgaaagagggacaataaattagatttctagtgtaagaaaatcatcaaaacagggaaaaggcattcaacaatgagatggaggttgttgaggtactcacaactggggcatgcgcggaattctaggctctttaggtttagctggagcaccttgccgcaatgtttgcttaaagtactcagattcagagtagctgaagatacagtagataaaacaaaagggatgtttcttttagatatgaagactggcaaaataggactgcacaatgtataagacagaagtaatcattacttgcgctttctctcccgcttggggggatcattccaattgtcgcttacaatctttttaaaatcgagcttgttttcatcctatgaacaaatttacaaatatattagtaaattttatcatcagtaatgcagagcaaagctagggatatgacatgaaagttaagactatgcaaagaaatatacaagttaccttattgtcatcatcaaaatcatagaagtcagcacctacaacaaataaaacaacagattatcaaaacattacaatattcacacaacctaataggggaaatagtaggtaagtgacacccttactgtcatccattttaaactgtatagcatcttctgtgaatttcttcatcttagcatcaagttcagctgttgcctcttctcctttggcaatgattctatcaatatcctcgtctgtgattgtgctatctttagaactgaacaccatctcagcaccatatcttaccatttgaagcaactcatccttattgacagctgcatagttaagataaataccaattctgtcagagatgaaccaatgcataaagcaatcactgtataacgcacttacttttctgttctgccaatctcccttgttgaataaccagagcatcaagtgctaacttcttgtaagctctttcaatcactttctcctcaatagcagactgtaaacaaacaacacataattaattttaaacctctcatggctgttttaacttgaaattcacggagaggagaccaacctcagtgcagaatcgaaacacttgaacttcttttttttgaccaatcctatgggcacgatcctgagcttgcaagtcgacttgtgggttcctgccagaatatgccagactcgtcaaacgtgaagagaaagttcataaactacagtggacaatgatgagagacttaccaatcactatcgtaaaggatcacaacatctgcagtagcaagattgataccaagccctccagctctagtagataacaagaaaacaaatttctcacttcctggcttgttgtaggcttctatggaggcatctcgttcgtcaccaccagtgtttccatcaatacggcaatacaagtaaccacgatacattaaatagtcctcaagaatatccaaaagtcttgtcatctgacatgtggaaagaaaagaataaggctcagactttacatagacaaaggaaaaagagaagatgaactgtaagaaaccattatatccagctgttctgtattagcgtttacctgagaaaatatcagcacccttgaatcacgttctttcaacttaggaagcaatttatccaagagaaccatcttacctaaaataacaatatagagatgcttcataaaaaacttccacagaaatctgaaggatctagtttatttctagccttaccagcatttgttataaggtgatctcctgtggtatatgggggaccaggttctgcaccctggaagagataggggtgattgcagcatttacgcagttgcattgcaatgtttagcagacgtttgcgttctccaccagcattaaccgcttcaagatccttctgcagtaaagccttgtagtattgcttttgcatctgagacataccaactttaagtatggtctccttcttcggtggcaaacctttctcaacatctgactttagtcttcgaagaagaaatggtcgaagaacctaaaaagatacatgaaagcaattaacctacgactcacacagaacagaataaactcaatgcaaggaatgggtgcatccataccttgtgcagttgttgcacaacttcttgctggtcattctcaccagaaatttgaaaccattcatcaaaagtctctgctgaactaaaaatctcaggcagaagaaaatttagaagagcccacagttcatggagattattctgcatatatgaggacaatatgagtacagcaggctacacagtcattatacggtaaatattaaaagtgcccggaaaagcaaaagttaagagtgcaaacagagccgtacaagaaaggttgtttcaacattcaattagaagcaacttaacaaagaaaacttcaatgtccaaatattcaagaataagatagagcaaacacctgaaggggggtccccgtgataagaagccgataattggtgctaaaaagtctcatggttttagaaaggagtgaattctcgttcttgattcgatgcgcttcatcaatgataatataacgccagctaaaccgacgaagtgctgtcttctctttgatggccatctcaaagcttgtgacacaaatatcaaatttcccagcaactagcaggtcttctcgaatatgtctctgcatcagttagcagacatttcagaatcctgggataaacgtttacatgaaattctgaaatggcagacagctcatgacttaccctctcctcaggattaccaaggaacttcacagcacgtaggacaggacaaaaccggcgaatttcgttcatccaattaccaagtgttgattttggagcaaccaccatatggggaccattgattcccctgtattcatgaagatatgccaacaaagaaatcgtttgaagcgtcttccccagaccctagaccacagggaaaaaaaagtttcatgattagcatgacagaatatagagaacttattctgcttggatcgttgggggagaattatttaccatttcatcagcaagaattccatttatgccattctcataaagacgaatgagccagttcaaaccagctaattggtaatctctcatcttcccttgaatacctgtcgattgagaagaaaaatagatgaatctcaagctttcccagtaatttacgctatactacatactaactgtgaggtcacaaaaatatgtatggttacgcaaatggacggagatgtcaatcatattgtacttgttgctcgagactagagagacgattaatatacagtaatcctagactaaagagcaaaatacaggtacttacaagagggctgtgtgagtaaccgtgtgtttccagatccagttaagccatcctcttcttcctttagatactcttcgtcttcctcctcttcagttattttggaagcatgacgtcccctgaaggtagaagttaaaaccacataaatcagggcctggctcatcatatttactctgaagctagaagcaatgatgaaccgatattttaggaaaaaattgcatctaacacaccttccttttgccttcttctgagaagaagatccatcacttttagcaaagtgggcaaataactcagtttgctgcagaagatacttcagtctcccttttcccttattgttctaaaacacatggaatgattcagaatcgtcagaacttaaaagcacgagaacgaaaagtagctaaaaacctgaaatatatagttcaaacaacgcaccatatccgcgtcaatggaagcattctgcgactccagcatctcttgaatcttctgcttcttcaacttctgcatctctttaagtctggctttctcacgtttgctgatttcagctttttcctcatcttcttcgtcctgcttataccacaatgagccaccatgcgcagacattcaatgaactttcactcaacaaaaattcgactaaaactaacaaacgaaggaagacgcgaacgccgaatccattgcattaaatgaaatttcaactttccaagtacaaaaaagatgcagttcactgagatttcaaaaatcacagccatcaaaacgaaattagcctgcagctacctcgtaatcatcttctacgggagcagcctctccgtcggagactggtgattcgtcggcggcggctacttcgtcatcgtcggagccagaagaacgagcaacagcctcgagctcctcctcatcttcttcttcattatccttaacccgctcttcttcctcctctgacgagaaagcctcatcggaattcgaatttctcgccatggaagctacgaaatctgctttcgccttgagatcgagggttcgcttcgcttgtgagaaagtaaaataaagattttaaaaaaaaagtgaaactttagatacaaattgcaaaacgaccgaagcttcagggtaatttgtaaccgttgattaagctgaataaatatatggctacgatgtaactagtcgcttcatcgaacggggaattagtaattaattacccgccacctgagcaagagagttgttttggaacattcgcgatttgggctttgtttaatcatagttgggcctgactgacccataagacccactttcaagcccgatattttccccaacttattactatgctggagctgctcgagaaagattctccagttacactatttttaatctttgtgattgatcatcgcccccaatttgttaaagctatctctaattttatatatttggatttactaaaaccagttaggtattattaagatatgaaataaaaatcatgatgagttcatatatattattactgttaggtctgactttttttgtgttgttctcagacttgtgcagtcactctgtattggtatcaagagataaagtttggtgattttgctaagacaaaactactctatttcgactggattagtatctgaaatagctttatccatgttaaaacattataatatgtttgagaagtgctgaagtggtcatgctactgggacatttgtttcttgcagtttaatgtttttacataaaataagatatccatttacatgatttgcagccacaagcagaaagcaaagtgatacctaagagcatgtataaaattacctttttcatgcagatgattggttaaccactcctactgttctttactctccttttttgtattttgtttttgattaccgtcgcccaatttcctcaccaaccttcccggggttggcctaacacattcccattgtatatatctacattatccataacttatacctatagaaatatattaatttttctattaatcaaaaatagatatgcatgcaaaatttgttgtaacaaacattatatgttaacgttgaaataaaactacaacatctagtgaattttccaaaaactatttcgaaattttaaacaatgaaaaatgcaagctagaaattaaatgaattgatattcatgttcctgtatatatacattagtgaatagtgtaaataaatataaatttgtttcttggcgtgtgggtaataactacaactcatcaccgggactatctatatatatatactcacaaataatctcatgtagcggccaacttcataactcacagtccaaacttaaccacaacctaatccacaaaagagttatagaatcatctgatggcgtctactgagaaccctgaccctgaaactggcaaatctgaaccgattcccgcgtcggctacaccaccaccctcatcagccgccagtttcctagattgtcgtaaaatagacattataacaagagttctgcttttctccgccactctgactgctcttatagtaatggtgactagcgaccagacagagatgactcagctccctggagtttcgtctccggctcctgtctccgccgagttcaatgactcgcccgctttcatgtttgtctctttaattaattaaattcctccatgtttgatcataatcatggaatgttttctagtttaaacttaatgtgttaaattggctatatatctatgcagatacttcgtggttgctctcgtggtagctagtttctatgcgctcatatcaacacttgtctccatctctctactcttgaaacctgagttcactgcacagttctccatttacctagcctcgttagacatggtaacttgttttacaaggaactttgaaacttccatataccatgttaattagggtgttttaagtaataattccggaatatgtatatatgaacaggtgatgctggggattttggcgtctgcaacgggaacggcgggaggagttgcgtacatagcgttgaaaggaaacgaagaagttgggtggaacaagatctgtaatgtctacgacaagttttgtcgttacatcgcaacttcgcttgccttatctctatttgcttcacttcttcttctagttttatccatctggtcagcactctccaagagaacatgaacaaaagcttataaatccatcctttccctgtactgtgtatttgttcacacgtgtttgtctgtgtcttgatttgttttgtttatgttatattaatgtaaaagcatgcgtttctatatacagtacgaagttgcattcgtgtatctcttgtcgcgtaatatactaatatgtaacttctttatccaaaattcggtcttcatatacaacaaattaagattcaagaaaactcttcatataccaatcactgaaatctctctcgagccctgagacattgcttgctcacatcaagacttgttgcaagaaacacggagtcatcgtctcaggacaaaactcatccgaaccaaaccttggcggttttgagaggatcacagagaacctaaaggacgaaaatacagcgatagatctgttcacttaccagagaatgggagagcacttttcttttccccagatcatttccatgccgtcacagagtttgtccggaaccttagtcagtttaagctaccagaagatgatcttcgagcagaggaagaagaagaggagaatgctgcagccaagaagaagaggagaatgctgcagccaaggagtttttgactcactgtagataatatttccatataaagaaaaaacaaaccttccctcttcctgtgaactaaatcctgtagcaaagtaaattaattttgtttgtaaatttcagaaaaaaacgtaatcgtagcctatttctggtacgcttctttgcatgaaagacaaataaatacaacagatagatttgaattgtcagaaagaatccagagaaagctattaacgttcctgagattttggacaagtactacaccatctacagaccacaacaacgagcacacggaggtgatttaaggttagtctcttcattattcacaggcaattctggtttcaaaactgctcaggcagatagcaaacgcttgaaacgcagaaatcggatatccataatccatggtaaacatgtccttcccaactttcccaaactggagtatgatcctctcagatgtctgccctgcttcacagtcactaactgccacaagctgaaagttcttaaccgaagccactgtgactcgaccatggaaatttaagcaccagcaacgtaactgctcatgccaccgtggagctttgttgctcagcaccaatggtggatctcccaggttgttgcctgagtcgctacatgatgcactattactgcgcaatggttttgagtgagacctaaagactggtgatgaccgactggaaaaagagcttatggatgttgaagctactactcctcgcgactccacgatgctcataggtattgtatccatgatgcaacgcattcttctcggtcccctgttattaataccctcaaaagactgttaaaatcagaatggtcaaaagactagaagaagcattatcatacttgaatgtaaaaactgtttaccgagagcctaagacgtttaactcgtatgaaatgtgagcgatggggtaacttccctgaggaactctaggtgaaactttgatgaaattagaagagcggctcttctgcatcttcgctgctccggtctgactaccatcaaagaccgtgaattttgttccaaggaagttcgatcttgcaaataacaataagaaaattggaaacatgcatacttatatatcgaaagaagataactttatatgcaaacctcattctcccaagatacgcgttgcttctctttgagatatcgtctgaacgcaaagagatgatgtaatcagtgcaagttgcgcgcttcagcttagaagcagcaagaagaaacttcccgttatccgtcaaagctgtcagaaaattagacaagagactcttgttaacaatttcagaactcagaaacgaagtaatctctttcttgataaatctagaagaagaacagagatgacttacaggtagttaatccgagatagagatgatacgattgagtatttcgattacgttttataaagcattgaactagagaatctcttggaccagactgcatataatacattcaaaagtaccaatacttcagcttacaaaaccaagaaactgtttatctatatatcaatgatcaaagagactaaaagcttttgttgagctgagcacaagaacacttaaaacgcgaccgcaaacgctactgaattgtcatatgttatgagatgaagtaaaggagctaactttatgtttcaattcgatcactttatactcaaaaatcaaaatttacagagaacctgcttgagggagatagggaaagtcaatttagaggagaattcaggaacagctacaatctccttggtgagaatcctccagctacgacaaacgccggcacaagccaccacgtttcgccgcgacggccaatcgccgccgtcaacagtctcaaccctaatcaggatttctctaagcagctcctccgggagctccgaccagctgaaagggtctgaactattagcggttgaggcggcggcgtgaactacacggtgtggcctagaccgcatttcctggagtaaacttcggaacgtcatgcggtgagatctatagaggagtttaagagatgattgatgatgaaaacatgatctgggtttgatgaatattatacgagagaatcatttggtgtgaagaagaaggtaggagaagtggtgttggtgagagacgcgaagaagattcggacaataatggtgatttggaggcgtttcctttttcttcttcatcttcttaaacgcttttaccgctttattagagaatttgtactttttcttctattattcgctgataggataaggatgataaacctgtgtggaaaaaacaacaacaaaaaatgataaacatgacgtttttggtatgagtttgatcttaaattcacttattttttcatataatccgttgactagttttatccactactatataaactaaaactagactagataaagccgcctcattaattgcacgaatttgtcaataaaattaagaaaaaaacaactactgtatacgtttcggtggtgatcaaatcttcattttcgtagatgaggaatgaccaaaatattttaaccattgatcactaattcagaatctattttttgttgttgttgtgtaacagctaaaattgaaaatcaaaagatacttttgaccggccataatgtggaagtcattaatgtgtcttacactatcaatctatcatcattcgttacttcttcttctacattccttttctttcttctttctttcttaagaaaacaaaactaaataatccaagtagctaaactatagattcgttacttttcactgtatgagtatgaggctgaaatatttccaattgtcaacacttatttatacatgtattatagttatatgtcatatacatgtaacatgtgtggcgtcttaaaagaaaagtaaatagataataataatgtagatcggagagacacaaaagcagaccacgaggcattcaaaatgccaaactaaagggtcacatgtttgacccactactataactaatctgctgttaatgtttcaatatccatgtaccatgggattggttcattcacatttgaccaaccagttaagcctcccaatagctttgaaaaactctctagtttttcttttcttttcaatggatcggacatgttaacaacgttcatagatattaatacaataaactgaaaacaatagtttaccaaaaaatcataaaactacattgttttgtttcgtgtatatgttagatgcctgtaatctaagaatttatactagttctattgccctgtacatgtttttcttacccttaccgaaaaattgaacttttagccttgaattctaagtttcttggtcttcaaacaattgaactacctatttttatgtttcaagatggtttttgatttcttatttagaatacaaattttgcatctctaacaaaataatgaagatgaaaggaatttacacgatgaaaaaggataaatcgagacgtacaatgatgaacccttaatcatgttgacccccaaaatgggtacactagaattggcttttgccctctctgtaagtgcaaagaataagaacagtgaaagaaaaaatcgaacaaacaaacatctgggcgactagtattatctaattattcatattacaaaagctatttccttgtaatgatgaagatgaataagtactctttttacatccaatattttaatcaagacccaaaaattagtacatatagaaaacatgacaaaaaaaaaaaaaaaaaacgaccaagaaaaaaagagtccataattattaattagtacatatgtagattaccaagaaattctctatttggtatttatttttcatcagagattcgtggaaaccttattaaaaaatgaccaacttatatttaattatcaagtaaacgtcgaatgacataagaaagaacaacccccatctatcacaattaatataattcaaataaatattttggggtcagtttatgaaactggttatcattcaaagtacgtaatttagttctgttaaggaagtatttggctattatgtaatacggtgccataaaaagaatacagtacaaacagtatattattcagttttattcctaaaaagagaataatcctaagatcatttacatttggtcataagaaaaataaaagcgtgttcccctctgttgttttttgatactccttttacacgacaacatgataaccaatgagctaattccacttacggtcataacaacggtgtaacaaaatcatctcaaccgtttaattggaataaagttcttgagatggataaatagacgatggagattagctaatatgagatttaaaagccgttgacctctctctattccacttggcttctctgcaaaaaaaatctttatttatatatttacgccatctttggcggtctctcgtcttcgatcgtctctttgctgtcccttcaacagaactgttacatccctctctacgaccaaactgaatcattcgatctttcgaatctcgtcataactctgccaggtaatatgtgtttgaatgctttatcgattttttcttaaaaacatttctgtggatgctttttaatttagatccttttactgttcatggaggtgataaattgagctcttgttgatgaagattgataaattacatgtttcctgacacaaactctaaaggaattttcaaattttcttggaattttccagggttttgattcttctggaacattatgattttggaatgttttattattcccctatttaggaattttagtgatttgaatttttctcggcggctaaagaaggaaactatacaattttagatactaattcaatcagaaatctaaattccacaaatcacgcttcgtgtttttttacatatatataggaaatatactcttaaagctgagatttggaaatggtgatcggattaagcacaatgctggaaaaaacagaggctcttttcgcttctgatcatgcatcggtcgtctccatgaatttgttcgtagctttgctttgtgcttgcatcgtgcttggtcacttgcttgaggagactcggtggatgaacgagtcaatcactgctcttatcattgtaagcttcgttttttttgtttccccaaatctttaaacacattgcttagaaacattctaaatttggattacgcaaaaatagggttcgtgtactgggattgtgatcttgcttataagtggaggcaaaagctcaaggattcttgtgtttagtgaagatctcttctttatttatcttcttccaccaattatattcaacgcagggtaagttctttttatatagaatttcatgaaaaattgaaagtcggaattgagtaacacatttttttgttacaggtttcaggttaagaagaagcaattttttcgcaacttcatgaccattatgttatttggtgctattggaactctcatttcatttgttatcatctcatttggtaaaaaaccaatctcaatcaactcccacatttcaatatcatgagtctcatatattttgatgatgtttccggttttgtttttgttatggctaggtgctaaacatcttttcgagaaaatgaatatcggtgatcttaccattgcggactatctaggtaccctgaaacaaagaaaacccttttcaagttcttattcattaagtctcatactgtttaaatctgtactgatgattttgcagccattggagcaatattctctgctacagactctgtttgcaccttgcaagtaagaactttttttctgaaacattcaaagatattattctactacattttctaatcaaaaattaacttgcacgctttgttaaatctaggtgcttaatcaagacgagacacctctcttgtacagtcttgtctttggagaaggtgtagtgaacgatgccacatcggtcgtgctcttcaatgcaatacagagattcgacctcacaaatatcaattcagccatagctttggagtttgctggaaactttttttacctctttatcttaagcacagcacttggtgttgcagtaagtttctttctctccgctcctcaaatttctaaacccgaaaaattctcactcgttttcttttaggctggattgctcagtgcttttgttatcaagaagctctatataggaaggtatattcgtatctactgatggttaaaaatgtgattttaccctttctttaataatccttttgctttgtttttgttttgttttgtaacatcaggcactctactgatcgtgaagttgcacttatgatgctattggcttacttatcatatatgttggcagaggtaataagaaaaatttgaaacgttttggttacattttttccaacagaaaatgaaaacatgatacatatatcctttgcagctattccacttgagctctatcttgactgtgttcttctgcgggattgttatgtctcactatacatggcacaatgttacagataaatccaaggtcactacaaagtaagtttctttttcttctcccaataattagaaaataactctactaatttgttgtgcttgattgactaaactgtatacgttttcttggcgtagacatacttttgctgcaatgtcatttctagctgagatttttatcttcctttacgttggaatggacgctctcgatatcgagaaatgggacgttgtacgcaacaggtgagacttagagtgtgataatacatcaatatcttttgtttcattttcataatattgtttaacaattttggcagtcctggtcagtcgattggagttagttcaatacttcttgggcttattcttctgggtcgcgccgcgttcgtgtttccactttccttcttgtccaatttaacaaagtcttcaccggatgagaaaatagacttaaagaaacaagtaaccatttggtgggctggtctgatgcgtggtgcagtgtcaatggctcttgcttataaccaggttttgatccgtgaactacaagaaacaaagataaaaaagtgatctttgggttttaataagttcccatgacttaatctcttctctctgttacatcatagttcacaacttcaggacacaccaaggttcttgggaacgctatcatgatcaccagtaccatcactgttgttcttttcagtactgtggtacgtttcaacactttgttcaaaccggtttgcttcctactgaagtcaaatcgggtttagcctatccaacacgtaacctaatctctaaccttttttgcaggtgtttggattgctaaccaaaccgttagtcaaacatttgcagccttcatcaaaacagtcctccacgaccgcgctgcagatcacactaagatcttctttccacgatccgatcctccatgagccgttgctcagtacccaaggccagtcagaatacgaccctgaacaacatgttagcttcagaatgttctggaaatctccgtccagggccattcatcattactggaggaaattcgataacgcagttatgcgtcgcatatttggtggccgaggcgtttcaccagtagttccaggttcacccattgagaatagtgttccgcaatggagtgaagaagtagaaaacaaggaacaaaacggcgaaccttgatgaccataatgacatgagtaagatctttgacttgttgatcgcgttttttggcgttgttggacgcagacgcaacatgggccggctctaattttttgcctccagttttggtataatggttttggatgtgagttcttatttgcccggtgtgattttttggtttgtggtgtgattttgtaaagccggtccgtttttcgttgtttgagtttgtggttttgttgaaaaattgtaactgtccatgtaaatagggactgatataggggtgacttgagtacacctagctcatatgcagacgttagcgtctgcgtttggagattcgagtttgcgttggtgggacgtgagcagattttttaatctaaagtttgtgtacactttcttgtacttcttatacaaaacaaagggacacgaatctttctaatgttcataatttattactgggttttgcaagaaacttgttgacaatatacaaataaactgataacttatatataaatataacttttgagaaatctaatcttatttttatgcttgcacgtatataaggacaaagtgagtgggtatcaatcaaccttatagtaacatatacaatctttcacgcataaaaccctataatgtgaaaacaagaaacgtcctttacatatttcttctcacctagatattattaattttaatattgagactttgaaaccccagaaataagataaagtgtgggacaagaaaagaaggcacctttttttgttgttgcttttagccgtgaggccagcatatgcagtaactcacatgcatgcgcctctaaccttgtggcattttaggaattatgcaataatgcactatacttaaatacgttaattcacaaagtaatacattcattcagttcataaacacgtctcaagattaagacaaaaataatcataaaaaactggtgttttacataaacttatgtcgaaattaattagtagtctacatataattactcaagtgttatttgcatgtaaacagtacaaatttttggaacgtttgattttgatactactataaactgcagtatactgtaaagcatgcatatgacgtcactttaatttgaaacgtaatttcaactttttcaaaaggttctttagcttagcgataaaaaaaaaaaaaaaagttagtgtatagtaaacgaacaaatgaaatgaaaagaagagaaaagtataagtcctcaaagtgtattgaatcacttaacggtaaattagtttttatttttatttttatccagagttcttaagttaattatgcatcaattatgtggttctgacgtaatatattacttgcgtttttcatctaaaccaatctaaaactgtaacaaaatgttaagtggagaacaataaaaaatacaaatagtaaaaaaaaattgaaaatcaaactaaatctaattttattcgttatttttaggggacaaataaactcatgaaaataatgacgtacgtggtctaaaatatatgaatgacctatatagctgaaacggcaagaagccggagcgagaaacaatagacggcggcgaagacaaagtagatgaaaactccgggagcttgagaagacagagaagcaagagatgaagccggaggagaagccgatggagcgaaggcgggatcaggatctgcggaaacgtcgtcgttttctggttcaggaagtgttgaagaagaagggatggtttgagtggaggagacggcgggtgaagggaggagaggagcgatctccggtgagatcttttcttcagagggagagattgtttgcgaagatgggattgtatttgtcgtcggcgaagagagagaaagtgaggagagaaagatgaaggtgatgagtgttagcaatatagatgaagccatcttttttggttactgtaatgatgaacaaatcaaagctgagttgtttttttccttaactgatgagagcgcattttgtgttgtaataatgatactgtctctataaaagaaaacttttagctctaatagtaaaatattataaattgattttaaatggaatttgtctcacctttttccaaaaagattattatttatcaatttaaaggatgtgttcggtggaaaagaaaatatatttgctgaattcttgaagatgggcgtagatcgagttttcactttttagtagaagctcttatatattgcacatattttcgaataaacatgtgctttactttttgctgaaaaatattatgttaatgcaaattatacatattgctaagtacgagtaaaggcatctccatccatgagaaacctacaaagtttctaaaacaaaaaaaatattaatattatattataatttaattatttgattaaaaaagtaattttgttaaaaaattgaatcaatagtgagatgagaattgtcatgatgggttgtagagaatatctcaaaatttttcaagtgagaaactttctacattttctctccttcattttcattatttttatttttttaattgtgaaaaactcttatgaaataccttcaatggagatggtctaattacgtttgttgttgcctcgttggatgttcaaataaaaagcacattttatattgggttgttcctaaacaaatattttgttgtcttttgtactaaagtttattggcgagttaagaaaagctttgtggtgtgtgggaattattattattatttattatttattgttctttagtttgctatgcaattcgagcccactaaagaggcttcctatgggcccaaaaaacgcagcccactattgtagtgcaaaacgtgctgagttttctacattgcatgcccaacaatggccaccagtgtagttaaagactcaagaacttgctgacctctatttgtttgactttcttttttgtgtgaacaaaatcacatattgttgatgtcatttgttctgctataattcttaacttcagattacagataacgaattttctcttgatgatttaaacaaacatatataattgtcaatatcagaaaatgaaaaggagatataaataatttttttttgcgcctaatcgaaacttcacctaccattttttagcgtataaaaacgttaaaaataccaaaatttagaaatccaataaaagttgtgaaaaaaagccgcaaagggtcgttgttgtttgtcgcctctcaatggcagcttcttcaactaatgctcgtctcaccaaccctcctcgtctactctccaaaccccgactttcacctacctccgtcgccaatctccgttttccagccgccgatttctccactcgcttctttgccgattcttcgtccccgcggctaaggagtgtaccgtttccggtggtattttccgatcaaaggcgccggcgaagcatggaacctagcaatgtctatgttagtgattcttcctttagttcagttttcttttgttgttttctgttccgtttttattggagaaggataggtaatgatgaatttgcagatttatcgcttcaaataaatttggtattagttttggatgaagactttgatgtttcgtgtacaacattggtttagctatttagaatcgatcttcagaatttttgtttagttctgagaagtagttggatttttaattgattgtggaatttatcctgttttgtgatctcaggtggcttcaaattccacggaaatggagatcggaagtcatgatatcgtgaagaatccgagcttgatctgtgctccagtgatggcggattcaatagacaagatggtgattgaaacgagtaaagcccatgaattgggtgcagacttggttgaaattcgattagattggctaaaggacttcaatcctcttgaggatctaaaaaccattattaagaaatctcctctacccactttattcacctacaggtttgtgtgttcaagcttgagactttttaaatgtttgatatcgaacttcttgtgctttattgtgtcgagctttcaataagttacgagctacttattgggctgcagtatgagtaatgttgttttttgtataatgtctgctctttagaccaaaatgggaaggtggtcagtatgaaggtgatgaaaatgagagacgggatgtgcttcgtctggccatggagttgggagctgattatattgatgttgaacttcaggtgaccatcgtaatatattttggatattttagaagatgtttttgatgctaattagtttctcctactttatatttgtatgttaaggtggcaagtgagttcatcaaatctattgacggaaagaagcctggaaagttcaaagtaattgtttcatcgcacaactatcagaataccccttctgttgaggaccttgatggccttgttgcaagaatacaacagactggagccgacattgttaagattgctactactgctgtggacattgcagatgttgctcgcatgttccatataacctcaaaagctcaagtaagtgcgtactagcatgcagttaaatcaattgtgtgctgatttctgattgtgatttcatgttgtcatcgtctgaacttttcactcaaatttcaggttcccacaattggacttgttatgggtgaaagaggtttgatgtctcggattctttgttcgaaatttggtggttatttgacctttggcaccttagattctagtaaagtttctgcgccaggtcaaccaacgatcaaggatctgttggatctttacaactttagaagaattggtcctgacacaaaggtatatggaattattggcaagcctgtcagccacagcaaatcacctattgttcacaatcaagctttcaaatcagttgattttaatggagtatatgtccacctgttagttgataatcttgtaagctttcttcaagcatactcatcctctgatttcgctggattcaggtatgctataacggtgacaaaaattgttttttctctagagtagtgaacagaatcatacagattttatttttatttgttaaggtttgctaggcatagaaaaatttggggtgaatgatgtaaatcttttttacctgcagctgtacaattccgcacaaagaagctgcattgcaatgttgtgatgaagttgatccattggcaaaggtctgatttgctaaaaacagcagataattttgttcgcaaccccaatcactatcagatagcataaatagccatcctgcttcaacctgaatgtttacttttaatatcatacagtctataggagctgtgaacactatactaaggagaaaaagtgacggaaagttgttgggttacaacacagattgtattggttccatttctgctattgaggatggcctacgaagtaagtctatgttcacagctttttgctccatttggagaagtttcggttttagtcatggagccttctcctctgtttgttttttcaggttcaggtgatccaagcagtgtaccttcttcttcttcgccattggccagtaaaacagtggtggttattggtgctggtggagcaggcaaggctcttgcttatggtgcaaaagaaaagggggccaaagttgtaattgctaatcgaacttacggtaaaatacatgtccttaattggaaatttcgctttgtgaacaccttagattattctattaccggtcatgctcgaccttgacaatactcttcttctcctcgtcttttattggttataatgttagatgtagtaactgatgatatgatttgttttgttcctgatgttgtgtttctaaagaacgagcactagaactcgcagaagcaataggaggcaaagcgttatctctgacagatttagataactatcacccagaagatggcatggttttggcaaacacaacatctatgggtatgcaaccaaatgttgaggagactccaatttctaaggtaagctctccttgtaacagctcatccttttgttttctataggtaacgaaggaactgttctatcctttttctgttattgaaataccaaaagccagcttatcgcatgcaaactttgttgaaatcttaaatctataagacaaattagtaagctagcttgtctttgtttcccccaggatgcattgaagcactatgcactggtctttgatgcggtatacactccgagaatcaccagactgttgagggaagcagaagaaagtggagccataactgtctcagggtcagagatgtttgtcaggcaggcttacgagcagtttgagatcttcaccggtttacccggtaagtgacactaatactggaacaaaaccatgtgttgtattaaaatttaaacaaaagaagcctacttaatggtggtccctttgttgtgcagctccaaaggaactctactggcaaataatgtcaaagtactgagacatagcttaagtgtgtgtgtgtgtacttccatgaaaagtcgtcgattcaataaagctttagattgccatttgtatgttccgagaatgtccttttttgaggccataagccgaatgactggttctctctttgtatttatatatatgtataaactattaagcctaacattaatcttttttaagtttctttgatttgatgagtctactataaaaaagaagggttaagttgcatactagtcactttttaaaacttaattggaaaagtagtcactttactattcataatttgtaaaatagtcatttttcactgtttgattcgtacacttagtttgtacactatttttagtgtacagatgtatataaaaaatacacagcgtacactttacatttgcacactaaaagtgatgtacaatccaagtgtacgaatcaaaccgtgaaaaatgactactttgcaaattatgaatagtaaagtcactactttcctaattaagtttgaaaaagtgactattttgccaacacacccaaaaaagaactacaccaactatgactcggtgttctaaatactgttcttctgtaatgaaagcttgatttgaaactcaaaattgaaaatttcgtaaatttcgtaatttgatattattagaaaaccgaaagaaaacgcatcggatttcgagatttattaatttcgcacgaacgaattatttgattcccgccaaagcaaatagagcaaatataggaattacagtttaacccgccaaattgaaaatggattataaaatctcacaaaagaactttcggttcagttttctctgtcttattttcgcgggcagctcacatttctctccaccgtctcctcgtcttctctcaccaaagtaagcttttttcttcttttttttctttcagtttcatgtttccattattgattgattcaaaatctcaaccagcaaagaattaaaaaatgattcagaactgattctcaaccatagcgtttattgctctctctctatccacattcacatcacatgggcttcgtttctttgtacttcactttccattttgattttttctttcccaacttgaatttgatttgatgatgattcgtttagaatactctgcgtcatacggaggagtcttaattctaactaaaattgaaggtttgatatgcaattactttaaaatacgtcatcttttctaattaaccccaaagttgattaaatttactaaaatcatcaaaagaagaaattagatggcatttagtttcacattacaggcgtcgtgaactttagtcggattcattcctctccggtgagtttctgtaatttctctcactctccaattgagttacctcctatttcataattattcctctgatcgtataaaggttttaatttggagaatccaccctcctctgttttatccgctccacaattcgccgccggttttgtctctgctgttcgaattctcgattctccgatgagttcttcaactgttttgttttgttgagctccttacttttaggtttctttctcatttgctttaattacttccgaccaaaatgggtatttgcagagaacgtagacacatttctagggtttttggttttccaaattttcaattttgtttcctcagtcctggtatgtcataaaaggaacatttgttctaattaatctccaaaggttatacctttttaacatgttttttttctttctatattgcgagtgtagaatcatatttattgatattgcatccacgttttgccttagcaatgatccttcaagttaaagttgtaccacactgacacaagttttatttctttctgtagcaggatcagagcaaaagtggaattggacaaggtcatttttactactttctctgggttgggggttctatgatacttgtactggattgataatgagtatcaacagagatgaggctcttagagccaaagatcttgcggagggtttgatgaaaaagaccgattttactgctgctcgtaagcttgcaatgaaggctcaaaaaatggattccagcctggagaacatatctcgtatgataatggtttgtgatgttcactgtgctgcaacggagaagttgtttggaactgagatggattggtatggtattcttcaggttgagcagatcgctaatgatgttatcatcaagaaacagtacaagaggcttgcgcttcttctccaccctgacaaaaataagctccccggtgctgaatctgcttttaaattgattggtgaagcccagaggattcttttggacagagagaaaaggacgcttcatgacaataaacgcaaaacttggagaaagcctgcagcaccgccatataaagcccaacagatgccgaattatcacacacaacctcattttcgggcaagcgtcaatacgagaaacatcttcactgagttgagacccgaaatcaggcatcctttccagaaagctcaagcccaaccagctgctttcactcaccttaaaacctttgggacctcttgtgtcttctgccgggtgaggtatgaatatgatcgggcacatgtcaacaaggaagtcacttgtgagacttgtaaaaaacgtttcactgcttttgaagaacctttgcagagtgcaccacaggcgaaaggcccatctcagactacttattgcttcccacagcagagcaaattcccagaccaaagggcttgcagtgaaccacacaagcgtccagaaaatcctcccactgtttcctctagcaaggcgagtttccctatgccgggttctactgcaaaacacaatgggaagaggaagaggaagaatgtggctgaatgtagtgaaagctctgacagtgaaagtagcagtgagtcagaagatgatgtaaataatgatactacggcagcacaagattcagggtccaatggaggagagcagcctcggaggtcagtccgtagcaagcagaaggtttcctataatgagaatttgagcgatgatgatgtcgacttagtcaacgacaatggggaagggtccgggaaaaacattgatactgaaagggaaaaagaaacagaggaagaaaagcagacaaatgagaatcatagctccactgaaagcatagacatgaatgggaagatagaagttgatcaggtggaaaccccttctggtgcgagtgattcagaggaagatttaagttcagggagtgcagaaaaaccaaatttgatcaactatgatgatcctgatttcaatgacttcgataagttgagggagaaaagctgttttcaagctggccagatctgggctgtgtatgatgaagaagagggaatgcctagattttatgctctcataaaaaaagttacaactccggatttcatgcttaggtacgtctggttcgaggtagaccaagatcaagagaatgaaacaccaaatttgcccgtctctgttggtaagtttgtagttgggaatattgaggagacgaatttgtgttccattttctctcattttgtctacagcacaacaaaaatcaggactcgcaagtttactgttttcccaaagaaaggagaaatatgggcccttttcaagaactgggacatcaactgctccgctgactcagtttctcctatgaagtacgagtatgaatttgttgagatcctgtctgaccatgcagagggagccacggtatcagttgggttcttgtctaaagtgcaaggctttaactgtgttttctgtccgatgccgaaggatgagtcaaacacttgtgagattccacctcatgaattctgtagattctcacatagcattccgtcattcagattaacaggaacagaaggaagaggcataaccaagggttggtatgagcttgacccagctgctttgccagcctccgtctctcaaaatctatcaggagaagaagctgctcaagaccgagaccgccagtctccaccttcaggatctgcctcttgatattatctcagtcagaggctcttttgtgaccatgaattgctcaacgcgaaattcttggagctcgttttattttgttcaggcgtacaggtttacagacaagagaaaccaaagctcctcagaggcatcgtttaagcccgatacctcgctgttgtcttgtgacatactcgagtcatgattctggtgggaattttttttgttatatgtctagctcttacgtttctgtttttgttttaggttctctcagacttgaaacttaaccagtatttgtctaaatacttcattgttgctagagtaagaaactgttgaaacaagtggtgaaaaccctttttggccatattctacttgtactatccattgttcacttgtaagttgtaatatagcatcagtttcgatttctgttaaagctcaggtcgataacgcaaataacagattctttggtgtttttggttacattcataaaaatggatgcgtaattttaatattcttgttatgaacttcataagggcatttggtctagtggtatgattctcgctttgggtgcgagaggtcccgagttcgattctcggaatgccccattttaagtaactacacctgttttttttttttttttccaatctcaccagtcaccagagacaccaagtggccgttgtaaaacaaaacagaaagtagatcacatacattactacacaaatgtcttctctttcacaaatcatcatcgtgctccggaaaaacacgtaggggtgggtacaaaacaaaacttcagcaacattttcgaggaagagtgtacatatttacattttacaggaaactgctgaagctgatgaatctcttcactaacaacttcttctttcataatacatacacaaaggaagaacgagaaacaaaggaaaacagatttcatacaggacttgaattttgtgcaacgcgtacacgccaagcgaaataatgaaggtacaacgagtttaggcacacggctatcccaaaaccaagaatccctgcaaagagtatagaataggtcgccgatagtctaacctgaaatagagagattgggaaaatgtattggtttccctttatcagtaatggaatgaggaaacccgaataagtgagagagtattgcttactgtagcatagaatatatgaaccaacatgcccacaagcgcaaactcgagtgctgcgtatgtccatatgtattctctgatagctgcagagtcagattatagcaaaaaaacgttttcaaattttgttggcaaacaaaggaaagagaggcacttagagtttatgagggagagtggttctgtataccgagaacaatggcaaaaatggatgctaagaggcctaacgtaagtgaaaatggtgctgcgatgtaaatagcttgtttgttcaagtcacgaatctaccaaaaaaacatttgtcaatgccttttgcaacaaagtatcaaccaaaatacatattttgtatcagtggctaccagtaattgctcgaggaagaagaagtagcagactgtgctgattagaactagcaccacaaactcttgccaagcactgcgccaaaccattcagtgatcagttgtattatttccatgaatgatgaaagaaagaagaatctttaaagttacctaacggtttgtgacggcatattctgttgactgctaccacgtctgttgttttgttgattaggtgtgggcacacgaaccaatgtaactggtaagttctgtactacttgtctacagacgtcacaggttcttgttccctttgtactaaaccatttcattgcacaagcttcatgaacaagtctgagatcacctttgcagctgcattccattttcaaagtatttccttcttcgcacacgtccagacagatcctgcacacggcttcttcttcgggaatttcttcatcagtttcttcaggaggaacggaagagacttgatctaaagatggaggaaccaataaacataagaaagacaggaaacagagatactaacatgtattagaaacatgtatgatgtcatgtacctgcacttgtttcactggaaacacgggctttgtggttgtcaaaagatatggatcgcacaataactttgtttcttccgggcatggacaaggaccttgaataatctttctgcaacaaagattaaatctttacttgtatatattgagcaaggaaggactatattgtaagaaagaaataactcacattaggcgggtcaccaggcaccccagctgaaagttgtgtagaaaccacaggagacagttttgcagcttgtctactaggaagcgataagcatcttttccaatatggagaagttgtggaaccagtagcattaggctttttagcggtttccatgagaccaggagatagtaaggagcttctctcgctttcgggttgagaaataactttctttttcaagcttaaattccgcaagattcctcttggtgaggatgtagtgccacttttgaatgaaggagtggacttcaatgaaccctttgggttacggccgttaccgaatggaagtgatctggaaggtatttgtattgaaagatccaagtgagagcagctcggcacatcttcagtagatttttctgttacctgatgatcacccaataaagtataatacatgtcaaacaaagttcaggccaatctcatatccaccataacacactaacaacaaaacgaaaaatgctaaaaccaatttctcacatgaaaacaaatccttcaactttacattgccattaatccttgagatgaaatcataattataagtctaaaacaattccaagtggcttagtttgttctcttaataaaagaaaaatgaaaagcagatcctatggctactaagtgattcaggtttgatcaaaatccagattccatatggataaaggaagagaaaagagccaaaagataacgtatatcaatcaatataaaccctagaattttcacaggtaatttcatggataatcaaaccttatatcaatcagacagaagagagaaacaaaaaaaactgagaaattaacaagagaaaccccatatacgttttatagagattatgctataatataaagatcagacacatgctaatgatgtaaagatttcagatttaccttgtataatctatcaacaaccccggaaaaagcgaattaggagacaaaaaaaaaggtcagaatttggaagatgtatgtatgtacctgagaagaagaatgaagagaagaagaagaagaatctcccacgattatagcaatttccggttcttgagctgccgaatcttgcatcttcatctaaccagattatttaataaaactatatatgaatatgaaattcggtcgacaaaaattctgagagagaaagaatcaaatctataaatctagtaatgaagaaatagttgtggtttatattcattaaatttaagctgaatccacgactgacaatgacattgttacttttttttatccacttatatcaataattaaatatacgtatgttgttgtcactctactcttttattactggtctttacttctgtcttcatttattaataagattctttaattttccattatctactaattaacaaaaaaaatcgacaaaggaaaaatacgaatcatattcttgtcgttgattttcgatgatgatttgatgacgatgaaaattcaacgttacgagtttcagaccctcatgttcttgtcgattgccgtcactttccaggaaacatatcattatcccttacttcttacgcatttaaattaactactgttttttctttctaactatattatgtgattttctatgtatagttttaccaacaacaaaaaaagaagaaatttaaaggaagctcacctttccaaaatacttgaaagtgagaaagaaagaaaaagctacttttgaaaaaaaaaactttaaatttaggttgatgaactttataagcggctttatctatctactaaacaaataatcgagtttttaattcatgaccagaatttcttgtataaactaactactcgtcttatctcccacgtaatagaccaccagggtgctatgattataccattccaaagaaacccataatgcactttggtgggttgtgtagatttatatatggtattaagttaatgatatgttttatgaaaaaaaagagagttaatgatatgttaattaagtgggttttgtttatatagttgttgtgtacatttatctcaaatattcaaacatacatatatgatgttttgtacaaaccttttttaaacgcatttatttaaagagcactaaaacatttgttaatacaacatttggcaaaccctgtagaatctcttaaacaaaattacaacttttgcttaatcaaatttgtagttctacacgaaccaattcataggacatgatttataaatcaacatcgcatataacatctatctatgttttcttatatgaaaatttagtagccgtttgtttatgcagcgcgtattctaacagtttgttgttatcgcaatatattttatatttgtatgtacctatatatagtaataaacaagtttgaatgcagtgaaatgcgatgcacatctcccaaaagagcttgtctcgaacactcgacaatcatcgtcatcgtaatagaatccacacggtgctccggagaacttatagctcatgttggattctatgtttcttctgcaacatgtaagctgtaacaagacaagtttgtctccatcgttaaagcaaaagataatggaaatttataactttccatttgtgtttagtcattctacactgaaattaatgtgtttgacaagtaaattagttcaacgattagtatggtcgaacctcgtaggatggagcatcgtgtcccactcctatcactatcaattaccaaacacaatgggaaagtagacactggtcaaagtatcatatgtcaaaaacatcatcatataactaccaacccaagagaagtgtgtgttcattgaatcttcttaaatggaataaaaattcgatttgatatcaaagatttggcttactcatctctactcaaagtcatgctttacataaatatggtgggtcgatctaggctatctaattaaagccaatttttagctttccttgggaagaccaaacaattgagagatggttaagttttgtagaaaaagacaaagatctccaattgttaggcttttgtttggttcttcttttaggcaaaccataagagtggttagctcgtcgggtaagaaacttatagtatctatcgtgctcgctacatatcgcttgctgatcaatctaacttgtgatcagttttcaagtacctagattagatgaacgcatgagtaattcgatttaacactcacagtacattcatttggaaatcaacaagggtgtcgaaattgatcacaatacaatcaatctgcacttaagttttagagaatcctacaaagagtttcgatagaactctaaattgaaacgtttatttgatctatgatagccataacaggcaaaagcaagcttcttttgtcttatcacttcattttctgctctgtaaagaggacatggcgattaactcgaggatcgtacttacggaactcgagcttctcaagaagtcccttggtactcttcctcttgacatagaagaatccagttccagctgctgaaactagacggatgaacatgaacgtcttcttcctcttgtctcccatttctttatcaagaatgacatcacattacattaccattcttttcattacagataactaaaatcctccgaactgatgaaacagaggtcacaaaacgtataaagtttccatttttttatagctataattcgaaaatgcacaaactttagaaatggatttgtttctaaatcatatgggacaatgacttttctttgaaatctatgaacctagagattcgaaaatcaagcggaaaacagatctaaaacctagaatccagcaaagaaatctcagttcgagaacaaactacaacaagacgaacacgatacaagcaaagaaatgaaaaattagcaagaaatgagtcaaaatccaagaagctagaatgattagcgtacctgaaaattcgaattcgacggagtccgaaaattgatttcgccgacgaagatgacgggtgataaaccctacaatgagaaatcgggttttgaatcaaaccaaatgggctattaagttgagcccaatatcagcccagcaaagcgacatcatcaaaacgcagcgtttaattgtcgagagccaatttgcttttgttgttgttcttcatcatcgcttttagttctctcagtggagaagaagactcgagtcatctgcagaaaaggtgagagataatgtttgcaaattttcatttagatttcgaaacttattttctcaaatttctgatggattcaattgatttttcagattcccgatcggattggatcatataagattttagggatttggaaaaaatcttgagctatggaggcgaatgcggcggtggacggaacggggaatccgatccctacgtcggcggttttaacagcttcggcgaagcatataggaatcaggtgtatgccggaaaacatggcgttcctgaaatgtaagaagaatgatcctaacccagagaaatgcctcgagaagggacgtgacgtcactcgctgtgttcttggcctgtacgtttcttctacttcattctcgtttcaatttctctacaagttcttaatttagctgatcttagtcatataacaatttttgggctctttctgttaaaacttgatgaagattgaggataatgtcacattgtagaattaggggtttgatcatatagtttaagaaatgaagaatctttagactttttttgatgtggattacagtgtatttttttaagaccatgaacatacactaagctaagttcatcgagttatgaacatttctagaacttgagtaatctttgtatattatggatcatgatcaaatatttggcctatttgaaagtaattcatggcacacttgtgtttgtaggagcctttatttccgtagattgaaaactgaacccaaaagccctatacaactagccatttgtttagtatctaggaagcagttgtttgactcttgtgtagttagtgatatagtgatggatatcttgagagttcactaactttgcggaggatgatgcattgtccataacaatctgaagttgagtagtttgcagttggtgacttagattgttcttaaaactggtgaaatgattgatattgcaggctgaaggatcttcaccagagatgcccaaaggagatggatgcttacgttggatgcatgtattactacaccaacgagtttgagttgtgtcggaaagagcaagaagcttttgagaaagtgtgtccgttgaaatgagaaagtcaagtttttatctgtctcctaataagcaaatgttcattttgactctggagcgttactctaatcactcttccatcgctgcctgcttcttttccttttctggtaatggaagacctttaaaccatgtaatattgtcgtgtttcctttgtccagttctcccgagggaaacgattttggttacttgtgcaattgactctcaagtacagagcttaattagtcgtaaacaaggttttctataaattatacacatatattgacattgggttttaactccaaattgaaactaaaataagtctatcatcaatcattagcgattttaaaatgtccgacgaaagaaacagacttttgaaagagcgatcaatatggatagagctctgttttttttttttttttttttgtcgtcaaatttggttttgaggccaagtctatttaaatcaaatcataattaaaactattttacttgacataatgaaatcaagtactagttgtacaagaaacacaagatttccaaggatttgggctgacgaatatggcttacttttaaaacgtacagactgtctcatgcaattcgtttggtctttaatttagtggacaacgttttcgttggaagaatatgttatgcatgtttccaatgcagacgtcccttcatagaatactatgatccattaattgtctagttggtttctgatgatcggacaaattggtccgattgctggaaggttctgagaagtgatgtccatgatccggctccgatagatgctatcatgcaggacaaatcatgatcacgtaccggttagttccggtgagttgtcatgcatgatagtaatgaagtgagtgcgagacatttatactcgtcccaaatcacagtcgttatacataaatactatgaataaagagcgtatgagacatttacactcgtcccaaatccataaatacaatttttctctctactttttaaaaatcttttttaacatttcacgttctttattcggttttcattgcacaattcatccaaaaaattgaaagaaaaatctagggtctttaccaattgagctaacgacattttgattacttttaattataactaatcttgattctcctactaaaataaattgattgttaaatggttttcactagtgcatgttacacactacacgcaaacataacgtaataaataatcacaaaaatagaagcataatggaaaaaattaggagggggtattagagttcggttaacaattttaaatcactaatctgacaacaaagaaaatagaaatcttttaatcaacgaacatactattactgatactaatttacagctgagataagttttagactcgctttttgtcagctcaatgtttaccgagaaatcaaaattaaaaaatagttgcagtataaggtgaaaaaacaaaaaaaaacttcagtcttaatagtttaaacgacataattaatatcatataaacattaaagtatcatatttaccatatgtcgtacgaaaaagtgtcaaatgtcataataatagagtttttataaaaaaccttgtcatattatataagagctatttatgtcgtaaaaacaatattttgtatgagactattttctcattcaattttttttaataatagaaaatcaattgtatttgtcttttagttgagtagtgaaggtgaaatatgaaaatttatctttttattaaatgtagggatattagtgtagatgattgatggtttaaagacataattaatatcatataaatattaaagtattatatatgccatatgtcgtacgaagaaagtgcaaaatgttatgataatagagctctttataaaaaaaacattgtaattatggagagaaatattggagctggcctaaaacacatatcagaaggaggatgcgaagaaaaggtccaaatcctctcaataacccccaacgtggaggtcaaaaacttctaaggattcaacatcagcgccaaaacgaaatatttttaagaatatgccaaattttatccatatatatatatatatgtcttcattgtgtggattcagaaatttttttaaatcgagtatatatgtccattttagatgtttttacaaccaaacaaagacaacgtaacacacttatctctttagaataagctctaacagtctttctgactcaaaaacttaccgtaagagaatcattgagatgaccctctacttcttagaaatagatatgtaactcccttgcttttgttaattagtttctaaccaacaacttcaacttccatctaaaccatctaaaccattggatgtgaaactcgtgagcccattttctacttttttacttgctttcagggattttacaaaattagagctgtgccacggccacgtacaggtaaatctttagatagacacgcattgatgattgtgggccgtggacgaactctagagggacaagactttttcattgtacaaaaactcatgggaaaatacttggggcatgaatgggtatgaaagacttatactagatgatggtatgagttgtttggcattctggccagatccagatcaaggtatgtaaccaaaacatactttctaaacattacaaggttgtttaatttttgtattattgatcacagctacatgttggcctagaattaagcttttgatttagttaccttcagcaaaaatatctcgtagaagcaccagctttcttataccttcataacaaaggaactaatataagttgttctttatattggttaattgaattacaggactttgattcgtgctggaagaaacaagaagcctcaagagagtgcgtgtgaacactggatggagaatgtgaaagggccaagcactaagcattcattttgaaacagctttaactcatattctgcttcaatgtaaagcaacttcattttccttctttctttatcctactatatcaattaacaatagtgttgggtttagtacattgatcttggggatctttaacgacatatgtcaagtaactacagttgtcagttttgggtttcaatgtaaagcaactcattttccttctttctttattctactatatcgagaactattagtgtaacacctatgttttcaacgtcaaagtgctccgatataatatattttaggagctgtgtgtaaacaacatttcgacttgttcttctttctcgcaaacatcggaagaatccaccgggaaagtatcatctgccttgcgcttcctcgattcattctcctcagatatctccatcatcgaattatcatcatccgcgtttttcaatttggaatccatgttggagtaaacaaccctagatctacgagaaacgacgacttttgtagttgatctaagtcacgagactcgatcgcaactatttcagggggaaaaataatctattttcaaatttttcatcacaaaaagttgtattatatatttaacgtaagttgttttaatataattcaagttaaccagacgaaaaaaatcattctataaagcgagacgatacatgtaacaacaatcagaaacaagaaaatgaaactcgatcaagaaaaaaaaacttttaatgttacagagaaaaagaggagtttaaagtctttaacaagctttacagctacgtctgcaattcccagggatctctggagttccaaccatatactctggattctttccacattctccaagcactgcccatctctcacagctctcgtttacgtcagtacagttaccatcatgtgtcaatatcttatcgaatgagtccacgtggatccacttagtagccgaccatttctctccttcgatcactggacaacctccgtgaaggctaaaggggtctgggattgcgtcttgttggaggttgaagaacaacagagcattccctttcttcggtttcactaataacattaccaaccaatatcaaacacaaacattcttagagataacatggaaagaacaagtcatgattccttttatatatagctcaccagcgattcctttctttgcacaatcagaaagatcgtctttattctcagaaagcgagcggcgagagaattcctgcgcagaaatattcatcatacagaaaaagagtaaagacctatttgtccacgtatatagagaaccaatacaagattagcaattgtggaaatgtaagcggaaattggtggtattgtctgaaaaacaacaaacctgtgcatcggggaaaacagtttctccaccctttgtgacattggacagatacaagagaaccgttgctatgcggtgtccaccacgggcaatgttgactttgtcgtggaagtagtcaaagtgagcatcatatttctgaccgtgctcatatctcaatacctgaaggtcttccccgttttctgtgaccacaaagtgaagaacttaggaaacaataatatcttctgaaaaaccctttcaagaaactcaacaacagttaaggttccttgtcaattgacattgtgaaacagagagaccactattgaaaaaccattcagattgttaaagttaccttttgggagaaatgtccatgttgagagcttgtcctcgataccggaaacaataggatcctgtcattaaacaaacgaagcttcacattaagattgtaatcacactgagatatctaaatttctcaaatctgttcctaataatcactaagtatcattcatcatccttcatccatacacagaagtaaatttatgtctagctatcaccctaaaacctttttagtagtaaacaacaatcacaaatcaacacaatttggggtcaatttactaagatctcgacttatcaacatcattttatcaaactctgatgaccagttcaatatgtgtgtgaacttttggattgaattattctaaaatttctatttccatcagatcttgaggggtttgacttatcagatccattagtatcagaaatcacatcagagattcagagttcttgaggtcgagtgtcataaattagaatcaagatcaattccaatcaagccattcaatgagatctgatgtgccgaattaaaattgcacctttcctttggagataaaagtgccggagctggtacgaacatcactgacttgactctcgccattatcgttatcagcaaccgcagatctctgcagattctctttcgcctttccccaaaaaaaaaaaaaccaaaattagatactgaaactagcacatttaagccaaaaagtttccaaatttgagctcaaacccaaagagcaaaattcgcactcacaagagagattagatgatcacattccaagtccgtcaaaaaaccttcatacacaaatgccctgaagaaacagtcaatacacacagttggaggttcaaagtttccaaatttgcttcatttctcactaaatagacaagagaaagagtaaaatcaaacctgggcttcgacgaaacctgtttgactttagaaggattgatgatagaacttggagaactaatcagacaagtggaagactgaagcaagacgagcaatatagcgacgaacaacaacaatccgagccgagacatcgacattatagcaatcgtagtaatttcttggatccagatgatcgagatcgaaaactagaggataattttatttattttttctcggaaaataaagagggaaaaaaaatgtcaacggtcatgaaaagttgatgttctacctaaaacaaggaggctcaagggagatggtgacaacatgcgcacgttcttcttggttgaacaattattcttgttccttgaccaaagcccataataagcctattgttacttaaaaggcccaacataaaattcggaaataaaaacgacgtcgttggttttaaacgtaaaataatcctcgccggacggaagaggcgtcaccagaacagaaaattcaatttgctccggtttcgactttagccggcgacgtaattaaacgaaggttgaaggagaattagaagagaggcagcgataatcaagtcaaggaattttctcagagaatggcgtttaggcctttcgggaaggacttaggtccgatgagctctaagccagcgccgtttacaccgttcggtgcttcttcaaccactaggtgtgctcttcattctctatagatgtatctatgcttcaatcggacttttcttcgagttttgagatttttaggattcatttcacgctatggatctattatactcagagatttttttgaactgtcaaatttacatatatgctatcgttgtattaaagtgtttaggatcatgagaatgagagaagtatcttgaattttctatgatattgtgttctatatcacttaggcagtcgggttttgcttcttcatcttccttaggagaagctgcgagttgctttactttgctttttgttcttagattgtacctttcttttttattcttacacactgcgaatgttggatttgcttgtagtgattcatcaattcaaccaccggcgtctcaaaaccattcagcctttgcaggacaatcttttggacctggtggaattcgaaggttagattaaccttagctctacagctttgatttctttctatgcgagtatgttaggttgtttctgagcctccataggaagagcctattgtgctacttgttgtagttttctttcgtaaattcgctcagttttctttcgtaactttggcttgtagtggtccttcaattcagcgagcaccacctctgtcggcttctcaaaaccctcagctctctatagggaaaccttaccgaccaggtggggttcaaaggttagacattcttaatcgtatggcttgcttttattccttttctctttcagttctatgtgtctaatgatgatgttaggttggttacttattcaattattaatttttcagtctactctcgggttttcttcttctttagattctagcctaagttattatggtttttgcttgcagtgttcctccaattaatagaataccatctccgtcggcttttcaaaatccatcaccctcctcaggacaaccttaccaacctggtggaattc

SEQ ID NO: 1274 - DNA, 94704 bp, Arabidopsis thaliana
gaattcctcatgtcttttatacccttgatattctctcatttccacttcagcaaaagaacgcatctccctgtacgccagctcaaatggaattctactttctaccctgtgaactccatcttcatatctatcacgatgcaaattataatcgtatccaccccttcttctgcaataaagatcattctctggactgtgcttgaggttgtgtattgcatgtgcagacgagttctctgaccggtacctataatccatgtcagtaatcggtatacagtcctcataataaggttctcttagccaatcacacccatttctttctttgtagttttcatatgctcggataggacttctttcatgaacatattttctttcacgatgatgccaaccatatcgatcatcctcttctttaaaacttgatctagaatttctctgattaagatcgaaggatgaacgtgaggtatactctttaagatgcgtcccacacttgtaactattagaatgatcaaaacctcgaccgagtgatgattctttgttgttccgccaaccaaacctgtgctctctatgcctatcatgatccacagatgaattcaatctaccatgagatttttctctatagtaatgaacgcctttaccttcagtttcatccctctctaatgtaataggtggtccattctgccagtttttgtttgaatcacgatacaagccctgtagagaaccaactttcttcccacgaccaggatctggtgtaggcgatgcatccttaacatagcgagcataaccagctctcccacagtgccttttgctggagtcttcgtgagatcttctgtgtctagaatgcattgtaccactatcttcccctcttttgatactaattgcttcatgttctgcaagtctagcttcttgtggtggggtactgacttcacgttggtcatcagtagcactgtctttcaatgactctgtttcataatcatcagattcctcatttataccaacagaagaagaagaggtagggctcaaacgaatgcgatctccaagagatgattccctctccactgaggatggatccgtctcatcagaattgcaaacactctcttctttctccttctcaagcatttccttatcactaggtgttgcttccctactgcagcaattctctgttggaagagatttctcgccactgaaacttccagcgttttcttcttgacaccccacaaaagcttcatcttttggagaaccatagactgaattcaaatccttgctaccatatgaatgagaaacgtcacttctagatgcttcatttgatgttatgcatcttgctttctcaggtgtcctgactggtagctcctcaacatcattagtaactgggatctggtttcatacatttaatcagcaatggaagataagggaagcaaaacccagcaaaccaagaatcattcaatctctaacctgtatcaccacgccagggtcaggatcacgtggacgacgcaaatctgcagaaggtattcgctcaagagtaccacctctaacctcaattgctcttcccttcagttgaataggtaagtaattcattaagatcaaaccaactacgccattgacacaacgatacgaaaaaaggaacgaaaacatgtctacttaccaacggtttacagtaatctttccagctctgctcgttaagcccaaaattaaaaaagtcactggtatccgtaccaggatccctccatggcttcttctctaacacatcgagatttacatcaaaaggtgtcctgagaataagagaaacacacatcatgatcttcaaacacataaaccattactcatatcaatcacattcaataaacctaaaacacacatttatcatctaaacaccactgtgactaacctggaccaagggtttgggaaactatatctgtattgagacattcctaaagaaggatcgatgcaagcattattagctgaagcgtttctagtccaccgtctctgaaacgaggaagctttggatgcttcgtatccgccaaagttggtgttaaacacacaagaagcaggaagggctttagagtcgtcgtctttgagcactatattcaaatcatcatcactatcactaaattccgattcttcatcggcctcagtcagattcatagcacaatcgtcgtcgtcacacggactcgaatccttagcaacaacatcaaatttcttcacttcaccttccgaatcagactttaccgtctcttcaaaacccttatcctcgccggagttcgtagcacactccgattcgaaagcatcagtcgcctgaaacttggcatcatcaacgtacaagtcaccgaaatcatcatcagtagaatccattcaaaagaaactcgatgaacaaatccaaatttgacactagaatcatctattccataaagtgagagtcttgacacttgacagttgcataaacccaaaagagatttgggagtgacagaaaacgccttaaaccctaacacgattaattcatatattattcttttctactacataaaatcttatatcataattaaaataaaaattatgcttgtgttgtggctgtggccacacaaaatatgagtatgtttttaatataaataaaatttaaaatttaaaattatttaaaatcaaaatttagaaatatgaacaaaaattataagaagttagataatatatggtaaacttagcaaacataaaaattaaaagaaatattagctgttttctttaattgatgccaaaaaaaaaaaaaaatctctttaattaatattaatatatatccaacatagaaataatcttcaatctatttttttacttaatacttaaagagttagagttgtatcttttcatttactcaaatttgtatttttttttaacaacaactcaattttttttatttttttgtttccatagaaagacatctttatgcttttccttaaaaaaaaatggacttcacaacaacaaccaaaaaaaagaataaaaagatttggatcggagatccggagctgtgacttgtgagctaactaccacgggccacgtgattacacctttaatataatattgtcttctctatctggcagtggtagctgagctcatcttatttgtttcttccctcccatttaatggtttcctcttaaaccattcccttcccttcctcctaactgcaatctactctccacctaacattgctccgttttgactcgctcgactcggctaagtgaccacaggttcgttttcctatttctctaacttttcattggagatttccatgactcagatccgtgtttttttcgaatccgatccggttaatctcaaacaaaacttgtcgatccggtttgggttttagggcctatagaggggatagtgatgagtcgatagtggaatgatttcgtttctacaaagactgagatcttaagtaatatggaattctgtaatgcagtggttgagatttgcagtagtgggtccctggtttcgatcccaaatcgttatcttttaatccagaacaactggaataaagaaacaaagcttcttcttgtttgattcagttctcgatcatggtttgattaaatgaatcaactttattaaagttgtgttagcttgaaaagggagaaactttttgttggtgtgtaaccgatgatctgtttgatctgtttcagtgtttgcttttttgcatgtcaatattttattcacgacttctaaatttcacctttttctgattctcagttcctttcgagccaataaaatggctacgggacagctattttcacgcaacacacaagcgttgttctacaattataagcagcttcccattcagcgtatgcttgattttgatttcctctgtggtgagtgtatcttcttttgtatctttcttaatgtcttaatcagttattctctggatttacttcactattaaatttggtttctttaattatcttaactctttacagggcgagaaactccttctgttgctggtatcataaacccaggttccgagggattccaaaagctattttttggtcaggaggagatcgccatccctgtccacgcagcgtaagttaaataccatctacataaagaaagagagaaatacatagttcagaattttttatcttagttgtctgtttcttgcagcattgaggcagcatgcgctgcgcatcccacagcagatgtattcatcaacttcgcatcgtttagaaggttattattgttttattctgtgaatgcgattttcctgttttactatgtgattctcttgtaatgttttcttttccccttgtattttagtgctgctgcttcatccatggctgctttgaagcagccaactattaaagtagtggccattatagcagaaggtgttccggagtcagacactaagcagttgattgcttatgctcgtgctaataataaggttggttataacactaaactgactcattcctcatgatgcagtattcctaggaacttactattgatcgatcttttcttattgatgtgagctttccgagttaatcttcttttactgattggtcattacaggttattattggaccagctactgttggaggcgttcaagctggagcctttaaaattggtgacacagctggaactattgacaatatcatccaatgcaagttgtacaggcctggatctgttggctttgtctcaaaatctgtatgagctgtggagattgtttttttcgcattttgtagtctacctaagctcatgattatcctcttttgaatcttaatctgagagtttatttctcattcactattttctatagggtggcatgtctaatgaaatgtacaataccattgcccgtgtgacagatgggatctatgaaggtgagtttctatttttttgttcagaatttactaatgaatatgttccttatgcttatcatttctgaagattcttaagatgagtttatgatttgggatggccgtaggcattgctattggtggggatgtgttcccgggctcaactttatctgaccatatcctgcggtttaacaacatcccacaggtatattcttcttgacttttaaaattttgttgctcactgggatatcctcatgcggcctatccattttttctactgtttaaccatgagaaagctatactgtacttagaggcatctgaccttccctctcttgttcagctagcctctttaactccaaaattttgttttcattttttcaatattgcagattaagatggtggttgtacttggagagcttggaggaagagatgaatattctctagttgaagccatgaaacagggaaaagtgaccaaaccagtggttgcttgggtcagcgggacttgtgcacgtctattcaagtccgaagtacaatttggtcatgcagtaagtgtcactcagaaactgacatatagaattttggacgccaaatgttcatctggttccgatataaatcattctttgatatgatatgaaccagggggccaaaagtggtggagagatggagtctgcacaagccaagaatcaagcgctacaagatgctggagctactgtacccacttcattcgaagccctagaagttgcaatcaaggaaacttttgacaaattggtcagtctccaatcaaatgcggtcttagcttgcatttctctttgttgtgatcttatgttcatgttttttctgtcctcctaggttgaagagggaaaggtctctcctattaaggaagtcactcctccacaaatccctgaagatctcagctctgcaattaagagtgggaaagtccgggctcctactcacatcatctccaccatttctgatgacagaggtattattattcttctgaaactaaaccagaattctctctttaagcaagaacagttttttcaaacaaaattctcacgcactgaattttcaggggaggaaccatgctatgctggtgtgccaatgtcatccatcattgaacagggttatggcgtgggagatgtcatttccctcctatggttcaaacgtagtcttcctcgatattgtaccaaattcatcgaggttgctcatctttccatgtactaacacaattattgaacactgttagtactgagattgaatatgttttctgacactgaactttgatcagatatgcataatgttgtgcgctgaccacggtccatgcgtctctggcgctcacaacaccatcgtaacagcaagagcaggaaaagaccttgtctcaagtcttgtctcaggtgaattaacatcccaatccatcaactttttaagtgaagtttgctatataataacttatgctgattattcttcaaacaaacaggtctattaacaatcggtcctagatttggtggtgccattgatgatgcagcacgatacttcaaggacgcttgtgacagggtaaaaaaatcattttatccttcactgcaactgcatcaagcctttcttgaaacttagatataaatagtactaaaatgttgtgccctattcagaatctcacaccttatgaattcgtggaaggcatgaagaagaaaggaatccgtgtccctggcattggtcacaggtaagaacaaacaaacgagcttagatcttcatcgtttgttttcacatgtaaatgtggaaattggcgttatatatcaatcaagtatcctttttatcaatagcaggaacagaacattctctgactggatttgttttcttacatatttgtaggataaagagcagagacaacagagacaaaagagtggagctgcttcagaaatttgcacggtctaacttccctgcagtgaagtacatggaatacgcagtccaagtagagacatacacactgtctaaagccaacaacctggtactcaacgtcgatggagccattggatctctcttcttagaccttctcgctggaagtgggatgttcacaaaacaagagatagacgaaatagttcagatcggttatctcaacggcctcttcgtcctcgctcgatccatcggtttaatcgggtaactgtcataaccaaacacttacacttgttcttaaaacaaatttaaattgatgtggattacgtgaataaaattgttgcaggcacacattcgatcagaagagactgaagcagccactgtaccgacacccgtgggaagatgtcttgtacaccaagtaatcatatcattattcacttcttctggtcgttccttattcctgttatcattctctcccattcagttaggctatgtttgattatatatttgttctgacactctatctgttgtgatctcttaatgcttgaaaaaataaaagaaagttcaattttagaagaattataatgttttgattaaattcttttaaaaagttcaatataatcctgacgttttatcaaatttaaactttatgaatagttcgagttaaacaaataagtcaccatatcccacgaccaacaacttatcttaaaatatttatgttgttgtttacctctggaacattatgaagctcttatcttcgacgctaagtttttgaatattttctaaagaaccaataacactagaatcagtaaaatccaaaaacaaaacaaaaattatgacacttaagcatgttagcatttatgagtgaggaacatatcagagtatggttagttgccggtatttcagccgacagacttggataacgtttgcaatattggatttgaaacggcgatgcagctttatttcttttcatttcttgtcactttttatttataataattttgtttgaccaaaaccaaaaggatgatgttacattgataagaagaaagaagaattgattttcaaatattcaacaaatgaattggttgctcacactctctgcagtatcttttcttacgtataactagatcttttgtgcacaagcctaaccaaataaatagaaccggcgccaacattctccgttctttttctttttctctatggctctatacattgaaagttgaagcgtttgcgtttccattatcgttagaatttcttcaaattccattttctggagagaaagtttgtatcttttggttaggaacagtccaaatccctattttgattcttccttttgagagacaaatcgaccatggttaagcttcttcaagacccgattacacctaacaaggagctgctgaagaagatgatagagctagagaaaagtcaggagcatctaatgcaggagatgtctcggctcaaggtctccacggagcttcggaaggagagccgtatccagtgttccatgaatctgagaccatcgccctggaagttcactcataaacagtatctcaatattttgcagtccatggcacaatctgttcatgccttcgatctcaatatgcgaattatcttttggtgagtgagttctttggccttcctatactgttcacgtcttagctggtcctcaagagagtgatttcatggatacttttgcatggttccaggaatgctatggcggaaaaggtttatgggtactctgctgcagaagcagttggacagaaccctattgacgttatggtagatgatcgggatgctccctttgccatgactattgctcaactttgttccaatggagagagctggactggcaagtttcctgtcaagcgcagaacaggagagaaattctcagctgtcactacgtgttcccccttctatgctgatgacggttctcttattgggatcgtttctatcacaagtgacgtagcaccatatctgaacccaacaatctctttggctaaattaaaggcttcagaagtcgaaaccagctctacccctgcaaggaatagttttgcctttaaacttgggttggacaccaaaggagctgttgtatcgaaacttggccttgattctgatcagcctatacaagttgctatagcatcaaagatatctgatttggttagttcacttgtaggtcgcttgttctcacttttttatcttgttgttgcatgttttgactagtgtgataaaattgcaggcatccaaggtgagaaacaaggtcaggtcgaaaatgccagcaggtgatagtagtgtcacagtatttgagggtgaaactggggatagtcatcattcagatcatggagtcttcggtgctactctctctgaccacatggatgatgcagcatcaagtggtgctagcacaccaagaggggactttatccaatctccttttggtgtattcacatgtaacgatgacaagttttcttccgaacccttcatagattccagtgatggatatcctataacccttttcacctcaaaagctgaagaatggatggtaaagaaaggtttgtcttggccatggaaagggaatgagcaggaaggttcaagagtaaagcctacttattctgtatggccttgtgtacagaatgaacaaaagaaagataagtctcaccagatcaaccgctattctggtgttaagtctaaaagccatgcctctgaaagtaataagcctaccaataacaaggcttctggtttgcggtcttcttgtataaatgcgaacagcgctattagccgtggaattatcagtcacagtactatgaacaaggtggatacaaatagtaattgcttggagtatgaaattttgtgggatgatttgacaatcggagaacaaatcggacaaggtggtttaatctcttaaacagattcatgttttccagtctactccactctttataacatctatcatacattttactgattttgtgtaatatagagtccatcttctgctgacatgctccagtaacttccatattgcaggctcatgtggaactgtctatcacggtctttggtttggatctgtacgtttttttggcttctgatgatattttagaatattcatttgttgatttatgaacccttgccataaacatttgcaagttcagagatcggtcttattgagagttgctaatgtcaccacaggatgtagctgtaaaattgatctccaaacaagaatattcagaagaggtcatacaatcttttagacaagaggtaatgtttttactttctagtcgtccattataattgctcggagtgtagtttttgcagaagacattttaaatgggtcttgctatactgtgaaggtatcgttgatgcaaagacttagacatcctaacgttctgctgtttatgggagctgtgactttacctcagggtctctgtatagtgtcagagttccttccacggttcagtctcaacacttttggttactagtctcactttctttgtgttgtgggccttttaagccatatctcttatacattcccctaatcatttggataaaattttggcagtggaagtctatttcgtctactgcagagaaatatgtcaaaacttgattggaggcggcgtatcaatatggccttggacattgtgagtattagttatatgtccattagacatctgatttttccatttctatgatcattgacagttgcacgttttgtaagtatgagatgctttatttgattacttgtttttacgtcttcttgttcactctatttggctcagtcaacttacatctcaagtagcatattacataattcttcacacaggctcgcggcatgaattatcttcaccgctgtagtccccccatcatccatcgtgatttgaagtcatcaaatctgctggtagacaagaacttgaccgttaaggtaacatgttcatcttgataaacgtttgtttatgaatgataatgttccatcttcaaactgattatatagctttctgataacattgtcattttacatgaatgatctagaaaagtgagaccccaaatctgcaaactggaactagaaacattgtcaactaacagtgacatctctaacaggtagctgactttggtctatcgcgtattaagcatcatacatacctaaccagcaagtcgggaaagggaatggtactattctagacgcttatcgatatgaatcctgatttgatttatagtcaacgtctcacacgatcttgattggcttcttacctgttctgtagcctcaatggatggcaccagaagttcttcgaaatgagtctgctgatgagaagtatattctcgtgttctgtttgattaagttcctttgagtacttgttttctagcctcagttgctaagtagctcttctcattccttgaaacaggtctgacatttacagctttggagtagtactatgggagcttgccacagagaagatcccatgggaaaatctcaactcgatgcaggtatcgtttttgagtgatagaatgatgagaagaatgtgtcttccaaatgacagttgaaatattagcaggtgatcggagctgtggggttcatgaaccagaggctggaaattccaaaggacattgatcctgattggatctcactaatagagagctgttggcacaggtacattaacgttctgaacattgcacaatcattgaatataaccttttattgtaatggttctccttgctttaggtgttctacatgtttcacagctgatgctgacattaatttttgtttctattttggtttgtctcacctgcagggatgcaaagctgagacccacattccaagaactgatggagagactaagagacctgcaaagaaagtatacaatacagttccaagcgactcgtgctgcgttatctgacaagtgacaactctcttctcaaggacaactaaaccaaacaaaagttgacccttttcacttatggcttcttgttcctcaacgccgcatcgcttcaagatccaactattgttcacagaaacaaagaaagagagaaagagagagttggtctttttgaacaacaacaattggtggaaacatgctgtgctggtgtgccaatgtcttccaccattgaacaaggttatggcattgaaaatatcatgaaggttggttgactatggttcgaacggagtcttcccaggtactgaaacaaaatcattgaggttggtcatatgtgctcatatttctatgtttttacaccaatgttgaaaactataaactagtgagcttgactctgctttctgacactttgatcagatatgcataatgctttgtactgaccagtgcgtctccggccatggtggttaagtatcacttcattccaaatttaagatgaggctttaataaatttttgtctacgtaatcagatgtaaattagatcttgaataatgtatcaagctttctttttttctttttaatgaaaccaagaaaatacaagaagaaaaataaaatatgatttcaatttaaaaaagaggtgagtgagttagttacactgatattgcagccgatgtacattaaagtacaatattagaagttggaagcggtgtagcggcgagatcggattatgagggaacaatacatacaaacaaaaaggaaggatgtagaatactagcatctttcatacgttacactacagtcagtatcatggactcatggtttctcgggagtcaatttttttcttaaattacacttttctcgagagaggaaactttggttgggagcgagagagacagtcatgagtcatcaatccttctccatagtcaaatctaatcactctctttttcgaccatacgattcccggttattagctcttcagatttcgaaatccacctgagggtttccgtttttttcctggagcgcaatggaggaggagctgctcaagaagatgcttgagctagagcaaagtcaggagcttctaaagcaggagatgtctaggctcaagctctccacggagcttaggcagccgtcgcatccggtgttgccgcgtcggccgttgagacgtatccagggatcgatgaattcgaatccatcgcccgggaagttcactgataaacagtatttgaatattttgcagtcgttggctcagtctgttcatgtcttagatctcaatacgcgaattatcttttggttagtacttcttttttttttttttggaattgtatagtcaatcgttatgattatggtgacatgattgttctcaggaatgccatgtcggaaaagctttatgggtactctgctgcagaagtagttgggcggaacccagtacatgttattgtagatgatcagaatgctgcctttgccttgaatgttgctcgacgttgtgccaatggagaaagctggacaggggagtttcctgtcaagaccaaatcaggaaagatcttttcagctgtcactacgtgttctcccttttatgatgataacggcactgttgttggtatcatttctatcacaagtgacattgcaccctatctcaacccgagactctctttgcctagattgaagccgcaagaacctgagaggaaacttggtttggactccaaaggagctgttatatcgaaacctggcctcgactctgatcagcctatacaagtttctatagcatcaaagatatcaagtttggttagttcaattggatgttgcatattctgaccttttttatcttactgtttgcatattttgactagtgtcaaatttgcaggcatccaagttgagcaacaaagtcaggtcaaaaatgcgagcaggtgataacagtgcctgtggggatagtcatcattcagatcatgatgtattcggtgatactctctctgaccacagggacgacgcagcgtcaagtggtgctagcacaccaagaggggattttatccaatctccttttggtgttttcacatgttacgatgacaagtttccttcaaaaccctccaaagattccagtgatagaaagcctgcaatccataaggttcccacctcaaaagctgaagaatggatggtaaagaaaggtttgtcacgtccatggaaagggaatgagcaagaaggttcaagagtaaggcctactcattctgtatggtcttgggtagaaaatgaacaagagaaagataagtaccaccagatttatccctctgctggtgttaagtctgaaagccatggctctgaaagtaataagcctactgatgacgaagcttctaatatgtggtcttcctctataaatgcaaacagcacaaacagcgctagtagttgcggcagtaccagtaggagtgttatggacaaggttgatatagatagcgatcccttggaacatgaaattttatgggatgatttgacaatcggggaacaaattggacgaggtagtttacttcataaacagattatctcgttgccagtccattctttataacatcatacatgttactaatatatgtgattttctgtgtctgtttagctaaaatgctccaataattttccattgtacaggttcatgtggaactgtctatcacggtatctggtttggatctgtacgttttagctcctggcgatattgtagaatctacatttgttgatttattcacgcttccatggtaaaataaaattcaagttcagatatctttcttattgagagttgctaatgtcaccgcaggatgtagctgtgaaagtgttctccaaacaagaatattcagaatcagtcataaagtcttttgaaaaagaggtactggttttgatcttttatccataatgattgctctgagtgtagttttggcaaaagacagttgatattttcattggtttttagtagaacatccaaacattcaagttattatattgttcttacttttactttgaaggtatcgctgatgaaaagacttcgacatcctaacgttctgctgtttatgggagctgtgacttcaccccagcgtctctgtatagtgtcagagttcgttccacggttcgctctcatctcttttctttctttgtgttgttggactttcacgtcatagctcctaatcatttgaattataattttcagtggaagtctcttccgtctactgcagagaagtatgtcgaaacttgattggaggcgacgtatcaacatggccttggacattgtgagtattagttatatgttcattagacatttaattatgagttgctctatgtgactacttgtttgtatttttcttgtaaatcttcttgttaactctatttgactcggtcaccgtacatctcatacaccatattacatgattcttcaaacaggctcgcggtatgaattatcttcactgttgtagtccacccatcatccaccgtgatctgaagtcgtcaaatttgctggtagacaggaactggaccgttaaggtaacaggtcatcttgaatgagtttggttttccttaatctttctaaaactaaaataaagatttcggtacaaattatcttcttatttaaatggtctccaaactggaactagaaacatcgtcaacttacagtgatatctataacaggtagctgactttggtctttcgcgtattaagcatcagacatacctaactagcaagtcgggaaagggaacggtactggactactcttttcgatttgaatccggatttatagtcaacctcccgaaatgatcttgcttggcttttcacttgtaatgcagcctcaatggatggcacctgaagttcttcgaaatgagtctgctgatgagaagtatattctcgtgttctgtttggttaaattcccagattacttgtttttctagcctcaatcgctaactagctccatttctttgagacaggtctgacatttatagctttggagtagtattatgggagcttgccacagagaagatcccatgggaaaatctcaactcgatgcaggtatctttctgagcgatagaacaatgaaagtgttttcacttacaattgttcctagaaatcacatatttggtcaaaacttacatgttttgctctatcaatgaagctgacaaataataagaatctctatgccaaaagattggtttcagggtaaacctctattaaaaatccatctagtttcaggtgactataaataaattgtactaattaggaaggtatgaatcataaacaccattatacttactgtaatgtgtaaacaagtgaattgtgctgttacacacatacactttgaaatacctgcaggtgatcggagctgtggggttcatgaaccagaggctggaaattccaaaggacactgatcctgattggatctcattaatagagagctgttggcacaggtaaattaacatattgaacattgcataatccttgctaaagaatacaacctttcattatcacggttctccttgatttagatgttcaacataagtcacagctaacagtgacattattttgcgttggtatttctgtttatcccacactgcagcgatacaaagctgagacccacattccaagaactgctggagaaactacgagacctgcaaagaaagtatatgatacagagaaactaagtgacctcccaagaaagaattcaatacagttccaagcgactcgtgctgcgttactttacaaccctctcctcaaggagaataatgcaaaacaaagttgacatatatctcttatgcttatttgttccttgaggcaccgcttcaagactcaaagactgttcataaaaacaaagaaagatcgagaattgatctgcttttagcagcaacgagtggaaccatgatatggtggggtgcacatgtcttccatcactaaacaaggttatggcgtgggggatgtcatttctttctaatgatgcaagcgtgatcttgaggcctcagattgtttggtttgactttgtcaaacagaaacagagtgacaagatggagctgctttagaaatctgcacggtctaaccttcctgcagtgaagtacatggaatacgcagtccaagtacacgctctttaaagcaaacaacctcgtactcaacgtcaacgagctattatatatctcttcttgaaccttctagcaagtagtaggatgttcactaagcaagagattggttatcgcagcgggctcttcctcctcgctagatccatcgggtaactctcctaaccggacacattcatcttgttcatgaagcaatttgaatttgttagatccacgaatataaatggtcgcaggcagcagacattcgacaaaaaagagaccgaaagcagccattgtacacgagtgggaagatgtcttatactccaaccgatacctatttgtgttttcgtttgcgatttccccataaccaccaccaccccaccccccgctgggtttttagtattcttacaacgtctcagtaaattttcttaagtatgtacgtattatatgttgagagacttgagaacgtaaccaatttcaaagaatcatatgacagttcacagttggataaatttatttaaatgttcgacgtattactaataaagaatttaagctttttccttcaacgataagttattgaaaacaaatatcttgaatcggtcatatccaaataccatgccaccatggaaagttagcatttttatttaatgaagaaagatatcagccaaaaaaggaatttgacgaaaatacgttttcaatataaaaaggtgagtttagttgccgatattttggccgacagagaagatagccgattgcaattttggagttgaagcagtggccacgagtttagtttattttcttgcgattttgttattattattatttttaataataattttcagtattatgtgtatttttttatatatattcgaatttgaaataaaaaatgtagaagttcctctgcttacgatggattatagttgtcaacagtatctagacaccgcatctttcttacgtatttatgtgattttattacaggtgattggtaacaaaaacaaattgtcgagtaccaccaataaaatagaaccggccaaccttctcttttgatcttttctctctaacgttccaaattttaggtcaaacctttgtatccattcataatattatacgtctttttaaattcagataagtttctcgaccatgattaaactatttcttttaataaaaatatctaccgcaagataataataaacaaaaacatttttttccttcgtgatataaaatatctcgtttcagtcgatttttatatttacataaagtggcactaccataaaattgttacgtccaaattaaatgatcttcgattttatgagtaaataatattttgtattacaaattttctatctaattccactattttttaagttgaacacttttattctctcttattttcccaacctgatgaacgtatataaattaaaaagacagatcgaacttgaatttgttcaagtcacgaatcctgaaataatttcagtgatatttcaagacgacgttatcgcatgcatgctagcgcttccaatgatttcgctgctacaattatgattgcagaatttagttttagatatgtacgaacgaacatagaataatctttttttaaaaaaattgtttgttaaagtacatagaatgaagatctatgtaatgagtttcaaaaaaatcacagagaaatttgtccactcatattatgagttaggtgccacaacaaacatgtgatctagtgcctaataaaaaaaaaactattttgtattaacatgttattaattaggtgctataattaataaaaaccacttggtctaattgcaaattaaagcaaacaaaccgaatcatcgtccacatgaatctgtgctttttcaacaaaaatgcttcttattatgtgttcatttaggaagatttagctccacaatgaattaaagcttctttgcaaattatatattatgtatcctttgtatctatgacactttttatatacataggactcccaagaaattaggaacaaatgtattcatttcctttgttcattcttctttttctttccattgagatagttttgaacaaaaatctctcttataaggtaaataatgcttataataaggaataatgaaacgaaaattacctaaatttaaaagaatcaacatttacaatttacaatctttacataatttttttttctccaaagaatctaatacagaatctacccaaaaagaaataaaagaaaattatgattttgagtgtctaatggaaaaagaaacaacaaaataaagaaaaattaactggaaattgaattatctaaaaaaagaaaaatcaagcaaagaagaagaagagaatcaaaaagaagtaaaaatgaaaagaaaagaaacgtacaaggagaaaaaaggtttccattattgttgactgcttgagaaaaaaaggttaaacgtttctctcgcgtcatttcaattccattttctctacttttgttcttctgttagggagcgagagattagatagtcaaaatcaaatcgacatggattaagcacttagcagcttcttcaaggtccgattcatctcgaaacggtccccgattctactcgatcggaggagtagttgttgttgtggtagggtttacccattttggagcgcaatggagaatccacctgcggaggagctgctgaagaagatacttgagctagaggagagtcaggagcatctcaagcaggagatgtctaggcttaaggtatctacggagcttagacagcgatcgcattcggtgtctcctcatcgtccggcgaggagaaacatcggagagggagctccgtcttggaggaaaagcggtgccgcctcgtttcgtaacgcgtcgccgttgcggaaggagagccgtatccagaattcgatgagattgaggtctgaagttggtggcgggggaccatctgctgggaaattcactgataaacagtatttgaatattttgcagtcgatggcacaagctgttcatgccttcgatcttaatatgcggattatcttttggttagtagttccatcttgtgaatgcagtttatgctagattctaattagggagtaagatgtgatgtcattgatttgcattctagttttgcattttttcaatttgttattccttcagattccaattcgattacttaattgtttcaggaatgctatggcggaaaaggtttatgggtactctgcagcagaagcacttggggagaaccctattaatgttattgcagatgatcgggacgctgcctttgcaatgaatattgctcgacgttgtgtccgtggagagagctggactggtgagtttcctgttaagagcaaatcaggggatagattttcagctgtcactacctgttcccctttctatgatgatgatggtgctcttatggggatcatttgtatcaccagtaacacggcaccgtatctgaacccaagaatctctttggctaaattgaaggcgcaagaagaaggtgaaacgagctctatccctgcaaggaatagttttgcctctaaacttggcttggattccagaggagctgttatatcgaaacttggccttgactctgatcagcctatacaagttgctatagcatcaaagatctcagatttggttagttcaattgtaggttgcatatcctcaccttttatcttactgttacacattgtgaccagtgttaaaattgcaggcatccaaggtcagcaacaaggtcaggtcgaaaatgcgagcaggtgataatagtgccacactctcggagggtggcagtggggatagtcatcaaaaagatcataatgtcttcggtgctactcttgttgaccacagggacgatgcagcatcaagtggtgccagcacaccaagaggggattttatccagtctccttttggtgtattcacatgtaatgatgagaagtttgtttcgaaacccttcaaagattccagtgatgagagtgatggaaagcctgcaatccataaggttctcacctcaaaagctgaagagtggatggtaaagaaaggtttgtcatggccatggaaagggaatgagcaggaaggttcaaaaggaagacctacaaattctgtttggccttgggtacagaatgaacaaaagaaagagaggtgtcaccagattaatccctctgctggtgttcagtatgaaagccatgcctttgaaagtaataagcctatcaataatgaggcttctagtttgtggtcttcccctataaatgcaaacagtacaagcagcgctagtagctgcggaagtaccagcagcagtgttatgaacaaggttgatactgatagcgaaggcttggaatatgaaattttatgggatgatttgacaattggagaacaagtcggacaaggttatttattccctcaagcctgacacatccattctttataacataatattttttatgtgatattctgtctccgttctgctaacatgcagtaatttccattttacaggttcatgtggaactgtttatcacggtctctggtttggatctgtatgttttttggcttctggtgatattgtagatgcatttgttgatttatacgtgcatccctaagaaaaaaggaattcgcaagttcaaaaaatctgtctaattaggagctgctaatgtcaccgcaggatgtagctgtaaaagtgttctccaaacaagaatattcagcagaggtcatagaatcttttaaacaagaggtattgtttttgatctttcttactaatcagtgctgtgagtttagttttggcataagacagttgacatatttattggtttttagtataaccaaaatattgattttttctttcatctcttagtagtcagattgcttcttcaacgacaacaattttctgtactaaagcatattcacttacgaactgcatcttactgaagaatgaatcatttccgaaaacagctaattccaaatatttatgttggtcttgttttattgtaaaggtattgttgatgaaaagacttagacaccctaacgtcctgctgtttatgggagctgtgacttcaccccagcgtctctgtatagtgtcagagttccttccacggttcggtctcatctcttttggttactactctcactttcgtttttcttcttttggacctcatgccatacctctgatctatgcccataatcatttgaattactatttgcagtggaagtctcttccgtctactacagaagagcacgtcaaaactggattggaggcggcgtatccatatggccttggacattgtaagtattagttgcacattcacttgacatgtaacttttccatttctatgagcattggcagttgcatgtggacaatgttctaagtctgagctactctatttgtttacttctttgtatttgtcttgtgatcattcttttcccctcctatttgactcagtcaacgtacatctcatccagcatattacatgattcttcacacaggctcgcggtatgaattatcttcaccattgtagtccacccattatccatcgtgatctgaagtcatcaaatctgctggtagacaagaactggaccgttaaggtaagatattcaccttgagacacttttactttcctgtaatctagatggatgatgatcagtgaatcactacatagctttctaaaacgaaaatttaactttagagaaataaatcgtcttatgtgaatgaactggaatagtaagactcagatctccaaaatggaactagtaacatcgtcaacttacctggatatccctacaggtagctgactttggtctctcgcgtatcaagcatgaaacatacctaaccagcaagtctgggaagggaacggtactatacctgactcttattgatttcaatcttcttttctagtcaatctctcacaatgatcttgattgaatttttacttgttctgcagcctcaatggatggcaccagaagttcttcgaaatgagtctgctgatgagaagtatattcttgtattctgttttgttaagttcccttgattaattgttcttcttttccttaaacgttaattagctcttctaattcgttgatacagatctgacatttacagctttggagtagtattatgggagcttgccaccgagaagatcccatgggaaactctcaactctatgcaggtatcatttttgatagatagagaaataataagaaagcgtctccaagtgacactttgtcctagaaatctaaaaatcgggaaagtttcacttaaaaactacattctatgttctgtcaattatgctaaaacaaataactagaatctttatgtcagaagaatagttccagggtcgatatgttaaaatccgttgtactaattaagacttgagagttaagagagtgggaaccataaaaacgattgtacttgctgtaaaatgtaaagatacaagtgaagtgtgttctttatatatagtcatactataccacatcgctacgaatttgatgtcctaactcctaattccattgcacgacttgattgccgaaaacttccaatttcagtttcactgcatatcctctctctatacacgaatcaagtatgacgagatgcttatttgaaatatgtgcaggtgattggagctgtggggttcatggaccagaggctggaaatcccaaaagacattgatcctcgttggatctcattaatggagagctgttggcacaggtacattaacatattgaacactgcataatccgtgtgtagcctttaattattatggttctccttgatttaggtgttctacatgttacatagctgatgctgacattgatttgtgtttttattttggtctgtccacgcggcagtgatacaaagctgagacccacattccaagaactgatggataaattaagagacctgcaaagaaagtatatgatacagttccaagcgactcgtgctgcgttatctgacaattctcttctcaaggacaactaattaaaataaaagttgagcctttttacctttttgttcctcaatgccatgcttcaagactcaaagacgttcatgagaacagagaaagatagagaatgggtctgtttgagcagtagtaccagtgggttgatgtgtaattacagcgtggaggagacctataagcagagactgccactgaaattatgggagttgtgttgtgatgtatttgggtcattacacaaactaccaaaagaaacgtattgctcaggttagttactgtaattctggtggtcggttctggtctctatttctctggtggaagcttaaagaaagtgcgtgaaagggatttgatgtgaagttgcaaagttgggtaggttgggcaagagattggattgcatatattattcttactaaacatttatgcgatcaagtgtggtagaaccatttgatgatattttgtacagaggaaaaaaaagggagtttggaactctagttctgagagaatattgtaacaccaattttttttggaacagacatttattgggggatttatgtaatctatacctacgttgaaaggttgtcaaattagaagttatcactaacctacaggttgatcaacaaacttcttgtttcaatgaataccttcgtttggaagttctcgttgtgcatcagtctaattcaaactttttctagaaacttgaatgtatttctattttgttttgctttgaagtagtactgtaccaatgttccatgattatcccacaagctttttacagctccaagaccaagtaaacgaagaacacattcttatatcttgataataagattgaacttcaaacttcaggtagaaccacaaaacaccaccccagaatcgattgtaactgtattcagggcttctcagagagatcggttcagcaatagacaattttaactcggttaaatattaggagacttgctctcaacctctcaaacatacaaaaaaccttggaagtaaagaatggtcctgctccatcatagaggatatcgtgaaagcaattgcctagtcgcagcaaccgcatcacctttgtgctcccttagagttctttccgccacattcttttctatctgctcatttacaatggtgacaaacttcagaactttgtgaacacatgcatagaagaagctaataaaaagaagctaacctcaagttcgtttacaataaactcaacatctgcaggattgatcttcacagaggccagttctttctccctgcataaagttccaatactttgtcaatcaaatacaacgaaaagtctaatcttttccgaaagatgatattgactcgtaaatcacattcaatcacttattaataataagttctacttgttttgttgatcattctcgctgtgttttctctagtaaaagctattacagcacaactgatatctggcgtcaatactatctagatgtgagtaatttcaaaaaaacaaacagattctccaaaattgacactcttggtctaaatagatagacttaagtgttgccaagccccaaaaaaacagataaacaccaatttgtacagagagattagctacagtttgaactacaagtgtaacgcagtaatcaaattaatcaagttaattctgaattaggaatggaaacaaacgagtttgacttatgttacagcttcattaagcattgctaataatctcctatttcagaatttagaacacgggaaaagcttagagtttttacctcaacctcttagcattcagatcagcctccctagaagcagcaatcgaagccatagcctgaaacacgataccgacttttcaatttactaatcgagctaaaaaaatttcggaattcctaatattttcagaaatcaggacacgaaagagttacataccgattgaacacgagaggaatcgagctggcgatcctcgacacgatcggtgagcttgtcgaaagctttgctttgttgctgcaagtcctttgaatcaaccgctatctcagccccagcttcctctgctccctccattgcttcaatttcttctcttctctctttcgacttctttcagtttcggtgaagaaaatttccggcaacagagattttgaggttcgatagtgtttcaagcttcgacgttagaaaccctaaaggctaattctatcgggtgaggctggaaccaaaccggctaaacaataccacaaccgaaccgaattccggtttagtaggttaattttgcgatgagcgagaacgatctatattgggccttgaataaaaatagttatcggcccttaagcccatgtaagaagcgtactacaaataaaattatcttgcttgatagttttgtagttcactcactatttcacattttcgaaaactgacaagctccaaatttgaaaacattggagagagatgaaggaaattcaaattcccaggaaaagcttcgcgcgctcatcagaactcggagctaagagactcaaggatcctgagatgaagaatcggaaggtaattttattagatcgatccttaaaatcgccattgttttcttcttcccacatcgttctactcaaattcgaatcaatgcttctctgaactgaaggttacgacggagaagagacagatcgcaacattttccgacgtatcttttgaaagcacgaaggatccgatggattttagtccgatctctcagatttctggtgcgatctctgattccgaggctgaggtatatgcttcgctccaatgttttagttaggtttagtttccatcgaagtttttcgttgtgttgctttgtaaacgctcagatccgttaagattagatgttaaattttcgaaaattgaatcgattttgtctgcgcttgatgacgaattggaaagattaaacctcaattttagccattatgtgtctgggtactgattactggctcgaattatgttgttctctcctcagagtgttattcaaggatcgagcctagacttaatgtcaaccccagagatttgtcttccggctgatgattctccagtttcaaccattactagtgtggaggctcgtattgacacgtcttctactgatcggatccagtcgattgtggacttgcccgcttctgtgcaatccttgcgtggggagatcaatgagctgaaaaaactgatctgttcagttgacaattctgcagaaattaactgggtcgatagagttgttactgtgaaattccgcattgtgcttttgagtttcattctttgggctatcttagctgcgattgtggtcttcttcagctcaggagaggaacgtgcttaccgtggaccacttccaacatgattcttcaaggtaattcactttacgtttcttacctttgtcacattgattctggtttccttctcataggatgataacaataataatttcaacgttgcataagattggggttgtatactgatctgccttcaatagcacatttatcctgtttgtcattttatgttgcatctctgctaatgaaggtcacagctgtttagtttaagttggctattagcacctcttgaacttcaacactattaacatatttcaactactgggatgtgtctaccaaaggaaagatcagttctaacattgttttttattttttttttagaattcactctttaaaaataactgcaacacacgttctctagtaaaagtaagtacagatatctcagtgaagtcttatgcggttgaaatgctaccttcttctctctgtgtcctttttgttgaatgttaaacttcctaagccttctgattgaatgttttaaatttagctcatgctaggcccaaaccaagtagtctctcactagatccattggtaggttgagagtgagtttgcaagtaggcctcataagcagctagttagtctcattcctaagtcctaaccaatgattgatccctaaaattttattggcacaactgatatgacacttgatcgtctcatctatggtgacttgtgttatccaaatgcaaagtcttctctccatcacacatttgatacataggcttctgtagcatttaagttgctaggttctaatataccttgatgtgttccattcttagctctgtttgatacaatgtaatgcaaccccacctaatttatttgcttcatatatatagcatgcttgtttctatgtgcatctcaaatcgataggttatatagatcttaccaagacatgtgctagcctttgtttccattctcatgcaagctgttctttacatttttgtatattaagccagacaaatcctatggaaagtccagcctgttaagctttttgggtaattacttgatttgatctttcacaactattaggataaactcttcgaggtattaggttaggtttattctccattatggataatggtacaaagattaggatttagaaactagtcctgtatatagaaaatgaatgacagaataatccagactggtgtttggcttttctactggagattaatatagtagtaggccactaaacaccagagaatatactaatatatgccatgtattaaagagaagcagctcttgttggtttacttttgaagtaaagtttctgtgtgattaaagaaaaatccggcttagtgatttaaattagtggaaaccaattagaagagttttgtttgtttctcttaatcagtcttgtccttgtgtcttgacattgattaatgaccatattttgtgtattacgtaatcaatggtctatatcatttttcttgcttactttcgtggcgtttgtatagttcagtctatgacttttttgtgagaaactgagtcttgctttcgaattggattcccactatagatttaggagtaattatttttcacgtgtatgatgaaaagctggtattaaacctaggcaaatcatgggttggaaattcagcttttcgattcacaacaaagattgtcattggtcaagtaattgtcacgtttgctcagtgttgttggtaaaacaatgatggcaacttaagagttaggcttccaaatgcttataaattagtgtacgtaatctaacaataatcatatttctactatttaaacaggatttggctgctatcactgtgagaaaccagggacaaaaaatcaactacttctgatgaagcgaaacacatagaagttggaaatatcatttgaaaaaagaaaaaactacacaggttagtgttttcatatttgcctctgaaaagtgttgttaagttgatgttaaatttaccaaaagactattaatcatttcatattagcaatccaaaatagacccgttgaaaaaacaatgattgagcatcatcatctgttaatctaatcaatacttccctttttcttcctttaaaaagaaactagtccttcttcttccattgtctgtcgttcacttagtttatttggtgtctagaattagggaggcaatctctgtgccaccttcatcatacttaatagttagttttcctttccttatcaacttttttcattaatataataagaaaaaactcattacatccgagatacataatgatttgcaaataaatttgaaaaccttagatagctggaattatgatttacagtagtaaattttcatagtaacaaatttgaacttccaatccgaaatatatttatttctattaatggaagataacaattacagccagcaacctttgtgatacatgttttttttgttgttgttgttgaagtagagcccatgagaattacgcaaatcgcagattcgaatagtggtttctttgactcagttcgtaaaacagataattcattaggttgctttgttcttcaccaacaaattttctgcttgattctaaagtataaattgagaaaatttaagtatctaaatcgaaaatatattcttaaattcgaagtagataaactattttattgtaagtgacactttagtgaataattggatatgttgtttcttatcattaatttgtcatgtggaatcattctagcttataactttctaaggtacagagaatatgccacgttactgacacaattattaacccttagcccttaggttaaatgaatactattatctatgaagcattgcgcattgcgctctgtttctaacatcctttccacccgcctaaaaacatcttaatacagtatatataccattgtggtacttttatgtctaacataaactaagataggtattttccattttaactgctgatcaaactcaacatagtgaacagtacaaacaaaaatcaaactaacagtaacttttctagaaaattagtttgaacgtagctagctttatttatatatgaattaacccaatggagaagttcagaagctccttttttcagcaggatatatgaataaaatgacgccactcccttatactttacccaacaatctattaatcttatatctacttatacatatacacaaaatttaatgaaattttattcatacatattgatagatacacatacaaaacttttttttgataaaatacaggagttaatttcagtgatcttttctttacagggaaagaaaaaaaagccgtaaagagaggcagtgccactaaccctacatcgcacatgcatttcgtttggtatattactttatgcgtaaagtagtattttaaatacaattccaatatttacgaaatcattgcactgaatacaaaatccaaagttttgagtttttggcccctctctttttgccctgtcagtccattaaacgaccactataagtcgtaaatggatttctccaatagtaatatgacacgtcatcctttcgtttgaatctaccttcctcctccattccaccaaagtatcggcctttatacaagtttgtttgttttctcttttcgtaaacatctttagatatcaataagctaatttagtaattaagattgtaccctaaattgattggaaactatcgttatggatgctctacccacattaggatctttgtagcatttctattatgtattttactctctatttagattatgtctacaaaagatcgaaaactcgtgattgtaagaaattttgtatataaatttctttctaaaatctctgtcaagagggtaagtttaaaaaaataattgtgaactaatcaacgtggaacaaaactttttaagtataatcataattcataaacattgcttcaagtcacaatgatgtctctgtctctcattattccaaaaccattagaggttatagagccagttaattataacttatcaattccactagtgttgagaatgaaattatttgtttcttggtggtattcacgaattctctttatcatgcattacaaatgccactttcgtatctggctaaaacaacaaatactaaaaaacaaattgacaaaacgacgccgcttattaactgctacatctaaaacggggccgtttgttaactgctacgtctcgtgatagttgatacctctctccctttatatatcttcctcttcttctcccttccattattctccacaatttcataactttcttccgctcaacttcagataaattcggattctgtagctctttcaatacgactgcggagatcagagccaattatttggttatggcgtctctgatctcagatattgaaccgccgacgagtactacttcagatctcgttcggagaaagaagagatcctctgcttcatccgccgcatcgtctcgttcaagcgcatcttccgtctccggtgagattcacgcgcgatggcgatcggagaagcaacaacggatctactcagccaaactgttccaagcgctccaacaagtccgcctcaactcttccgcctcaacatcatcatctccaacggctcagaaacgaggaaaggccgtccgtgaagccgccgatcgagctcttgccgtttccgctcggggaagaacactctggagcagagcgatcttagctaatcggatcaaactgaaatttcgtaaacagagacgtcctcgagctacgatggcgattccggccatgactacggtggttagtagcagcagcaacagatcgagaaaacggagagtgtcggtgttgagattgaataagaagagtataccggatgttaaccggaaagtacgtgttctaggccggttagttcccggttgcggtaaacaatccgtaccggtgattctagaagaagcaactgattatattcaggctctggagatgcaagtgagagccatgaactctttagttcagcttctctcctcctacggctcagctcctccaccgatttgatgaggttaaaatcgtctttttaattctaccatctctcgatctttcacagcttatgtgtatatagaagattcggtttgattataatctgtaactactcttcccaaccgctgattcttctctgctacaagtaaaagtaaattttgaaccgagtcttcccatttttacgatcctcaagtctaaattaagtatatgattgattaataaagtctttaccattagggttcaaatcgtagttggattatttgatttagattgatgaattcgttgttgatcaaaaaaaaaataagattgatgaattcgttattggagttagtgggaaaatgggttcctcttttaacctcatagtatgtgataactaaaccaatatggaacttttgatgtacttttagttcattcaatatggctttgtactatatcatcttatgtactatatgaaatttcaacatgaaatagatttgtactgcaataaagtggaaagaaaataatttcccatttagaattttaaaatacattatagtagatgtaggaagataatgggttaactttagttttgattatggtagcatgtgatgatgcattagagaatgaatggaatgatacattcaaattcattgaattgaatgatgactgatgagattgatctgtcactcaatcatctactcgctttattgcccctcctttgaatcccatttttgatacttataggttgtttgtcttctttttcttttcttttccttatttcacaagaaatataaaggaaaaaaagaagaaaaaagattaaattagctaataattccctgttactaaataagttttctcaaacactaatctgcagttctgcacgtactgtatatccttcaatattcatcacgaagcaaaactgaataacctgtagttaaaattgacttaacaggagtttgattcattagcttaattaatatacgaatttctgtgatagggatatgatttaagaacactggagtatgactaggcgacaacaagagacaagtgacgacaaaagcaaaaaatatttaaaacatagagagaagtgaccttaaaagtatgaggaggcacatgggagtggccatgcctttgtcctcttgtttctttttaagccttctcttattaacttgcacgacaactcttttcatcacatatttcataagttatattattattgccaaaagggacaaactattagagaaaataaaccgcaacattgtagaagattggattaaaactcgccaacacactattagagaaacttgcccagataaaattatgtccatgtcgaacacagttataaccaaggagcctaattcccaaaaaatgatttttatatttggaaaccatccattgcagatactcctggaggtttctcctagtcttcagtgccgaagatttcacgacaaaagaagacttgaaaatctcgatactcttttgcggaactttcccaccgcgacacaaagagatcactccacagagatatgaggcagctttgagtcctttagacgcggcttttgcaaacattcgatccctttctcttcatcaacaatattactgaataggtaaaagcacttcacaattccttcacgagccactgcttccgtgtttccgctctctctgcatctcttgagaaaactctagctttagttataggtcatcgtttgcggttttgatttcgtcgaggcagacgtgttcgagaacttgagggtcgttgcagagattatgtaatgatttgcatacgaggctgaagttgaacaagcttgagtgaagaaagagccacgcgtggcaagatctccttcacaaccacttcttctgggagagactccattttatagtgatttgagaaatgatattttaatttagggtttcaacttagacgtttgcttattaaattgtgtgaataaataaatatatatatatatatatatatatatatatatatatatatcattaataaataaataaacgataagagtaaccttaaaaatctagttgaaccctaaaccctatggctaatatatacaatgtaatatattattcctctaatcatcttttagaaattttttattatttttaatttacacataaatcaatatctttttcagatatagttttatctacattgtatgtaatacctccatgttgctacacgttaacacttgcatatttgttactcaatctaattaagcaggaattaaaaacaacggttaaccggaaaacttttactatttatccattcagtattatcttatagctcaaattacttttagtttttacatataggatataactctcacacacgtaaaatacgattaaatttaaattcaaactaggacacttatctaatctagtgttatctgaattcatagagtgttagaagaattaggaaacgttttttaatcaataacatcatttttgggaataatatgtttatcaaatataaacctacccaaagaaaaaaaaaatcaccaacaaatatagtacgaattaagattcataaacgtgttccggaatccaaaagatcgaaagttttggataagtaagatattcacaaatattcatttttaaaattcaaaatattcgataaatacaagcgatcttccggaacagatcttaaatacgataaacaattaatatattttagaaataagatcggtggcaattaataattatgctctagcgaagacgtttcgtgataactgtgaacattagaggttaagtgacgacaagtgatcgagagagacagagagagccaaaaggagaaactacaaaaatggcgaaaccggaagaagtatcagtcccgatcttcacatctcttgagcctgtctacggcgaaggatctctgctccaagaagctacacaacgattcgatgttttgaaggccaatttcaacgatgtcttcggtgcttctccccaactcttcgctcgctctcctggtaaataatctcgggtttttgaatttttgcaaaaattggaatttcgttgactttgagatgaattggtttctaattattgtatcgatgtctgcaattttggtatttggatgatgacatcagatgatcttctgtttggaattgttggatatgattgtgaaaatagatggtgaaggtgtttgttatattttgtgtgtaggaagagtgaatctgataggagagcacattgactatgaaggatactcagtgttgccgatggctattcgtcaggatacaattatagcgattcggaaatgtgaggatcaaaagcagcttcggattgcaaatgttaatgataagtacactatgtgtacatatcctgccgatcctgaccaggtaatgtatctgtgttgcattctcctgtttgtcacagacaatatagttgagatcctggagtcctagaatactactggcttactttacttatcgtacgtgttaattttgcaggaaattgacttgaagaatcacaaatgggggcattacttcatatgcgcgtaaggggtttcgtttggagctttggtgtctatcaggaactgagagatctcaatattttttgtccctgagttgcctttgattcattacaggtacaaaggatttcatgagtatgcaaagtcaaaaggtgtgaatcttggttcaccagttggacttgatgtgcttgttgatggaattgttcctacaggtatatgcatcatgatacttacggaacagaaaaacttatcatttcaaataaagtttatcagtttactttcaagctgtaactggagtgtctcgatttttaggttctgggttgtcaagttctgctgcatttgtttgctcagcaacaattgctattatggctgtctttggtcataactttgagaaggtattattaagcaatcgtgctctgtgaaaggactttcataaatctcttgttgattattgaaatttccaagttctctctgcctttcagaaagaacttgcacagcttacatgtgaatgtgaaagacacattggaacacaatctggtgggatggaccaggtcataattttttctcaaataatccatgatttatcaccttcacacataattatctcttatttggattgatcaatttttaatcatttcaataggcaatctctataatggctaaaactggatttgctgagcttattgacttcaacccagtccgcgcaactgatgtgaaactccctgatggagggagttttgtaattgcacattctcttgcagagtcgcagaaggcggtcacggctgctaagaattacaataacagggtcgttgaatgtcgacttgcttcggttagtcattgcataactttcctgctgcaatatcttaactctgtttggtagttgcgtatgattctctctttaccatgtggctttgtagatcatacttggtgttaagctcggaatggaaccaaaagaagcaatatcaaaagttaagactctttctgatgtggagggattatgtgtgtcattcgctggtgatcgtgggtcatctgatcctcttcttgctgttaaggtacgcatcaattattcattgccaaaactggcggtttgatgttaaattatctctctgtgtatcagttgatctctaatgttttggaagatatttagggttatatgcttcttgtctatgcttcaggaatatctgaaagaagaaccatacacggctgaggagattgagaaaatcctagaggagaaattaccatcaatcgtgaacaatgatccaacatctttggctgtactcaatgctgccacgcatttcaaattgcatcaggtaaagtgtacaactctgtggaatattgtgttttttcttaccctgactcttaataataatggtctgctgcttacggtcatcaacagagagctgcacacgtttattccgaagcccggagggttcatggtttcaaggacacagttaattcaaacttaaggtgagaccgattttcgacatggaacttctgattaaatctttacaggaaccttgatacttttgaaatataaactgtgtgcagtgacgaagagaagttaaagaaacttggtgatctcatgaatgaaagccattacagctgcagtgtcctatacgagtgcaggtgcataaatttaagatccaatgttaagagtgaaactgtttaatgtgaaaaggattgattttgaatttggtgaaatcgtgcagttgccccgagctagaagaacttgttcaagtttgcaaggagaatggagcacttggagcaagactgaccggagctggatggggcggttgcgctgtggccttggtcaaggaatttgacgttactcaattcattccagcagtcaaggtaatagatagcttccttatggttggttgtataggacaataacgttattgttacatattttttttgagtaaaagaaatggagttgtggtatttatacaggagaagtactacaaaaagagagtagagaaaggagtggtaaaaaaagaagatatggagctttacctctttgcctccaagccttcaagtggtgctgccatcttcaacctctaaacacatctctctccctccttattaattttactcaaatccgaattgtttgcagcaattgtgcccattgaattcccagcttcatttttaataaatatttttgaataatatgtaggagttgacgacaataataaattgaagtttcattcacaattttttctgcattttttcagagttttatactgtaactagcaaaagtactcatttgcaattttaatgtaattcttaattctaaattttattattttcactcttaaattcacctgatacacaataatttagtaatttatctaatctcatggttactattatttctcaagttgtaaactaataaagaaaatataacagaatttgtatagatacgctgttactttagaggcacgtacaatatataagaaattgagaggaggtttgtacagcagaaatggttgaatagaactacaagtgtattacgtttaaagaagaagacagtaaacactgccacgtaagctagcccaaaaggggatattttttttttagcacaggcccaaaataatattgagccggcctgatttagaggcatatatagtgtttaagaaacgagtggttgatcagactctggcatgtcatcaatgttgtccccgccggtaaagaagaggaagatagtggcgccgcaatcgcagtcggcatcggcctcgtttcagtcgcttcccgatgatttgatattgagcatcgtcgctcgcgtcccgagattgtaccatcggacagtctcgctcgtctgcaagagctttcgatctcttctagtttcaccggagctttacaaggcccgatcagtctcaggccacaccgagagctgtctctatctgtccatagcgtgttatcctgattatcgcatgttcaccctctgccggaaacctgatcaaaccctaaccaccagtgaggaggaggagaagaagaaatcaaatggttattatttggctccagtcccagatccagattctcatcctgtctacttctcgagtctcgtcacggttggttctgatatctacaacattgccggttcgcacgcctcctctaacgtctcgattctggattgccggtcaaacacgtggcgcgaggctccgagattgggcgtggagctaacctcagtttctgctagcgtccttgatcgaaagatatttgtagtaggaatgtacgcagatgatgaagaatctgaatccaagaacgacttctttgaggtgttggacacagaaacacacacttgggatcctcagcccttcaattgcagcgagacaaaagacaagtttttaaactgcagaaccgcatttattgacggaaagttcctcgtgaaaccttggattcatagaggggtggttgcttacaattccaaggaaagtagatgggaaccggttcaaacgaagatggctatgtccatgtttaatgattcttattgccagatacacaatgttatctacttagcttttgacggaaggatcagatggtatgacgatgcgctaaactgttggggagacgtccagggtttgctagaactgggtaacatccctcatggtccttcttgtgttagattggctgattatcgtggaaacattgcggttttctggttcagatatttacctgataatgatgactacaaatggaagatgatttggtgtgccgagattgcgcttgaaagacgcactagttgggagatttgggggaaagttttgtggtttgatcctgttcttactgtccctgcagattatgagtttgtcaaagctcttgctgctactgtttgatcgtgtgtatttatttggtaaaatcactcttctttctttggaatgcatgtgtgttctttcggtgtatgcagctatgatcaagaagaatgactgtctcttgtttcatttgaaagaaaaacactaataatagactagagaaatgcataacaattgggatttggtcaagagacatttacaaattaaaaagttaaaagtcaaattagtttctccctgcaaacaaacatctcacaggtatcatcatcatcacagtcacaggcacacatttaacagtcgaaagctaaaaaaacagagaaaagaatttaggaagcaaaaccatcattactactaacacaacctaacatttaacctccataccatcagcttctctgttaaccatcttttgatacccaaccacataaccaggcaaatgctttgagtaaaccggtacattattgcactgcttatcttcccggattcgccaacaagtctttgtcaccttcttgcttctgttgttgctaccacactcaccattcttaggcagttgagacgctttgacaagggttaactggattctaccaactgttccccggaagcttccactgttgacattcttcagaaagtctatcttcacagattcaatgtccgaaacattaatggttctgagctgtaatccccagtaaaagacaatgtttggctgctttgtataggtttcaacatactctgttggatttggatcgcaaatgccatagacttcctctatctgcattaaagatgagatgagagattttcaataacatagcaaaggccatactatgagacagaccacagaactagcagagtgtttgtaggatttcatatagaaagagttgaaccaaaatgggaagtgcgtaccttgataagaagacaacggaaacgtgacttaacccaaccaacccaatcactgagatcttcctgattagcagccgagagatgtattttggtgaaccacgtgtatgtgtttgcatatggatagagctcaaacaaatccttccaactgaagttgagcttcaagtaatcctgaaaaatggaatagaccaaaaacatggttaaatggctcggaacacggcattccttgggtgaaagccaatgcacataaacctcaggcaagatccaaagagctaaaaacacagcctaacaggatggttaggtggatactgaaaaagtaagactctacctttgtcaaattatgccctagtagaaactctgccactatcttgtaaaatgtgcttcttgttatggtggagttgcagtattgatgtgaaccgcatggcagttggattggcattaagcctggaggagccccagtagatggataagtgtcctctagcaacaccactggtgtaggccattgccaatgcgcaaatgtgtagaagaaatttgccagaagggaactcaatgttgcattcggttggtatccacagacaaatgcagcaagaatagccatatgaactccccctagaaatccattcaactgaaaacaagtggaatcaaaatcaattaagcttctgcattcattgatagcctgatgatgagcagtgatatgcatttagcacttacattaccgtatacacctcgcctcttggcccataatttgacacaccgcagcaatgattggaatagctaaaacaggaataagatattcaataagcagaagttgaggaaagagtcaagttagtgttgtatcactattacctctaaggaaggcactaattgaagtatgcatttatttgcacgaactccagacaagattttccaacttgtctcatcaatgtccctcagaaagaaaggattaagcacatctacattctgaagttctcgcagttaatatcaaaatcattttagtgtctctaagtaaagcaactagaactatagaaagttttgaaaacgaacgtttggaatggataatactctaagctgagcatatggaagatcaaccaagatcccatcaaacttaaagcggatgagaggaacttttgcatctttaacacaatgaagctcggaaacttctcgtctgcttttcaacatatcacgcaaggagatgaaaaaatcctcctgtaccaataagagaagaatctcaacttcacgggaaacaaaaacaaatgtgaatcagatcattcaacgaaacaaggaaaactcacagcaatagaggcaaagaaaggaccaatgcagagagcgtcaatgtctgattcagaaccataaacctggatgacaatgaaagacaacaagagttagctaaaagtttcagcattatagagtcgtttactagaacaatatatataaagattttgaaaaagaagacaagtgaaagagaaatctcaccccaagaccataagaaccataaggtaaaatggtggcgttggtggcgtcaatctgattttgtggaagacggtgttgccaggcaacattcttaacccatctcacaactatctgttcattagaaagaaactcagagacatcagtaatcactgtccaactactcaagaaacaaaactgaatgtacctttcgtagctgattgataacacctcttcgtttcacctcatcttcaagagatggaatgagtccttcattaaccatcagctacgaaattttgaaagaaagtgaaatcttggttttttttaagtccttaaattgagaatgagtaaaaaccctaatatattacctgacgaagcgagatcgagctttcgtcatcttgagggaaacctagggacaagaccagagccgtaacgtgaggaacaaggatccggcaagggagaaagggtttatcgaaataaaacgtggaatccaaggcagtgacggcgttgacaattagcataatccgccgttacacaaaacgaaaacacggaaagagaaagaagaatttgccgggaaaaaggactaacctttatttctcccacctccctttttcattgccaggaatgtcagactttgtttcccgagaaaatctttgaagaaaaagaaagcaaaattggtggagtctctccgcttcgccttcgcctttgttttgaacttcgaactaaaaattgccttaaatccagcgcagcaatagatttggccccaccaaattattgacgtggaatatgtattacttttttttttaatagtatagctttatttctctacttattatatttttctagtttataatctgaaaaagagataaattgaaattttatcgaaaatttctgttttcaaaggatggtttttatggaacaaaaaaaaataatcttccactaacactgattttttttttaacgactttcttcattgattcgatcaagtataatactgattatactgattataaaacaaaaaaaatgtatgtgaatgatcgttttctgttttttttttctttcgaataagatttcaaattttatttatgcatcctggcgtatcattttttctgatgagattgtgattctgaacatggcaattaaaatgagtgattctaaacactgttttagagactacagtctacatgcgacacgaatataaaatgatttgatcagatgtggacactcattatcatataatattataatggaatctaagatcagttagtatacgaatatgtatagagtccgaagcatataatgtcggtgaattccaattttcttactccaaactgattgcatgttaataaaattcttacttaatgtagtttgactatttaagtctaaagaaacgcgtctttgacaaacacacgcccacatcgcatcagccagcctcctaataattaaggtttaaatgaaagttaattgctaattacaatctgaaaatatgtgacaatgactctcataggttattatacatggtggtttatacgaacgatacacttcagttcaccggcattgaggattgtgatccaaaatcatccactctttcaattgctagtgagtacaattaatgagataaaggtttgaaactttacatgtcacacaaaaatgtggaaatcataatacgtattatcttcagaatcacgactcaaaataacatccagaaatatatatccttcttatattactggaagttatatacatacatacatactgaaatctcaaaatgtaatgggaatcaaaatgtatgatccaccgagtgtgaaaacaaaatattaaattgtctctttattatctttagttgtctcgttcttattacgacaccgatctgaaaaaaacgtttatttggttgttaaaaatctcactacacaatgacaacttttatctttgtatccatgcaagcatttcctttctattaacagcacccgattatgatagaagtgaataaaaaccaaaaatggtattgtcatacggaatttattgttggttttaatttgtaattaaatctgtcggttagtcatttttgtatttctattcttttcgtgggagaataaaataattgttttgaggtagcagctgcaaaccgctcaaacagttgcgcattaggcattacacagttccactcgttccttttgaagcttatctgtgtgactctaatctgttactataataggaacgaaagagagaactaggatctatacttgctccaaccttgctttgtttctcttctgcgatttatctctagatctactagatctggacaaggagcgaagcgaattgctggcaaattttagttttggagttttgaaacccgacgattatcgcgcttgatcgttgcttctctgatcggaaatggcgagttcaagccctgttacacctgggctagtacgtcttttgattcgtttgaattagagatcttgcttgatttagcttttgataacttaagatttcttctgttgagctcttgttagtttggtagtgatatactgagagtgatttgttttcgttttcctggaaattgcagatgtcggtggtgttcgggattgtgccggtgatcgtggcttggctatactctgagtatctgcactatgctaaatactcggtctccgccaaaacgtatgttgatacaacgtctttaagtgatgatggagttttgctttgatttcgttattgatttctcacttgggtgtttgtctatgttagtaggcactctgatgtcaatttggtggaaattgcgaaagattttgttaaagaagatgacaaagctcttttaatagaagatggaggtggtctccaatcagcttctcctagagccaaaggcccgaccacacattctcctctcatcaggttccattacttcttccgaagcaaccactgacctctgtagtttttctttttcttatgcttatatgccggggttctacgcaggtttgtcctcttggatgagtcgttcttggttgagaacaggctgactttaagggcaatgtgagtattggggtccgtttctagagtaaagttttgtatgttcaaaggtccattatcctgaagattcccaaattatctaaattattttttttaatgcagaattgagtttgcagtacttatggtatacttttacatatgtgaccgcacagatgtcttcaattcatcaaagaaggtgatgatgatatcctgcttagtttattctggaaagatttatctagctagttacagagtctttacattgttcagcaacatcttatatacactcgttttttatcgttaaagttggtctaaaatgttagatggaaaaaatagacccataagattgtgaatttgacgtgacaaaataagaaagtttgtaaatttgataagtcatgatggatatcctgcttgtgtcggttcattcgtatgtgcttctatgtgtctcagtagcttacattgttaatcttttgacacagagttacaaccgggatctctttctgttcctttacttccttctcatcatcgtttcagcgataacttcattcacgatacatactgataaatcaccattcagcggaaaagccatcatgtacttgaataggcatcaaaccgaggagtggaaaggctggatgcaggtttgtcatttaacttttatgttagtgttttatctgccttttcatttgccgctacctcatcattgttttcttattctggtgttgtaggtccttttcttgatgtaccactactttgctgctgcagagtactataatgcgatccgtgttttcattgcttgctatgtatggatgactggatttgggaatttttcttattattacattcgcaaggactttagccttgcaaggtttgcacaggtaagagctatgtcctcccggcttttttcttatttttggctgtcacctacttgaaattctaacatattcttggtctacagatgatgtggcggctaaatttcctggtcatattctcctgcatcgtcctcaacaacagttacatgctatactacatctgcccaatgcacactctgtttactctaatggtctatggggcacttggtattatgagcaagtataatgagatgggttcagtcatagctgccaaattttttgcctgcttcgttgttgttatcatcgtttgggaaattcctggcgtttttgaatggatttggagtccatttacactcctaatgggtaagtgagaacccaaatatttgtttaccaagataaacaatttgctcatgcctcacaagacagctgtttagaaaacaaaacttgaaaacaacaattgcaggttacaatgatcccgcaaaacctcagcttcccctcttgcatgagtggcatttccgctctggacttgatcggtacatatggataatcgggatgctatatgcatactaccacccaactgtaagttcccaatactagaacttcacatcaactctgttcacaaatggttagctcagtgataaagacttaccgtttcatttccttgattatgtatcttataggttgaaagttggatggataaactggaggaagctgagatgaaattcagggtggctatcaaaacatctgtggcactgatagcactaacggtattacaagtcatcatttgactttctttcaggtgaaagaagcctcttgcatattgttcttccagctaatctatctttgttattatgaaacttttaggtgggatatttttggtacgagtatatatacaagatggacaagttaacttacaacaaatatcatccttacacctcttggattccaataacgtagtccactttacctgcaaatctctatacaaccactcttctaagaaccagtccttacttgtgtacctcgttttgcttttctttcagtgtttatatctgtctccggaacatcacccagtctttccgcggctacagtttgacccttctggcgtaagtaaaaaataattcagtcaatagatatgtttatcctcttataacgattttttcaagaaaaatttgttcatgaactttcaggtggcttggaaagataacactggagacatatatctcccagtttcatatatggctcaggtatgtcacacttttcttgcccaagttctcaattgtagagtaagtgggaaattgatggtggagcatgctaatacaataagctattaagatttttcctgacccattgaactatgaaataatctaattcacccacagatctggagttcctgatggtcaacccaaattactactatctcttgtcccggattacccattgttgaacttcatgctcactacttcgatttacgtcgctgtaagcaaaccctgctacaacagatagaaacaagttgaaagccagacagatacaaacaaactgattggctttttgttgctctgttttcagatctcttataggctctttgagcttaccaacactttgaaaacagccttcataccaaccaaggacgacaaacgccttgtctacaacacgatctcagcactcataatctgcacttgtctctactttttctcatttattcttatcacaattccccaaaaactggtaagtcaaaattttatctttttgtgtgggagaaagcttttttttccctggtacttgagttcattgatatgttagtgcatacacaaagcgaggacgaatgtcatcctctcatattcgattgaaccatctcacgttttattatttcactggaaacaaacaggtgtgaagcacttctgaaccggaccagagtggactattcgaatgaattcataggagttgaactacgcgatatggtagatatacgaagatagaaatcagaggtagatgcatacaatgttgctgtaatgtcatctttctgtatatttatttatgaataaggtgttctttcttgtttatttgtgtttctgttcacgatgatgttaagacttattattgtctattacaagttaaaggaaatccatatgagtaattgtatagctataaaatccagattaatcttacatcaaagtaaaatatgatggacttgcaaaagccattactttaatgtaaggaaacattgatatacttagatagaaagtgtagtcatagcatgtgtgtcaagcttgtcctctattgctcggtaggcagagaaagtgtccgagtcttcccatttggagaaattatacgcgggcccaaaggaaagcaaaaaatgaggtactgatattaaaaacaataacagtaccttatagtcaccccggtatagattgttagacatgctaaagagacaagataaccaaccgaggaagagcgtgtacaaagcatgtccgatctccatcctaaacttatccgatagctgaatcagccctaaccctccggtgaacaacgagatggtgaataacgacatggacaattcaaactctttgtttgtcaatagctcatatattaagggcaatgccaacgctaaatttgcggaaaatgtcgaaaacaaaacctgaggtactctctccaactttgtagtaaactccttgtagcaagcggaaggaggagcggtgaaaaaaagatatctgagtagcgtcactgcgtagaatgttgtgacactgaccgcaccgtccctaaaggactgagacgatgaatctccaggtggccagagaagattgagtgatttggagaggccaaaaagtgagagtagagtcattatataccatattcctctgcaaacaaacacatccatatcactaatcttcttctccatcgtgtgtgtgtttttactaggactatggggtttcggagatttaatagtcgtcgtgaattcgtttttcgatttcttttatttagttagttaaatctgcttttatccagaagaatgtggtatatctctattattagttaaaagtggttagaagattttcataatcacaacaaacaaaagaaatcttcgcaatctttatctaacacttttttttttcaagatatataaaattcttttatattcaacaaagaaaatagttcaaaaaatcacattataagtggaccactgaccagtaaagtgaacgaagaaagtataaactctattttcttcaattaaaccgtttatataaaaaaaaaaatcatattttaagtttctaacataagaaaaacagtagaccctatagtctatgcgttgattaagaagatgggccatgttgggccgattcacacttacctcttttattcatttacatcttaggcccattacgtttgtatatgtaatgtaagaagaaacttcttcttctcttgaacctcttcctcgattctcctcactcatctcaacatcttcccagattattcaacgctcgtgtatcgatcaagctactgaagtcacgttggttcgacttttgatacacaaatctgttcgagccaccatgatcgacatccctccttacccgccgcttgatccttccaactacgatctcattgtcgtcggcaccggagtctctgagtccgtcttagccgccgctgcttcctcctccggtagttctgttctccacctcgaccctaaccccttctacggctctcacttcgcctctctttcccttcccgatctcacttctttccttcactcaaactccgtttctcctcctccgtcgccgtcatctcctcctctccctccgtcaaacaaccatgattttatctccgtggatctcgttaaccgatccttgtattcctccgtggagatttcgagcttcgaatcggagatcctcgaagaacactctagaagattcaacgttgacttggctggtcctagggttgtcttctgtgccgatgaatcaattaatctcatgctgaaatcaggagctaacaactacgttgagttcaagagcatcgatgccagcttcgttggggattcgagcggtgagctacgaaatgtgccggattcgagagctgctatattcaaggacaagagcttgactctgttggagaagaatcagctcatgaaattcttcaagcttgttcaaagtcacttggcttcttctaccgaaaaagatgattcaacaacagtcaagatatcggaggaagatatggagagtccatttgtggacttcttgtcaaagatgcgtttaccacccaaaatcaaatcgtataacctccttctctgttaatggcagctctttggacatttgtctctgcttaatgcttcttagaattttgtctctgaaatgttgataggtaaggctttgtttcctcttcttctgtgtaggatcatcttgtatgccattgcgatgctagattatgatcaagacaatacggaaacttgtagacatttactcaagaccaaagaggggatagatcgattggctctatacatcacatctatgggcaggtcattcatcattttctcattcctggctcttacacatttgtgatcatctttcttattggtttacattatcattggttatattgagtataatttagcttttgattctctaccttaggttttctaacgcacttggggcgttgatatacccaatttatggacaaggagaacttccacaagccttttgtcgtcgggctgctgtcaaaggatgtatctatgtacgtttggaacaattttctgcattgtgtactgtgttgctgttgtggtatttgttacttatttagtctttcattgttttcacaggttctccggatgcctattactgctctgcttttagacaaggcaagttagctgacagttgtagcataagataagtttagttgacggaaaggattcttacttgattattttaaactctttttgcaggaaactgggggttacaaaggggttagattagcttctggtcaagagatattcagccaaaagttgattctggatccatgtgttactgttggattagagtctctgtcgtcattgacagatcagcaaaatgaaactctcagtgttcttgtcccaaagtcgatgatcaataaggagaaaattgcaagaggagtatgcgtcattagaggttctgtgaaagctaatgtatcaaacgctcttgtcgtttatccacctaaatgtaagctaatttttgaagacccactagttagttgtttcacttacatgtatatcgtcttttgcgttttgaaggttctaacattaatagttttttcctcttagctttgtttccagaacagctaactgcaattcgggttctgcagcttggtagtggtttagcggtttgtcctgctgacatgtaagttgtggtttagcctaagatgatcttttcccattttagttctgtttctttccatttgcttagctttaactgttctctaagccatatatatttgctgctgcaggcatgttttatatctttcaactttgtgcgacaatgatgaccaagggataaaggcgctattatcagccatgagtaatctcatcagtttgcctgttcccgagaatcgtcaaagcgattccgttgttgagaatgatacttctgagacaaaacctattctactctggagagcactgtacgtgcaagagctagtcaaggtggaaaatgtgattgggaatttaccttttcatttcgacgttggtaatgtcattttcactaaataaaagtttgatttggatcagggtgaatttggaggtacgatcagttccatgcctagtccagatggaaacttgaactacaatgagatagtggaatcagccgtgaaggttagtagaagctccttacagcagttatctcattaagttatggttttgataatgttatcatattggatttggtagctatatgaaaagctcatggggagtgaagaattatttaaagaagagacctcaccggcggagaacacaacggaggaggaaaacgatggtggtgttgaaatagaagattgattgatgaatgaaaccattggttttaaagacttagaatacccatttatttatttgattgtaacatatagttaccccgttattagaggggaagcaggaagattggcagagggagggtgagccattttctttacttattcactagagagcaactatgattagggaagaaataaaggattgagaagaagtgattaatccacgaccgcttgtctaaccattgaaactccacaaactttaaatcaacgactaaaaagaaataatgaatttgtatagaaattaatttattcagacatcttttaccgatcacaaccataatcgttctatgtttctctttgaataaacacttccgatttcgtatatttcgactccaattctgattttcatggccaagtccagaaacttaaaaaatcaaggaagatatcattatcgactaggaaatttgactttgaagtcaagattaagaatttgaatgcttttttcgagatcgttgggttaatgttatcatatgtaatgtggtgccaagctctcattatgaggcccaattatgagggtttggttattctctggagagaatcgtcaatcgtttatccaatcccaaaggttgacacttgacagaatttaaagcccattgggtctgaattagcgtcggaattggacccgaaataattctatcaattaaagattaaaacagaactacacgcgtgtaggaatttaaaatacaaaaccactcgcatcacaggcgcgtttcggcgcgtgagactataatccgtggactataaccctccttttcggggatttttgcataaatttaaaattgaaaagacttgcagcgcgtgggacgagatttcatttgttgtataacttattgttcacgactagtttttttttttttttttttgcctaaaggtctttctattgactttttatcataaaatggaacattacaaaataggtcaagcccaactagatgattacaaaattttaaaactgaaactaaaaaggcccaaccccaataaagggataccaaacccaacttgaagagaggcatgaaagctaaaaggattagaccaaaagcccaaaccactatagtttatttacatgagaatataacaagacgaaaagaactattaccgtgtgttatcttctgctcagattatggtccgaaattattgttatcgattcttgattcagattaaaaatgaggtaaaactgtaaagaatttctgaattgtgattttgaggtttgcactttaatagaaaacgaagctagtactcatctccttttttttttgctgaaatatgaaagtttttgagctataggctacaaaataaccaagttttttctttctaacgcatatgacattactacttcacaaatggaaaaacaatgttgaaatttctgcaaacatgaatgaccacataaactgatctctgctcaattcattagaagggatctcaaaaaccgtaaaatttcagaaagttgtatttcatatctagttatttactacgacagacaaaaaaagaatcaaaattgggaactaacggttgcatagcactcaaacgagtttcagaggtattccgccagactttcaccgctcatctcttccatttgtttgataatatcttgagccaaagatttaacagatagctcgacgtcttctagtagctcagccaagaatggaatggtttcagcaagcaacacaagatactcttctttcagattatccagcatctgtttcacacttctcaaactcaacatccttgaccgtacactctcactcctcgtttgcattagcacctgaccaatatgattttatgtcagttaaaaaaattgaagtctatcaaagatagctgagactcgctttcttgagattatgttgttacctcgtggttcagcggtttccagaggaggtcagagcctgaggctactgccatttgaccgatgcatgaaaccaataaatcatcaacctcatccacagatggtacatgtgggtgctcctttaaagaagatggaggttcaacaacaagctgtgatacaataggcttaagtagcacctgtggaaagaagataatttgaatcgaggtcaatactccaagaggaagggagagatgttagattcaagcagaagtaaagtttatagataataatgacctggaagttatttgtatccagaaacttcaagctgccggtatcatgcagaaaacaattcttcaagcaagaaagaactaatgccctaagatgccagctttttggttgtatagagtcagaagtttgctgaattttggctttctttttcttcctagttgaaacagaagcttcagcagtggtgagatgtgctacaataccatcaagcacgtatttgaaatacggtacaaagatggacctgcaatccaaaataagagaatttgaagttaattttccaattatctagatgcatcaggaacggataccaggtatatgaaatatgttcactcacctgtgactctcacagagtcgatccaccagaccatagaaagatatagctcggtcgatgctcttgttttcactccctgatccgtcaacaacatctgactctgcccaatcaatactcctaataaagagaggtctgaactcggactccgttagcttctttgtgagagcaaccattgcgctagttacacttctctcagcatcatcaatgttctgaattgctgctggatttagacgtcgaatatcaagggcaactaagcactgatcaaaaatcttcccatggctgctaacgatagatgatctatccattttcacaaccagatcttctaacatattaaaagcaatcaccaagcttgcattcccagaactaacagcctcattgtatattcgtagaagtggttgcagagtgagacgaacctggaagaaaggttactattaagagcactacctacaagcaaagaagtactagattcatatatgtatgtgaagaacttacaggtattttatcagtaaggagcctcctaatggcattggctttggacttgagattcttgtcgaagtcagatacatattcaggatgtagcaccatgattttcataatatctccaagatgaggatttaggaaacctccaagtttatcaatcactgcttccaaagtgactagaacagacagcataagcaactgttcttcagctgttgcgtttcgaccactctgggatgcaaatgatacttcaagcgactgttttaccaaattcttcattatgcatggaagttcaatgagcgcctttggtccaagaacattgatcagtgcaccagttgttcgaagacagctggacgagactcccaaattctttgaactgatgcattctgcaacagctgcaaggcatttcctgaagattggatgaccagatggaaacctgccagccaaaacttccagtgtagaaatggcagctcgttttactggaacacctgactcatcatctgtcgcattaatcagatggacaatctcctcacacatcttcccgaaagaatcaacagcaacctcatccaagttcaaccaagaatttcttcctttttgattggaaatctttctcttgtgtttcattttagaagatgaggtgtccttagctctctcacttataagtccaagtacctgaattcataaatagcaacatttgcatcaaagaatgtcattaagccaacaagcaaaatctcgataaagaataaggtaacttcaaaggatctgtacattcccaaggaaattcacatggaaatgctacttccatgcaaacaaaaggaagaatattttcgtagaaatatgttcactcattatagccacaaaattactacgaaaacttctgttactaaatggtaataacatatacctttttcgtcccattataatctgtctgctgctgaagcaagctagtaacaaccctgaaatatatagacagatccatggctcccgtaacagtcattaagacatcatgtatacgcattctgatttcatttctaactgaagaagtcacatctttctcctttttcgcatcaatagcttgcaggagacatatacaacacttcataagctcttgtagttcttgctaaaaaaattaacaaaaggttacttactaaaaatagacatttaagaaagcacacaaacagagaacaaggtaacaaaagattccaaaaaataacatgcataggaatatacacagaggtttagtaacaacaatctgtatgaaatataaaagctggaaaaggcttttttacctggatgccaacagaaacattatttcttggttccagtgagactgcaaatgcaaattccgggtcttgcaatttctggaatacaaattctaatacaagccgcatctgtaagaaacattgtttactgtctttgctgatagtttgaagaagtatgaccaaggatgagagccacgtcgaagaagaatattgttcacatatttccatggcaaaagaatactcccattcttttttaacaatggaagcaaaactttcagaaacgttggcattaccaagccaagctgagtcttttcttgaaatcaaagacttaaataagaggacaagcaaagcaggcaagccatttcgttcaccgataactctgcagaaatgaaggatcatctttcagcattttcagattaaaacacacaaaatcccgtttaaatttttttactatctacacattaccccagcaagtaagctacaattgaacgccttctatgctcaacaatatcaggtaagactttcacaaaaatctgaaaaatcaaattgaaaataagaaaatattaattgacaattgattttacatttaaagtacaatatttagggaaaaattacctgtaacaactgctcctcactcttagtcttagacagccaaaatggaatgaccattgatataaacccctcaaagatagacttcgagtgactatcaatctacatatcaaaaataacgaaccagtagttagggaagatacagtaacgaccaaaaatatcgaggaatgccaagaaagatccagagatctgaagagtttaaaggaaaaaaagaaatttacacaagactacgaagatatagactacaaacctgtgtcacagttgattcaccaacaagtgtaagtatgctgataatatggtccaaaaccttatcagggacaaatttaacaattgcagtgaacaaggagaagatatggttccgtgtgactccatcatttgatgaatgagccaactcaaccagcattttgacattgatttcatttgctacttcagcctgccatcagaagagaattaagagaggaaaacaggcaacaatatcattaatcaactgcattaaaattttaacttaccttcaaaggattcatattcagagaatcaaaaatatctttcaggattaagagcagagtctgttggatggaagaaataaaggtaggagttgtttcacgaacatcctgtggaggctggagtgacgtttcctcaattgaaaaagcaattttcacccattctttagacatggatctttgtaggagcttaaacaagggccttatgagggactccctaagcaaaagaataattattaaagatcagttgggtaataaaaaagtctcagatgaccaaaatttacaatcgacatgcaaatataagcatattgaatttcaagagacctgtgagttagatctttcttgagaagcagcatgtcaagtaatgaggcaatgaaagagagagccttttccccacttcgaaattcctcgctatttatgtcttcttctggacatgactttgaatttttcttctgtttcttcttcttgctcaaagaaccaataacaagagtatcctgctgagtgatacgatcaagagcaaggaccaccgttgaagaagaaagctgcaatagcatgggaatagcaagtaattaaagaaaaatacaacaggcaggaattctttgaagactaaattttcacatttttctataattttttgaaaactagaaaaaaaataaaaaccactacattatccatcagaaaggactttgaaaaaaaaaaacgaatctggggaacgaatagaaaatgaacataccttcaggcgtaagacagcttctttggcaccattttgtatactgccatttgaacttcgaaacatagacacaagtttgtggaagaaacgaatctgatccggaaaagacaatcaagttattatgatgatcctgatacatatgtagagtatccggctgtagaaggatattgcatttatattacactatgttactaagactgacctgaacatcagtctgcagttcatcataaaatcgattgcttagcttctccaaaatggtaagacaaggagaaataacagcaggacgttctgaagccatacaatccacctgtaaaagcaaacatctgtgactggaacaaaaaggtttccatgcaaccaaagaaaatatcagagaatgaacttttcttacattcaatgcgctcagtatatgatcatcaagagactgccctttaaacgatgatgttcgcatcatggagcactgacacagggagagaaaagaaaaagggaaattttgttaaactgtagtgcaaggcagtagctaagttttcctctaacacgaatggaaaaaagtgagtttacctccagaagaaggcataataaatcgacctcagtgtctgataatggctgggaagttttgtccagcttatagtagtattgactacgtttatcaagaagttgagacaataacttaacaatttcatcacgcataagcatgatgcccagatcttttagcaaagataggactcttagctgtagaagaaaaaaataagacttttaatacttgttaaaaaaaagtgtaacaaaccattaggatccttgaccttcaaaaggaaaggaaatgaacagaaacagatagaagagcggtagaggaaacacaccttcccataagcaggtaggtcttccgcacacaataaaatgaccgaaagaatgttttcttttgtggattgatcaaacctgaagttgaaaaataaggaaaaggtgacatagtgcatgagaatataaaattcaagtattgggcaaatggattgacagaactcttagtcggatgcaagttttatcacagttttgaattactgttatctacgatgttcttttgcactttttatagtggtgtcactagacacaactatttgaggaaaaataaaagtttcatctgattagttttcgtacaagaaacacagctgagtaccttttttgcaggccaactggcactagaaggtcattagtggttgaactgagcaacgatgtcaagtacgatgcgaaaaacttattgtctgacaatataagcctcctttgttgcacgatcattcccaaaagttcatcaaaagaactaccgtagattgcagcactccctagttttgaatttcagaatataaataaaaaacaagttacaaaaaacatgacatctcataccaaactaagattaccattttttttgctagattcgacacgacaccgaaggttgaagagtgcctcgatacaattaatggcagctgctttaacgtcctacagagtgaatgtaacgagatcaaaacgaataccgaagaaaaggaagataatgcaaaaagtttaaccataaaaagaaagaaaatttcaaatgtcacctgattatcacttgacatgggaaccaaaagtacaggaaagcttgaaaaaacttgaatcaaccattcattattcccgctagagcaaagatacgaaaaacatctgagactttcaatttggacaagaggaggaacatctgcaagaagaagactgcagcataagaaaacaggatacgaaataaacagaaacagttaccagataatagattccacgagccttaacagcataaaacagacgagagaattatcaactaataaaaagtgggatcagtagtttataacatcaattataaactagcaggaaatataaatttccatgcaaaccttctcgtgagatcagtcgggatagaaacaaaacaggacagactttggcttctctcacacggaaatgaaggtgttccttgaagacatgccgcaaccgagttgttgcaaaaaagaaaaacaaatcctcaagtccgctagataaccttttgttcaaaacctaaacaaaggtgaagtgacacaaatacagttgtgagcattgcaattggttgggtagaaaaaatttcaatataaccaaatataacgagatcatggttgagcatcacccaccgaagcatcgtgggcaggttcaagtttaatgaatgactcgcccaacttccaaaacaagcatatcagaaccttcgaattcagagcagtaaaatcagaggtatcaaggagttgatataggagttcttggcagttgcttttcgacagctgcaagtaatacacaaatatatcaactaacaagataatatatgtatcaaccatcagatgaaaatattacatcagctggtagaattctatacctctttcagagaaacatcaacctcgacctcaagttcttcccactcagtcttcaaaacaggaaagcaaagttcgaaaagatccaaaagttgactagggtctaaatcaaaggaaaacacagccatcagcatcatatcgtggttaaaatcatgtaagaccaagttttctacggtgcttagaaatgaaaaaaaagactttaacatcagcatgtatgttaacgcagtactatggacagaagcttaccagatgaagaattcatcttctgcagggaatgcatcaaaatcatataaaacagtgtctttgacaaggtggaatctcggcaactgacagtaagccactgaatataatcagcagggtgcatcataaatgcttccaccagcttgttaatgacatctatgttcaatgcggacacactttcacggatcagtagtcccttctgatatgaaataaccatttataaaatctcagaaacaacgaataatagtataccaagtatgtgaagacaagaaataggttaaaatattgaaatagcaatgcggacttggaagttttttttacgaaaacagtatagtaatgacaaacctgcaacttgttacgatcctgttctgaacatttgatattgctgcatgtttccaaaacttcagagagcttatagttgcacgctctctcaataagctcaatcctacgctcatcaggatccaaggagagtgcttctcccaaatcgttaataatatccatgctaattgaggataagtttgtagacatgatatcggggagctttttctgcaacaatttttctttttcagatgacatgataataatattcaacaaccattaaaagatttgtgattgcgacttggagtattgaaggatagtaaaatcgtaaactcatatttaccattccatcatcagcagcaagattcttgaaaagtggccagttaacatcctttcccaactttagcacaagtagatttaaattccacgtctattaaaagacatgattacagcaattagtagaagtaacaagactttcgccatagctgtagaaaatgaagagaacaagaaagaaccttcggctgaattaagagaaatgggaacattgcagaggtaactttctcagtagagtctgtttgattaccgaagcttgagacagcaattttaagagacaaagcaacaacatcaactgccagttgaacattatgtgatactcctgcaacaagaatggatagtgcgaggtaaactaactgaacatatgaaaattccacacttgaaacaagttaagaaaagaacagagcatctttattcacctgatacgagaatgccaacacatcgtttcaccacatgaagcaaagcatccagaagaccagaagaggttattatattgggcaacttatcgaaagagagggcagcctgaacaacagccagatcatcatcccaaagctgacgcagtatagcatcctgaattgtgacaaggttctggatggagagggtaaaaaagatattgaagaacagtaagatgacatgaagtcaaagtaaagaaacaaaaaatacttggaatgagtaccccacacatacctctgctttagagctatcatccttgagaacaccatttagactagaaagcgcggcacaacgtacagcagcctattatttataagaagccctcagtcttgcgcaaaaagtaaataaaaaattttattcacataactaagattagaggttatagtaccctgggatggtggagccggaaccacaattttgaatccacaaacgggtgagacatgtctgaattcccatccagcatacaagacaacatctctagctttaaatcctctttcttcgactgaacttcagtagcctgcaacaagaagtcgatgactcagaagaccatataacaaacacaaaggaaaataactaaatgagagttggagcacagacctctaaaaatttaggaactgcggcacgtagttcagcaggatacttcttgcttacaacaaccagaaatttcttggcccagcttcctacaactaaattgcaacaatattggttatataaagaggaatctgaaaaagaatcttcaaaaatgaacacccaaaactcaatgacataagtagttgacatatcactaaccagatgtagaagatctaaaatcactgttcttctggtattgtgtcatacataaagagaaaaccttggagatcaaatgatcaaccaaattgcttacgggaacagtctcaattattgaagctaaaacttcgcagcatttatcatcagacgaactgcaacaagatgacagtaaatcacacatgaatactaacaaaataaatccatccgcttgaaaatgacaaaacagtgtttgatatacacctgtaaaaaagtaaagaatccagtagcactgccaggaatcttttgatgttgaactctttggacaagcctaaaagaacaccagaaatatctctgcacaaaattgaagccatcgttgaaaaaatactagtaatagttacaattaaaaaaagcttcagaaggaagactgttcatattcagataccttatttcgttaaaaagatccaatgctttccttgggatcaagtccacagattgcagctgtagttgattcagaaaattaattgtttaaaacaatcaacaccaaccacttgtgagcagaatcctcagtgaggaatagaaaatatgtccacctcatacttagaagtttatacattcgtgatatcgaaaattaaaatgtaagaagttcatgatgacagaaagttattgcacctgaacaaaattgatcaaggccataagtgacaatcgaagcgaatgcgggtcagaagattccttggcatgttcacgaccaatgtcgatgatggacctcatcaagcgcttgataagattagtatttagcacagctctgtttgccaacatgccaacaaccattaacgctccagcctagaaccatataaagtttgtcataaaaggcacatcaactgaataacaaaatcaattagagaaaaatatttggtaagaaaaccactaaaaaacctgttgatctaaacatcctttcacaccagattgaagaccagagtccacaaatggcaaaatcgtctttacaatatctccatcaacagttggaactgaaccgagcaccccaacaacaactgcggtggagaagctaaccacaggttttgaaggctgatacttcttagtacgagatgcctacaatgtaaccaagatttcagatgttcagtttgatgtagccattcaaaaaccagtttatagggaaaaaaaatattaacagctacttacatagtcacacaaggcctccaaaacttgtttatcacgtatacattgctgaacgataaccgatctaggaggtggagcacctgaatttttaacaccatccagaaatttccacttggaatttctgtaaagcaaatgagaaccagggtttactaatcgatatgataaattgtgagacttcacttcgaaatcgaaagtgaaagatatatactcacccagtagaaagcagttgaacaatgcggacaaaggcatgtgtgtcatggtatggcaaggcgcatagaaccacatcttccaagttgtatatatgaatcctgaaatatagagcaattaggacaattcgatgaacgaacaaaggcaaatatacataaccaatagtgataaggaaacacatacttgtatcgtcgtatgagatactcaagggtctccaaggaagcacgaaattgaagataaccagagagtaaacgtagatacgaactgattgatgaatcaatccgagcattttcttctttacccagcaattccctatcaatttctttacttttatgactaaacaagtcgttcatgtaatttttaaacctctcatctttgtttccaagtacttctagacctgaattaacaaaaataattaacgatgagaatttaatttatcattgagcttgttcattagaattgcataataggagaagagaacatacctttgagcccgagctcgtaaattgattcgatatcgaaatcagctgcttctttaggactgaagagaatcgaagggcgtgtgaaaggtctcttggaaggctctgtatcggcttgtaacactgacttgagagcctgtaactgtgacactattgaagaactcatactcgctattgggataagattattcttcagaggaaattcgaagaataagtttgaggtagagagagatagagagatagagagcggcgttgagggagaagaagagaaagaagaagaagaagcgggtttagggtttaacgatccttttatttttaatctggaagatatagtaatataaagaaacaaggaaacccctgagttataatggaattgcgttttaaaccatgacctatttttttgtttttcgaatttaaaccccaatagttttacaacttgataataaagcccatctctaatctgccgctactattacaaaactgtgcgttttaattcctcaatcgagaaagtcttgaaacaagtgtaagaaagtcaagatacaatcactgttcacatcacatttgccaagattaacaaacccatctatccaagaatttcagtaaaatggaagtgagaacagagaacaaaaaagaaacttaacacctgacctctttcattagaagttaaatattatattatacgcagacaattaacgacatcatcaacttcaaacatatgttcataaacaaaaaatgtactataaacaagtcattttccttatcctcttcattaatagttgtaaccgttagccaacttcttctcatccttatacacgactccattttccgtttctccacacttggcaaggcctaaggtcattgtaagcaaactccaaactctcatcagtcgtttggaagtagacaccatatctcgttttgttgttgtttatcttatatactcgaccagaccaccatccttcattgtaccaagcatccacaagttcatacaattcatatcgatacccctttggaatcagtggaggaggaggaggtcttatatctgaacctcttgcttcttccttcaacaactctctttcatcgtctgtttttagtgtttgatactccactgtgtatctgttttcgcccaagtaacttacgatctttgcagagaaccatgaggcttcgtaacctggttcgtcgcttctaacttccacctccattccattgttaaacaccttctctgctctctcacaagatttcagcttcttcaatggaggtttgtaacattcttccggcacatcagtcaataccttggaaggaatgacccattgtccattgatccaatctttgtggggccttaagttgaaatttaagattgtcgtttcttcaccagttgagatgataaaaactgaatacttattagaacctcctcctaggactttggaaaccctactggtccaccaccgtttgttgaaccaagcatcaactataacccctggttcatagcacacaacaggcgagagttctgaaggaggaactggtcttatgtccttggcttctaccacatctctcagagggatcgactcaccatcatctctactaaatttcaagtgttcaacaatgtacttatcatcacctaataaacaaagtatacgagcacaataccaagaacccttgtaagctttttcttcacttctgacttcgacaagagctcccttctcatattgatctcttctcttgatttttatcttcagtttaattctttgggctgtcgattccgagaaattgctctgtaaatcaaaaaagcagtgtgagtttattatgccaaattccaacaaatcttcaaattcaaattgcttgacatacagtatatatagtataattaagtcttttttctaaatttacaatttttttttttttttttttttttttttttttttggttttactaaatttacaattaattcgtcaaatctttcaatgtatcttaatccctaaaacattaaattcactatttttctacaaaccctagattcaattcaaacgcagagaaatgttttacctgttggagaagagaaggaacccacccaccatctagccattcacgatgaagcctcaaattgaactgatcaacctctatttctggacgattttcccctttaaactccacaatgtaccttgaatcttcaagtacggtcgtaacattgcctctaacccagcaaccttcgctatctctgaagacatcgacctcatcgtcagctttgaaccgtctgttgagttcacgcggtggagatggacggaggcgcgtgggagtgacgtactccttcatacgtacggaaacggaacctccaacagttagggattcatgctccacccaaacgagtttctttctcaccgaaggcgcgctaacaacactcgccggaaaatatgccgtcgcgccagaaactagtcgttccacctcaacgcggtcaccgccgcgccaaaatcgatcgctcgtcatcagtaaacaatttgtgcaacccaacgagaaaatagggataggagtaagactgaagatgatgaaatttccagagaccttgattcaacagaagaaaatcagagaagagtgagagctattatatatagagaaagagacagtggcgacacaagcatgcttatattatgagtcggtcaagataggtcaatgccgaaaaaaggaaaacaccaaaacagcacctcgtttctaatttatgtaatacaacgtcctgttgtttttctttatccttcagatcacaacgcgaggtgttttttgtgttttgttcacgtgtcaaaataagagccgttgatctgggactaccgtggatctcaagtctagtaaatcactcatggacattaaaatgggcctagcctacctcatcctaaaattttgctccagagaagtcgtgtagtttttccacctttcctttttatacaaatagctgaatgcttgccgtttccaagttccaaccagggtaaggtatcaagctgaacaaaaaccggacattgggtcggttaaacttactattaattggtccaaccaaatgtcgttggttaaagtcccgaggcgtatgtaaaaaacaaagcacctcatccgaacatcatgccgttttgcctttatttaaacattaacaacaaaacggtgaatcgtctctaatggcgccaaaggcccaaaggtttggcaaatcatacagggaaatgagtttgtacactcggatttcttctacctctttctctagtcaaagggtgaggctaaagcaggatgtagaacaagcccagcatcatcggtgtgcttgatcttaacttttcttatcctctttttcatgataagcggccatatgagaagggttcgagccacgcgactcaacgggtcttgaagaccatccatttggtagtgaccaaaccgccagtcgcggtcaacaaacggtctccattgaggcttgtcgagaccatcttttaaacaaacaaaacaaagccttggaagtaagattatataaagtaaaagttggaaaaacaaaaaaaaaatacgcaaggttggaagttgtaaaccaacctgcgtacataagattatgattatcaacgcctcggtagaatggccgtagttttcctgctttggcagctttttggagttcgttccatgcaagagaccgatctttccgagtgacttttccacttttaactatctggaaagagcaaggaaaacacaaaagccatatgagacgaacagcgatctggtgatctcaactctcaagcgtagtaaaaaccacaaggggttataataaaccttggaaaagagatggtatgattgccgaagagttcgggcaagatcatgggatcggtcaaccgcaacaagtccaaattttggaccatatccatcagcccattcccaattgtccgaaatagtccagaatatgtaaccgagcacaggaacaccctgttgtgaaagccacaaacacaagtgagagatatgccaatacgtagggttgttatggcgacccaaagccagcccagccctgcaacggatgacctttttgagtctaagcccgtcacatgctggatgagccaggtacccgccattttgccttaatgggtccaggatggcccgtggactaaaatcatggctggattttgaggtctagatgaggttttaacagaccaggctcatcacaacaatgctaccaaatttcaatagttaagctggaaataacgttttgcatgattcagagagtttcagggacaaagacctttagcattgcagcatataaggcaaggagatgctcgatcaggtaaggtcgtcgaatcacatctgtttcatcagacacgccattttctgtgacgataaaaggaactttcaggtgtttgtatctctcgtggaacatcaacaacacgcggtagagaccatcaggatatacccctcttcccgattcactgtattcatcagtctctacaagctttagtccagcaccacacactgcttcctgatttctcgagtcagattccaacatacttattcgagagaaagcaatattattaatcaaaatttgagacctaatagcaatttttacttgtagctctcttacctgtccgtagtagttgatgcctatgaaatccaacttctcacaaatgctatcgatatatggaaatatagtgagggaattactaatggtaacagccccgatatcaaagagcccatatggtcgcataaaggagacgtggtgcgcaacccctaccaaaggttttttcaaagaactgcaaaataagagttggaaactattaagatgtgctagtgagagaaattcataggatttttttttaagaaaaaggagaaaaactaacattttcccatggatgtagtcataggcctttgagtgagcaacagccatccagtgtaaggctcgatggaatacacccattggtagagtagatgtagctatctccagaaaatcagggttgttaccgggccaagatccacacatgtaggtaagcatggtgaagatatggggttcattaaatgttacccaagagtctaccaaatcatacatggaatccacaacaatcctggcatgttatagaaagatgattaagacctacagaatgtccataaatagctcatttgatgagacagtcacctggtaaagtccataaagtagtcgactgtcttctccattttccagccaccatagtcagctgcccatggtggcaatgaatgatgaaacagcgttagcatcaccttcattccatttgaacgaacttttttaagtatccatttatagtgttcgacagcctcatagttaacctacaaagcataacaatagaaatacaaagttttagcaaaaaatggcaaaacaaaagaaaatgcattgacacatatagtatatgtaaaacataacgtgtcataatattttcttgactcactgcttccttaattcctttggtgggctcaactggcatgatcctagaccaatcgactcccatcctaaagacagtaacgccagtatctttggctagcttcacttctttgtcaggatctgaccaaaatttaagcctgtcctccctgaaacaaattgaactttgagctgtcgacactaatgtttactatacatgcatcaacaatcttggtgaaactgatgttagaaatctcacgcgtgaggagcgttatgccacgcggcaacatttttagagggtggcttatcagctgcattcttatcttctttgccatgagtgttcttggccaagcctttggttatagctcccacagcaagcttaaccttcttcctcctagctttcttatcagcagcctctgcttcttctgctgaacatggtgtttctttagcaaactggagccaagcatcatctaaatcatcctccgcatgagcaggtgcagtagctaacccaaagaagaattttccttcctcgtgttctgaaacaaacatgttaaaatcaattccttcacaaataatttaaattctacattaactgaatcaaacgcagaggatattgttttagattggtctgagtccaaaataatgcagaaaagggagaaatcgtttaactaaaagagttccagaacatcaagctcaacaacttaaaccagaaggaagaacacatttcacagtaatactaatcggagtcggagaagatgagagagcttcttaccaatggaattgaaatcagcgagaacttctttagattcgtcgattggagagcgaaacttcgcgagattctggcgacggaaacgagagtaggaaactacgttggctccaacggtgacagtggccaaaagtccggcgaccttaattaacaatgcgaataattccataatcgccgatgatgaaataatcaccggatctttctagtttttaccgacactgagaaaagataaaacaaaacgggtttatgaaaaaaagagcccattaaaggcccattgaaacggcgtgataagaagtggttggtggtgatcactttgctcgcaaccttatcgtgtcccgtgtgtggatggctcagctccaaagtccgtgtacgtctctctatgtgtccctaatacgacatcgtatgttgtcggtcttttgacattataggagcttctctatttagcaagtacactaatagtaatttattgaaagttaatatccaatttgattaatgtttgatttcaagtaacttgacatgtgatatgtaatttgtggttgattgtttctttcgagatttttatttttacatttactgtagattattttgaatttgtggttgtaatatatttatgattgttgtccaaagattttgtcttattaatatactagtatagtatgtgtgtattctggtgagtggtccacttagattttcttatcttcttcctcagccacttcaaatctcatgtctttttctctcgtctcactcttttggcagtatcacacattaataattgcctttatactaagaaaaaggtagtacgacatctacattaatttccttttccttcaaatatccatttttgatttgaccaataatgtctagcgtatccaattgtcaaactgaaaaacaaatctataaacaaatcctatttacttcagattactgaatctggttttatttatatccacatcattgagatttaaaagtaatccgacaagaaggaaaaggcaaacataaacatatatattccttttttcaaattaaaaatacgttaagtttgaaactgattcatcgtcctaattagcaaggatgttttgctaaacgtcagaagcaaaatatgattaaatatggactttggttcgtgagtttattaagtttcaggaaactaagatcttggaggtgtgaaacgcgaacacttgttcttccttccgctgcttttactgaggccacagacacaagtctcgagcagctgatagtcctcttcccagaacaagagtgatgctttctcaggttgctctattagtttcttagctgccaagaaacccgctatggtccaagtctggtaaagccttgattgtttccccacaaaccttccgcttttcgtgtcataatactcaggccactcatcttcctttagccttttttctgctacagcaactgctttcttcgccagttctagctttcccatcttaatacaagccaatgtgaactacaaaaaaccatgcagtaaaagggttttagagtttctataatctgaaaacacagctactttagaactaatacatgtttgttttgtacctgccagaggagagttggccaggatccgccattgtgatatgaccaaggcctgcaatgacaaagtatgaagccaaagatctacagaattcctaaagaacgaaaaagagaatgttattttgaatggactcacgtattctttggatcagatccggtgattattcgccattcatctttctccagagccggaaaacagatcttgagaggcatgtttgcaacaagatcatcccatttctcttcaatcaatgtcatgactccttcattctgttcttggtttcccaaagacgaaataacggcccagaggtttccaagtgtgaagaatctgaaatccatgtgagcaggctggagatttcctatgaagtaaccgcctttatcaggaatccagtcgacaagccaagtagggatctgttctggatatatgttaaacttgtttgttgcatctgctgaatactcctctgtgttgtaacggtatatctcgttgattttcttaatatccacccaatagtactctctgatatggaatgataaagcacttaggcgattgttgactgcagtaactaagctcttggttccatcattcacaataagcatctctcgagcacaacggagagcggagtagaataatgcctgagaatgaaaaaatcacgaccgttaattatcagttatgaaaagtccattctttgatcaatcatggatgatcagtcactttacttggatttcaagtggatgcccatgaatccccattcttcgatcaaccatacatgatccgtcagtgacaagtagagtcgggaacatgtcaaaaccgtcggctagacaaagcttgagtatcaacttgatccctgtttgaacatcaattctctcttgcaacgtgtagtcacccgtgagctttccataagctctcagcaatatgatccaccacaaacctagccaaattaagaaagattccaatcatattattattaaactaatgtttatagtttcacaactttgaaagtagaatgtgatttagtagctggaatgtcaagggtgtatgtttatctatgataaatagaaaatgttagagcacaaagagttaccagagtcaacagggctaacacgtccaatggctgatccaccaaagtctggatctaaaaactcctcaaatgaaccatcatttccctcaagtggcgcagatttcactttaaaactcgctggcattagccccgggccagggctgtgacagtccactgttttctcccagctctaacaaccaagcaacaaaaagctcgattaataaactccggcctagatcagtatatcaaatgccttacaattgcatacacaagaattgaagtcaacggaagcaaagggaaaacacttttctaagaaccatatataacttcgagcttcattaaagctatattagttaaacaaaaatcacagattaaaactaattttatcaaataagcatcaaatttatgagatctcagaacaaactataacacttttctaagagttagaaactaacggaactggcaaggagaggcatcctcttataaatgaaacttggtggcctcttcaagagcacagtattcaacaactaaattatgacaagcaataaaacatttcaggtctaaacacaagaagacatacctggaactggaacaggggagatatatctctaactcttgcctttctcctttaggcaataaaactcagtaaacaaacttgataaattgcccgtttacacaaaatccaatataacttccctagaatgagaaatcaaattccaattgcagataatgagcgtgcatgcaaccaagaaaagcaagaccatgttgaaaatcaaagaatcaagatcattcctcttaaaacgaaaatttacataattaactgagcagttcccaaagctctaaattgttaatatagacagtctaaaaccgatggtattggacagaaggcaaaagcaatcaaataacactcaagagcatcatttcgaacaaaaaggttcaagaaaatgttacctgcaactgcaatgtatgaaggagaaagtttctaacaatctccccttctccatcaagcataaacgcatacgccgaaggaacaaaatcacgaataaacacttgatcatagttcaaagtctgcgtatcccctggatcattagccgctacagtccccacagggaacccacagtagttcaccacggcaccacgaagcagcttccacgcctccttctcaacctcagtctgactcaaacaccgttctgtttcctttcttacacccacatttccaaaattagcatcttttcctcctcctacattacccctttcccttttcggtatcccttcagttttttccacttccttaaaaacaagtggcttcacaaacatactctcaaagctcttatcatttacatgagaatccaacgaagaggtcgaatagttcctaaaatctgaagctacatggggaattactaaaacaccccttcctcttcctctactactacctctagctcttaaaactctagatcctcctcctccccagctaatggaatcggaatcacaaaaagcattccgatccagaacaatccgacggcaatgaataccagatctaatactcctggaatcaatctttgtacagtgtaacttcgacgaattgatgaatttgccagagttcgggggagaaaaaccgaaaagcgaggaacttctaaaactaataagaaatctacaacagggtttcatcgcagagacacagatacagcttctactgttcattctctcgaataataataaaaactatacaatcaccaacaatacaacttagccagcttcttgatcgacgaataaatccgatcgtagaaattgggggatgtctgataggaacaaataattagatcggagtacttacaggggaagagaagataatcaaagaatgagattttaagagagtaacaaaaatgaatgcaagatatttttgttgtctgaataaatggtttggtgaagatgatggaatgaaatctgaaggttgcttaaaaagaaaaaaagatccgtggacaaaaatgtaaattagttaacatgttgacgcgcgtgtactttatgtttttccttcttcttttttcagttattgtaaaactacgaaaataggctcagatacgtgtttcttttgtgttttgtcactaatttatcgtcgagcgagttagggtagaagtgacatttccgattttgctctctgtttttgtatggatcagatgggccggtggtagagcccacaagaattcttcattaaataaatgtggagaaatacatgatgataataaccttactggtccttgacacgattccattttacgaaattaaccctgggaagccaaatcctcgcatacgtggcatattttgattagtcaatgtttctggatgtgcacgcagacgtctttgtctgaaatttaatttgtgcaaacgcgtcgccgtgatcaatttcggtttgcaatttgtctggcggccaaggaaggaatcttgcttcgtcacataaacatacccacgcgctctaaattgagcgtgctattcaagcgcatacaaagattcacgtttcgaatcataccagcccattactacaaagatgaggcccagtttgagcgtaataagttaaccgtatgggtttatgatgtactaatttgtcaattatatagcctaaataagcccatcttgcagcataatctacgtagaccatttttaaaaaaaaatgtgagcaaaattttaacctttggtttatatactttttacttgtaaaacaaaatttccattacgtgactgacataaataatcttttttcacatcaacatataatctaaattttccttttaccgaagtttctgtagtccttggtccacaattttatcagctataaccacaacatgtaaactaatttcctttctactattggaacttgaatttagaaaaataaagtcaaatcacttttctgactccaaattatgtatatacccagtttcatacataaatagtggagttatctatattacttggtgaagaaagaaaacggataagttaaaatctgcaaactcataagaagttaagaactaaatatcttaagtgttcatattagatgcctaaccacgaggattgaagcatgtgggtttaatactaaacgtttgcttttgaataacctagaaagggactggagcatgtcattcatctaacgtgcttcagtttttcttgttgatattagcttatacgatcttatccacaaccccatattgtttatatttataagaaaaaatatttgttagtctgaatggtgggaattgaagggtctctttttataacttagtggatagataaattcacaagctcgcaactagtactactcatgcaatctggaaacatggaaagttaaacacacacaatgatctagttttacatgaaagtttgattatgtatatacatgaattcatgtacttacacattactttttgaattatcttatccattatgtaaaaacacattgattatctgtttaaaaataatgtatacgtataaagaataaagatcaaaagaatatttcctaattaggcctacacattttattttatatcgggaaaaatcatatatagtaaactttgacatcttgaaaatctgatacgattttgtccaaaaacaaaaccctgatacgatacagtaattaaggtaagatatggaatacacactagttttttgttgtttgtttgttaaaagcacactaatcttactatttcattcatatgtttaatatcactctcttaacatatataatattggtcatcaatcttaacatgggagaaaaaaattcaatattgaaacatacactaatataaacatatagacaaattaaatgcaaaacaaatgtatatatgtcctactttcttacggtaaccattattaaagctcaaaaaccctatattccttacatgtatacataagtaattatatataatgcataattgtgaaattactttgcattaaattctaacgaaaaatgtgtgaaattattatgaatctaattaaagataaccacaaaagacagagagacaaacaaacaagtggttgctaagaaggtatggcaaatttcaaggcaggtatcaatcaacttacgacgggatagacaaaacataaacctcttgtccaaaggtacggaaaccgaaaaatcaatattttcctaaattggtaataataagaaatttcaataaaaccgaatattcttgtgtcgtatcgagtacacgatttgggtattcgttaatgtgattagtattgagtttgcgtctcgatccaatgttatgggttctctattaaagcattaattcaattgaattgttgatttatcacgtgattagcatggtttctggctagagctttagagacttttgtggctaaaaatgcttatatccacaaaaaggaaaaagaacaaacaaacaatattaaagcaattgattaagactaagtttctagtataatagtttgtattagtcccgttaccatattataatgttgacaagaatatgtatttacgattattcgaaattatgttatcgttactgctttagcatacttctaattctaaattaacatctatattatggtaggatgttttataacaattggtttttaaaaatggatggaagtatttacaatattaatatagcagtctgaatttagatgataataatctcaagtctgtaacaaaaaaaatgttttataaataatgacgaaaaaatacaaatttgtctttcgatctgaaataaaataataagtaattaatttatacgggaaaaagttatcctccatttgattacgtggaataaactaatatcgctttctctatattaaagaagtatttatctcattgtggcaaaaaattaaaatagtatcctaataaaaaacaatgttaattaaaaaacgatcttagtacaaatctccgcagtatcaacaaagtagcaaactgtagttttttctccataacgacagaccaaatgatttttttttttttggtaaacgatagaccaaatatccccaccaaaaaaaaataaaaatacttcagtattagtattggtattatatatgcacgcataacgtttatatcattaatccacagtacaaactacaaacatttaaacctttacacgctatatatattttctgattcgatgacagatgttaaatttgtatcacccgtatattattgtcattcttacaaaaataactctattagaagcatcttttctataaagggaaaaaaaaagtaggactacacacacacaaaaaaaaaagtgaattctccaaattcaatgtatttcgcaggtttcagattagatatggttttgttaatgtattgtaagaaaaagggttggactcaaaagggaagccacgttgacgccgacgtgtaagtctctggatgcgttgaccttgaccattcaaatgactatcgagtcggtgtccttcattccttgtgctcctcttccccaacaatggaattttatccaccatatcgaatcgccggacgccacgtggtgcacgctaagtcccatgtatctgaatctgttttctgttttttctttgtgttgtctcttctgaataaaacgttaacacaagtttgattttgaggagttccgtttcgacgaaagagattacatttccacgtgtgaataataaaaaaaaagaattcatctcacactgtcaacattttttattgttttgtgttacatttttgcataaatattctggagtttaatgttatgtattcctagtatatataattaccataaagttcgcaagagcgaccagagagaaaaaatcagctactagttcaagaggctttcgattaatagatatataatttaatcttattcatccacatataaatggatcagagctatgagcatacatgcatagtctaatttaatattaataggcaacgaaagtagaaccactcatatattggatatttgggtaattaggttaattctcttctcacttgcaatgaaaaacttgacgtaaagaattcctttccaagcgcaaaatggtagattagttcgcatttagtaaaatctgtaagtggttctccatgaaactaaactacttacttttagatgaggtaacgatcagaataaatcttggtaaggatcaaatcaaagtttcaatattagattgattttgaataaaaagttcctaaagatattgctgaggaaagagatgttcaaatttttgggaccactctcggtcttggggtggcttttagacgtcggcttacttcctggccacacctgaccacaccccgcctatgatttttcattttctcagccgccgccttctctttaagtcttccctcacattcactatttaagcacgtgaattttgccttatccacgtgccaattccacaagatgtgctgcatatatatcttatgttatatatgtaagtttataagatattttactcgatcagaaaaaacgaggaaagcagtgttattgcttaaaggatcaagttggtaaacagaaagaaaacgacttcaactacagtttttttgacggcgttgcaattatgtatggactgcaggaaaagatgatatccaataaaaacatatattagaaaaataattttttgtttttaaagtttttaaacctctgaattgatttaggctccaaaacccaaaccatgccatgccacccacattgggggtcctcgttttatttctaaactgagtttttaataaaactgagtgagaacagaggaggatacatagaagacatggtgttgccgacgtgttgccgagtaaggacacggtttttgtctacatattggtgtaacggtccgtacaataatgcgttttcaataattaactaagggttttttggacatatttagtggtgggttatcatcacttagcatgtattttaacaaacaattaacttttcaatgaataaaccccttaatggccaccttaaactcaaagcccagatcagaaccaaccagattttgccacgtggctctggaatataacaatcaatttctaaatgtcttcttttgaacccaaagaaaggctttcacactcagtcagtactcacacaccacacactagttcattttattttccatatacatgctctatagacatagttccaaaaaagtagtatcacttggattatccattttatagtaccaaagtcattattatactatctttaaaaaaatattttacgatgtcttgttctgtttgtttgtgtcatatattgggttaaatattaaacatggtggaaccaattatgagcttcgtcgttcgaatataataaataaatgaataatgttttatattatgcttccattgaggaaatcactcaatctatagtgtgaatacaatttccattatttatgtttatagtatacatagtcccaccgacgaatgagttattttccaaacattaaatcataaattatttcatccaagtttatcaattatccacaaaatatcattgcaatcccccccaaaaaacaaaaccaatcaagtttagcgctttgttaaaacgccatgatatatgatcaagcttggtataaaaaacctgatcatatatcctatgaacaattctttgtttttaattattcccttacaacaaattcctttcacacgtatactatagtgtataatttaacttaaaacgatttctattttttttttctaacttcagaagctaccattattgttgaactgttgttgctgctgtaagaaccagaattcttcatcagtttctccaatgttccataaactgtctgaagaagaagcagcaccattaatgttttcaaaccagctgaggttactctgctcttgcatagccgttagatcttcgtctaataatccactatagtcgaaataattatccggtaataattgtgaactcactaaattctgatctggataataactattccccatttgacccgaatagtattccgggttagggtttggagcgctgtagtactccgttaagtctgacgccggagacactgccacgctggaattttcaggcgtgatataatcattgttgctcattacaccaaactgttgtcccatgttgttgttgttgtagtcgtaattcatgaattgattgttagaggttgtgatgcaagatgacgtgccggctgatcctgtggtggtggtggttgtggtggtggctgctgctgcggatgaggccgaggctgactgaatcctctcgactagtcgaggcatccacaagtacttcattgtgtctttgaattgttggctattcacatcacatttcaactgtttcgcatgcttttgcacccgcgtcctccagtagttcttgatctcgttgtccgttcttcccggtaaatattgtgcgatttttgaccatctacatcaaaataacaagatataaattaacggttctaaactaatagtagtgataatcaaattcttattttcttggcgtctataacattattattcattagtatatctcagtatcatacatttaatctcttttcatccatcaacatcgacataatttgttattttctccattttaaaatagttatgatgttattttatttccaattcacaaaaaaaatcttattatatgtttgatgcataattttatgtaaaaccagatttaattcatttaaataaactcatcaactacatattgtataatttagttggaaaaggtgttatactgttttatttattttaatttagcatacctatttccccaacgggaatgaagttcgaggatcaagagttgttcttcaagtgtaatgtttccacggcggacgtcagggcggagatagtttaaccaccttagtctacagcttttaccggtgcgttggaggcctgtttcattggtaaaagataatatgaggattaatttaccggtcggtcatgtctacgtatagtatgatgattttatacggaagaaactcattataatatttgtttcattttcgttaaagttatatcaaattccccaatgaaataaaatggaccgtattatgatgcaaattgtcctaaagggtctttttcttcagcaagctttctcccattgagttagtgctcttcccttatagatgatgatcattaattcgcattagttcttctttttttcacccatttaataaccaaatttggatattttattcaaatttgagatggttaataattgaatccattaccaaaagatctcactcaaatcatcaatactttatttattggaaggaaattatatttagaaataagaagaagacgagaaagagaaaacatgagaggtatgcactttttgattcatacctatgaagggtcttttcatatatgcatatagggaaagaaaccattttcgaataataattttttctaaaaactatctttaaaaatagtaaaggttgggcaatttaaaagaaaaaaaaaaacacaaatcacacatggtgattgaaacatgaaaaggattgaacaaaaagcaataaatcaattatgttatgcgacttgttctttggctctttatgcttaaaagatgctcatggaagtggaaaatagatatatacaactatattatctgtatatgaaaatatatatcataccggcgcaacgagaaagagagttccagcgaccttctccattagtagcaatgtaattcatgagcttaaaatcttcttcagcagtccacggacctctctttaggtccatctcgtcttccatgttgttgttcttcaagcttcttcctttttcatccattgatatacacagaagagaccacaacaagattgttcagcaaaaagattgagactttctactttttttctatgttgttttgcgaagagagatagagagagaaaatttgtttgttttttggagttatgtgtagatagagataggatgagttttgaatgcacaagaaaaagagaagttgtgggttttatagaagaaaaaagaagatagttttcaatttttctttttattttttaaaattatttggaacatgtgcgatgaagggaatagacagccgtaatataggaactgtatgtttattttttatttttattttttggcagcaggaactgtatgtttattgatttaattttttttataattttgtactcttaaattctgtttataagctcttcaaagttttagaattcgtgaaggtgaaaaaaaaactatcgaatacgagtagtccacttggctgaacaattattattctcttaggggaagtgagtctttgcattcaaatttcattatagccttccgtatccatataattacataaatttcaaaattatgaatttaattcatcaatggaatatttcacatttaaaaaaaataaaaaaaatcatagttttgagcctacttcatttttaactatacgcacatacaaacaaaaactataattttatgtgcgtgaaggttaagactatatgatatgaatgtataaaatattttcgtatatctaattacaaataaataataatgattaataatttcaaaatatttaaattaaaattagagttatgataaatatatagtcaaagtgtaaacatttttttttttttttttttggttggcaaacagtcaaagtgtaaacataaaacatcaaatttagtaataaaaaacgcgaccagcaataaatcttcggtggtattgttagtacttacttcgttttgttatttcagattttggtaaaactatttttttcccatgtggtgagagtagtaactttcaaaaaaaaaaaaaaaaaaaaaaaaaaaaaaaaatcatatacagaaatactaaaattagatgttattgtggttaatattctgtcacgttgataaaagagcactaaataaaaaacttaatttaggatcgacatgcttcaaaagagtttttagtttcctcttgttacttggtttggtgcaaaaaaaaaaaaaaaaaaacactctcgtctttagttaatactctttatatcaagaattaaagaggtcttagttaaacctaaaccaattaagaaaaatacaaaaatatttgaaaatctataaataagaattaatatagtctattgaaaattgtagggttaaaaattaaaaactgaaccagatgaagagttaatactagaagtctataagcagaaaaagatgccgtccagataaaatatcagttaaagccttaaaggactccagcaggaataatttagtaaagagttaattatcacttaccacttaattaagcactgagttttaatagttgacccgctgactttccatctccgtgcataaaataactctgtttccgttttctgatttctattgaaaactttgtgctataataatcaatatgtttatttccttttatgggtttctaatttattcaaacaagttgccaataacaaatatattccccttttttttttttttctactttccacttatttcttccagttcttatttgaccataaaagtctgaatttatttcacccaagaggcacgacacctattgttttatcgtcatcaaattttagattttgagtcgtgaatcgtatacgaatttaaatacaactccgaattatatgtttcttttcaaattagtgaaactagccacaggtaggttctaacttctaagtaattagttagatatcactttaacattcagcttaattatatgtgtcttgttaagaaaaaaatagagttccgaagcttagatatgcgactatgcgaggtgaagagttttaaaaatcagagattcttttatccagtgtatatgatagtattaatttgcttaagttgtgcaagtatcagaagacaaaagtggaaatgtctacgtatcaattatcatacgtcctgtcgatttttttttcttttcaaagtctgtaaacatcaaaaagacaacttgatattgtgtaacttagatataatagtgaactttggtataatctcactttaaatacttgaaagctctcaagccttcatgcacgattccaattggatgactactcaaaaaacttaaatttaaatagaaatttgacattatacatacataatgcattatatttatatacatagatatatgtactcgccggcactcatgatctagaatataccctagctaggaaatttgtaatgcttcaaaaaaacattctcaaaaccatctttttaattatatatatatatatatatataactatatattcgcaaaactatctattacaaaccatcaaaaaaataaaattttaaagaaatataaaatttctcctaaaatattaatgtcataaacttggtaagcttgtattcataaatgcaatcggaaacaattaatagatgcttagcatttaaaccaaaaacaaacaaaaaagatgctgaaagaactgcaagcaaaagcatatcttaaatgacatcccatggtccacaatttagataatgctaggttaattactagtatgtaaaaagcttataacaatagtaaaaatatactattgttttgctgttatcaattgcaaaaaaacaaaaaaaaaatgtaataccaaaagaatatactacaactatttgtttcttagtatgtttttacattttaatcatcttaactagtactatcgtttattgtttgctatttgtaccactaaatcagatttattacaatcatttgtttatctgatcgtgtaaattgattaacgagtctctatatgtttgaatcatgacttttcttttatttctactgtagcatgacttattccaacaaacgtataacgtaattaatacacaaattatgaaattaatcgacattattaaatatattggaccactctctaaaataaccccacgctcaaagcaactacgctaattgttgtaataaattaaatatcattcactacacctttttgtgcactaaaatgtaacttaacctactactaaacgacgccaaactaattactatatgcatcaacttgtcaactgggcaatatatatatcaactgattttgcttattacgctcaatgttgaaggtataacaatcggtttaacaaatcctgcttgtaagaaatacaaatatattttggataccgtggatgggaaggtggtgcactatagactgaaaaccacttacacgttaattttagaaattacaagtttgatattcggtatgagatttcgtggttgtttggaaaaaaaagagatgcatgtatttcgtggtttttatatcaaatatatatgttatctagatgctatgatcctttcccaaattttcatcaaattcgtggtcactcaatcgtaggtattcgtaatggttctatagtttagaaattatccttttgaaaggcaactctcgatacgaactctaatccaactaaattgaatttatctagtttggattgattcagcattaatctaatatatttttatggtcgcttagaaaatgtatttgtaaattctgattccccattactacaaaaatacaaataagaatatgtccatatatacacataattatgcttatgacttttatattgacaaggagacaactaaacattatagcaattaaaagataaattcttgatggcacggacatcacgtgttccactataaagtagatgaatcgtacatgtagaaataatttgtccaagctccacacatgtctttcttttaggaaaccacatattaaaattagtctacaaaaccaaataatgtaacctttcccctaatttaacaatcctatcggaactatatttttctttttgttgaaattactaacattatagtgcccaagtatcaaaagtttggaaaacaatatatcaatctagaacttgcaaggtcaggttatattactgagaaaatatcacctctcgcttgctatatatatgaataataataacaaaaattaatagcttgagttcttttattgttatcagaagctagatatctcaacctataaaataatgtttaattatataacacataaacataatgcaaacgataaggttaacagaaccatcattcttaagataactatatgtttagactggtcctaattatttttataagttataaaccctacgtgatttttaacaagaaaaacaaatcttgcgtgaaaacgtccaaaaatcttaagtatttttacgtgaattcattagcatagaactgtagataggtttggaaaagtacatcaaagttcaacttttgttatcggtccccaatttggggtaagtcgaaacgggaaactgtaaggaacttttagaaagtctaagtaatactatttttataaagaaaaaaccgtagccaatacattaagcaactctgacacgtagccacgtatatctgagattaaaatatttttctcccaaaacttgtaagttttgaactctaattatgattggttggtcgatatcctaatcagattactgaaatataattaaataaaagaggtaataaagtgtacttggttttcataagttatgtgattaggccaaattgtgtaacaataaacaatgtgccaaagaatatttgtgggcatcattagtaggcacagatccgaaggaaccagctagaaccacacacccacacgctcgcatacatccatatattcatgtatacaattatttgtcttatataataatattacagtttttattttaataaactttggccgcaattaacatgttatatggtcaagaaagtcgcaaacaagtccacgaaattgaatcttagtaaggaaaatgcattattttttccctatacaagaaagattttaagtatttcaacaaaaccgaaatagtgtgaacagataaaactggaaattttgaaaaagaattaaagtaatattacttatatctaaaaagtaatataatacataattacatatacatatgatggcatcaaaatttagaattctcaattcgttaccactaacattaataattaatagtaacgaatgtaaaaaatttttccataaaatgtaatttagaattccatatatatattttccatgatatattttggccatatgtaataatcgaatcagttttctcagcattcctatgtattcatgtacaacatcattacccgtgatttactatcacactttgatctaaaagtgttagatatatatgatgttttgtattattgggttctgttagatatatgtggtgttttgtattattgggttcaggttataactaaagtgttgatttgaagttttgaacgtattttaaatatcaaagacgatcgagtaaactgtttcttattttacttctatattaaatgtgaaatataccaacaaataaatcttttttttatttaaatgaaggataaacttcaaaggcatgttttaacaaaggaacaaaaaacgttacaatcaattttttaagaatatgtttaacttctcttagcagctaagatttatcattttttataacatcagcaactaatcatggtctaaacgattttacaagattgttattacaacctctagctagcaacaagacacgtacgtataacattcaaataaactaatactcggagtatatgtttccctcaaatcatgtttttatcgtccgagatatgaaagttatttcaaaaacttattttgacttatacgtgtatttactctttctttttagattattcagcttatattactttgtagtatagaggtccgattaacaaagtttctcaaatatcttaatgaagagttaaaaatgaagccacgtaatgtaattagaagagaacgaatctcgaattctttgtaataatttaataacttaatatatagcttaatgtcttagaaagtccaaaacacacggaccaacaggcaatcaaagtgttactaaatcttaataaaataggttttcgtcagtccaaaattccaaatcttgaatatatttacgtgtgttggttaatatgagggcatgtgttttcaggaccactttcgcatataattatcacataactttttatcttcttttaaagtaacataacaaagagaatgaaaatgggtttataagataaagattaatctgaaaatgattacacttgaaattaacgagtaacgacattgatgatgagattgttccagaaatgtatatatacatatttaaatatcattaagtaccttaagatcgtttttgcttttgaaccaaaaagagtttacgtccgatgtctcgacctaagttcggctaatccaaacgggttacaaaagaaaatagtattttagctgcccgttttggttatgaattcaactgtggaagttaatatattctctaaatatgtatccaggactgtgtgtatcatttactttttgttaatctgacgttgtagaagtcgaaggatacgaaatttcgaatgaattggtaagaaacgatattatggaatacatgctgtagaattttctgtaaatatagatgtttgtattggtgaatagatatgattaatagcttaagtttataaaagttatgtctgaatgggacatgcgaatttagtttgaagtctagattcaatggccctttaaacatacaaagtcctccctgaacaatgacagccccttttacttacagttccattaaataatttttttaaaaattttgttttgttttcgtatatatatttctggacactttttactttccaataaaatagaataaaactaaatttatgtgaaacttcaaagttgatatgacttaacgttccgaactcttatggtcattgttacccatataggcactgttatcccattctttggataggtttcattgtttattttttatagatgtggtctttcctttctttgagatttttgtacctgtagttgagttttattctcttaattaataaaaaaattttggcgaaaaagataaattatactcatatttgtaagctattatctctcggtcaatattttttttccattaaattatatttctatgtatagttcatcaataatattttcataattttttcactcgcataactactaatattaactttctcatatgtgacatattgtatatttttttggtcgaatatgtttaatcccacggtttttgtaagatgactcataaagagagtgtatacattgatatgcaccattgaaaaaaaattgtacgattcagaatatcacaatgtagtagagtaccataaggcgtaaaatccttcgatttgtattattactgtatattataacataggtttggtcgtcagatttgttcatacatcactgctttccagtttccatcacaagatatttgttatttgatacttgctcattaccttaatccaattctctcaagctccatttctaaattatttttatatacgttggttatgtatcttgatcagtacatcacgtgagttgctcgtgatcatgtgtaaaacaaagattcaaacttcgatgctatgaaattgaggggagttacatctcctgatctcctcgaaccagtttaattagctagtttccttcggacaataataatttgaaaaaaagaatgaaaattttccgctagtcacgcttctaatcatcggggtatgactcaattgagttaagggccgcaaaataagaagttcaataaacgaaattaatatatatatatattatatatatttggaataaacaattttatgttgaaaatatggtaggatttaggaaagtaaaattccattatcaattgatctgaagtggactaactaaacgaccattttgacaattatattacttacgttgaacaactacatacgtacttttcattttttttttacattttatcattgtcatataaaatacaccactatctacagattcacattcggatagattttctagttcgggaactcgacattcaattcatccacttctttattgaatttagtacatagttacattacatgatgtaattaagcacatatagtacacaaactacaaaagaattagacaagtcaggacaatattcacataaaaataaacccgaaaacgaaagactaaatgatgatgataatagtcagagtttggaaaccatatagaaaacggagttttagaggtctcagacctgatgatctaatcatagaagcatcaaagatgaccagttttcattcaaagatatgtaacatttttttttgacgaattgtttacagtaatattttgttaaatatgcaattcttattaatgttaattagatttgatatctgaaaaagagcttcacaatcattttaggaacgttgacttgttaatgaatgttattcgtatgtatgagggtggaaaattgtatgcgttgtagtaatctacatagtcaaacggtatactttatcaactatccgcaattaactttaaaactgtttgacttataatttaatagtattgttataggcacgaaggtagaaaatccaaattgatctccatagttagtcgacatattctataattttcctgaacagtaaaccattcatatacagatgttggatcacataaaaagaccttgctcctaataaaatgggatggctaatagtaaagagttggtatgcattacgtaaaccatgtttttctagatagaagcttctaatcctaattaattttagtttatttcatacaatttattttatgaatatattgacccacgtttagttaaaatttaaagagaagatggaatgttaatgcatgtagatgtgaaagcaattatgtgaagttatattttatgaaagaaaaccaagctaatagggaacataaagtaatatttaagattttaagaaccttcaaaatcatattataagcaatttggtttcctccaaagtggagaacacaagtgcttcgttgattattagtattactttctttctcatcttttctctatgtgcttcgcaaaagaaacatgctgtttgtttaaagacaaacatttctgtcgttaaacccattttgttgtcattttaaattgctttagttcttttcgctttcttgttacataattttgtcccattcatagagcctgtatatgcaagatggctttttaaacaatgatgatgatcaatacaatatgtgatttgttatctgtagaggaatatactatataataagccatcaagtagtaaataacaattagcgtattgtccattcatgcttgaccacttacggtacatacacatctaattcggtataaaaatttgtataattagtttgaatttagaatcagaaacttcaagctcagaattaaacggaattagtaaatatcaaatcatttttccttattaagtacccatatatatatagttgaactttcataccgagactaatattatctctgtttactatacatatagacgctcatgtgggagataactgaggatcgacaatacccatccggtttgaacctatttaggcatgttgtttatccatatcagatctaaaagattgtttgatagattttgacttgtaactcgatttgattaacattgtccattttatgagtaaagtattattaatttgacgtgtccaccggtcaagaagtcaaagagctatacgagttaaccacaatccactcgtgcgttttgtagtctcttctcattctttattgacaagtcaacaacggaagctttggtccaaattaagcccataaaaataaacatactttaacattaattaattgttcataagtcagtggctagtctaactaaatctctttaactctatttcacgatgattataataagttatggacatgatggttgaatagaagttttctacaagtttctaggtcatagttacttggtagttaattttctattgtttgatgtgaagtcaaatactccatttctttgattaatataaatattaatgtacgttttccatcaagtagttatagagccatcaaggtatttgtcaaacaagagtatttaacgcagaaatgtaaaactgcagtgagaacccacttttattctgaaaatacatatcataaaataattgtgagatgagatggtaaacattttgtagtcgaagtcgaaaccaaatttacagaaatgactaagttggtcctaagcactgcccatatttaataccgtaaggacaacgaaattgtgtttgtatatatatgtgttcattaatcgtaactaaatataactaagcaccaaattatatagtgtagtttaatttagtggttttttatttaaggaccgaatttatgtagaacattgttcgttaatgtggaactcagatgatgtattagataccaaacttaatttgaatatcggccaacaaaacctcgtaccgaggaggaaaaacaacagaaaatagagtgaacaagtcgaagataaactcatgatgcagaaggagaagtaacaaaatatgaataaaataaattaaggtcaatgacatattagatgtcgtcgcttcagaaaaagcaagccattgagattcggggaagtcggtaagatattgaagtcaaacacaatctctttatgttgttccaaaatatacaaaacatatgtcgaaacttcaaattgcgactcctctacaatctacatcgaggcatgcttataagtttggcccaagactttgttgcctacaaaactgcggattacatgggatgaactaattatattttcatatattaatataacgaaaaatgttacaacataatttttacaaattaaaaaataaaattacaaatcataatttatttttccttctaaatttctgcaaataaaattagttttttttttattactagtcattaacaattcggagaagaataaacattcctctaactcttaacaattttaactttagctaggtacacaaaatattagactatacaatttacgattttggttttgtgcatttttttttaaaataataaaagcttatgttatggcttattgggctttagggccaaatatcaaaagaacgggtcgatagccttttggacatttatctatgtatatggatcgaactatatactgtttttatatgttggatttagaacttcagccatgtggaaattgtggataaggaagagatcttgtttaaagttttagatattttgatgcacatctttttctcaatcatatcgtttgaatttagaattctaagcaaattaatgagattgtggaaaaaaaagaagcaaactagtgagatgtttatttgaacagtttaacattattttgatttttacatattattattttttcttacataaaataaaataaatatacggttattctttaacacaacaaaaagaaactttttaccaaatcaggtaaatactaaaaaaatattcatccagaaagagtaaaaatcctaatccaagaaaattagcggccaaaacaaaaaaaacaacgatattagcagcacatgttgattgccataagccaaagccaatcctcttcttctctgtttctggatgtccaccaatcatcttcgcacttctttcgtccagtcgatgataataacggtggagaacgacggaggcgggcgacgttagggtttctaatcatttctctctcttagacgcttatggcagtgaagaaagcctgcgaaatgttcccgaagagtttgatcgaagatgttcacaaatggggttgcatgaagcaaaccggtgttagccttagatacatgatggagtttggttccaaacctactgagaggaatcttttgatttctgctcagtttttgcataaggagcttccgattcgcgtcgccaggagagcgatcgaactccagacgcttccttatggtctctctgataaacctgccgttttgaaggtactctttctgggagtttcgaattttgttgtttctagaattcgaatttgtgattttgcggaactttgaattgatatttgtgttggttgattgtctaagtgttgttggttcttattagatttttttggatattgtagatttaatgtaaagttggtgtgagattattatttcaagcttcttttaattcaaaggcttttaaagctaatgctacagtgaaattgaatgcttagaagattgtttggaacgaaaacagattttggcatttttgtggatgatgtgttatgttgaaacgttgtctcattttcatgttgtattgtaggtgcgggattggtatttggaatctttcagggacatgagagcatttcctgagattaaggattcgggtgacgagaaagatttcactcagatgattaaggctgtcaaagtaaggcataacaatgtggttcccatgatggctttgggtgttaatcagctcaagaaaggaatgaattctggaaatcttgatgagattcatcagtttcttgatcgtttctacttgtcgcgaatcgggatccggatgcttattggtaagacttgtttctatttttttttcaatctcttttccctgactgaaaagtttttgtttgctgatgttgttgtgttaatacttgttgtggttactatggaattc

SEQ ID NO: 1275 - DNA, 51646 bp, Arabidopsis thaliana
aagcttcctgaactgagtagtggactcaagctgcaaggcagggtcatcggaccaaaccccagcgaccatatccttcagactatccaactacaaatgtttttttaaagccaatcaatcacaagacaactaccgtaaccagaacccaaaaacgaaaccctaaaacctcagtaagccgacatgaaaatcacaaacaaaaacctagaaaaccgacaacaaggagtacaatcgaatcatctaaaaaccagaattgtaccttcttatcgacggaggcggcggaagctgaagggaaaccctgaagagcttgcataccttcacgtctcttcttcatcaaactctcctcacgcttgcttttacggatctcaaccatgttgtcttctctcctccgtcgtccttcctccgcatccactgcaactttgtatcggttccggcgaacctccgtcttagcgttgggtctcagtgacatggctcttgctcgacaaagaaaatccgatgaaaagatataaacccgatcaatgaatgcacacaagcacacgcaaagactggtctgtgtattatatagatcctgccgagagcaaataaattataattataaaaaaaacctaaaaattgatttgggagtggaaaagtgataaagaaagagttaagaagcagaggcagcgagggacaagttgacaacagcgcatccaaagaatgaaagcacttttttatttatttttaatctttgttcttaatttatactgtaattgctaaaatattcacttatttacagttttgccactatttatttatgcaaacaggtgtccacaattaggttatttacataattagccccttactattgtgttctttgaggcaagctaatgtattcttctttatatctcaacaatttgaagatccttttgttttcatgacttacaagtggactgcgattatcttaatattaacgtatatagaccttggttactatataactttttgagttttgaatctacgtttgtgtttatacattttttcctttccaatgaaaagtcgttgtttgtcatatatggattagttatttctctctagcgagatatcctcagtcagattgtccactctttaaccgactacataccgatcatcgaagaccaacctatgaaagtaactgacgagatcataagtttgcttggccatgaaccagaccgcaatcaaggctaacaacgccggccagataaacggctcaatagctgggttggcgctacgggaaaatccaagcagaggtaacaaagacttcaagagcaagtaagggatgcagagtgtggctagaagtgtggttatgatcgaaccaatcacatcttgaagcagccacattgaaggaagcttattgattcccacgtttctgattctcttgaactttccccgccatgccttagtcgcgaaacagttgacaggaaacgagatttttgctcaggaggcaggacagtttctttgttatgaagtgatatcccaaggaaaaccacctgactatggctggaaacgagatttgacgcagagtgaggaaaattcctaagtaggcaaagggaattgacagcgtcatcatgtatccaagaatgacaggtgagttttcgaataaaccgccacctcctacaattgctattgcaatccagcgaaaagaaaacggcagaagaataaagaagaaagacacacatatgctgatggtaagagcctgtagataagataacaaacagaacctgttattcaaaacatgctccatatggtaattaagttacatagggtggacgaaggaagagaactagaagggacattagacttacatcaaaagatttgttatccagaaagaaaagcagccgtccaatggctccaagttcgtgaacagcaacaccaactagcctaggaggttccccgaagaagctttgcaatagagaataataccactcacaaacgatcttgttatatttccataaaacaagcacaaacccatctcctaagacattcttaatcaagatgtcagcctgaaacccagcaggatgtctcgcgataatgggctcgtgtatgggtatcctcatgaaaaacacaagatgaccgttgtataacaggccatttaagaaacatgcggacttggtagacattccataatctctcttgaacccaacaacaacttcttggcccaaaggatgtaaagaaaggcagtatgtgttcaagataaacgccatagcccaaggaacaaccattctcacgtaaggtgatgctctcattaacacaaacacgtattagaaactcgtgaactggaagtctctctggagcgtcctacaatgaaaacagagagcatttcatcaaacatttggtgtgcgagattcttcttaaacccatattacaagaaacagagaagaaatcgaaaatcccaacaccatgacacaaatataatccccaaaaacatcactcataacaaaatactagtaaataactttgatattctttctaaaatcgcagaaattgaagtttaatcgaaaacgaaattgtcacataacgctatagaacaagaacctcattctttagagaaaaagaggtttgtataataacctcgcactgcttgtatccgcggagattgagccagatatgaagacagtcttgatgaacattgatggagcctcgacacgcgcaccggataccataaggggtttcctggttcctccggtgatcggcaaatcctgcacaagtcttcttcttctttatcatcatcgtgtttgtctgtgtcttctaccagagtagcttgatcgtccatttttctgatgaaacagaaaggtttcttctctatctctcgtcttcttcacttccttgagtcaaagaaattccaaattttgaaaaaaatggtttgctgctttatttataccccaatttgtaaaaggccacgactctgggttcattcaatgggcttatatgatttagcaacgagatagattaattagaggcccatatatgatttattagggcacgttggtcatttaaagtccactataaattcaatcagaaattagggttttgtgttgcagacgccgtatttgtatcgcggaaagtaaacctagccgagcagatctacctctctctctcagtactcaggttagcttttcttatatctacggccgatctctggcttcatttccccctgttgtttcgttcgttattcaattgaatagtttgtattgtggtcttgtgtctcagagatggccaagtcgaagaatcacacggcgcataaccagtcggcgaaagcccacaagaacggaatcaagaagccaaggagacaccgtcacaccccaaccagaggagtaagtctcttattacagttctaacctaactgatttcagattcgggttatagtgttggaggtttgattattgcgtttatgtgaaatgatgtttcagatggaccctaagttcctgaggaaccagaggtacgcaaggaagcacaacgtcaaggccggcgagaatgctagcgctgaagaataagtgttttgattatctgtgagacattttgaagtttttttttaatgaatttaagactttcttagacaaaggaaccaatttactttgcgcttttgatcatgtttacgcaattgtggtttgtgtactctcttatcctggccttaatttaatatcagcagttttctatgcatcttctcttatctgcaagttacttgattcgttaccgattcttttattgtttagcatatatgtttgtgtgtacctgaaatctgatagccgaatttgatctacaaattagatgttaagcatataatccgtacttgatctacaatcatctttgattgttaaacatatatgttttgtgtttttattgtttcttttaaattacatgtagcttcgctatttgttggttcatgattgccctagttgctgcatcttcaggatgattctctataatcctgttttgtataaaattgtctattggtattgaccatttacaatactgtcgttcctgtttggttttgtgtatgcctagtgtttacgattagtaatcgtttgaggtttcattttggataaaatagggcatcttctttgcatcccactggtcttcatgcatcaattttgtttagcaacatcaataataatctcggaatagttttaaaacaaagttaaccctaccaatgtttaagtttaaaactttaaacaaatgaagttgtgatgactaaagaacccatttactctccccgaatgttacacagagatcctgataggtcagaagaactgttaaatatcgtttcggcaagcctgacgttgtttaatctcatgtctcgatcagaaggaaaacgttctaaattttatttctagaaaaatttcactctagttaacgaaagcagttgttgaatagtgcttctaactcaattgttgacgttctcagtccacgtcctgtattaccgactcaactcacatcatcaaccctcagatgcagccaattccaggtcatatgcctcctcattaactattttccttcttatcatttatttagatgaattttcaactcttaaacattttcttgtattttgtccctaacagacaaatgtgttctgcttaagagagcgagatcttctagagcgatttacttctgaagttgcacagcttcaagggagaggagaaagtcgagaattctctttcctcctggtaaagcatttttttcacctaaaatttgcttccttttctgttctccgacctttaggattcagtaatagttttcttctcctttccatccgtacttgcagagtcatcaacttgctgaagacttaggtaaagctttcacagagaaagcaatgcttcaaaccattttggatgctgaggcaaaactacctactggctcagtaaaggtaggtcaaaaggattattacctgtgacgttttgaacctattcagttgaatcatggttgttttgctagctctagggatcacggatggtacttcaggcttccatgtcatatgattagccattaacgtgcagagtaattgattttaaactatagttttttgctcgatagattgtaaaaagctgtgagacaagtgggatgttttgcttctctgagcacaataatagttcatcagctttagtcactagcaaaggagactacgcactagcagaggaaataatctaaactaactagtaacgacctccatgtatttgatgacaggatgtgttgggtcttgtaagatcaatgtacgcattgatcagcctggaagaagatccatcgttgctgcgatatggttacctatctcaggataatgttggagatgtgaggagagaagtttcaaagctctgtggagagcttagaccacacgcgcttgcactcgtcacttcattcggcattccagactccttcttgagtccaattgcattcaactgggtcgaagccaatacttggtcttcagtttagttacctgctagtaacaatctcttccataattcccatatatctcttataaaagttatgtttccacaaatctacagaaactgttgtatgctcgtcataataaaagggtatatatgatatgtatccagggtttattctttacttaaaactggtccaaacaaaaatgtttggtaataatttcaaattcttataataattgttattatgattcttgattggtttgagttgtggataaaattttttgagtacttaattcattcaattttcactagacatgtttatatttttaatttatattgaagtttgccagattaattaaggaaacacaaacgactaaaaaaaaaaaaaaaaaacacaaacgactacgttaggtgtgaaaacaaaattgaatttgtacgtctctaacgaccaaatgactatcaaatgacaggcaaacagttttcttaacggaaaaaatacagtaaaaataagaaaaaaccgtttgatcatgtttataaaaaattgaagtgggctaattttgtcaaattgatttagctaatgaaacgggcctaagtgggtctattttaagcaagtatacaaaagcttcattaccggaagcccatattctcgccaatcacatataagaggccactatcgtaagcccatatattatctaagaggccactgtggtctgtggggtgatttaaattccatctagggttttgactattgtgtatgtcacctatctttcctctcgcgtctctcccctttactcaggttagctgcttatatccggctgatcgctggatataatttgacttttaactcttctcgtttgtttcgttggtgattgagtttgaaaagttgtgttgtgccgttgttacagaaatggcgaaatcgaagaatcacacggcgcacaatcagtctgccaaggcgcataagaacggaatcaagaagccaaggagacaccgtcacacaccaaccagaggagtaagagtctctgttacattttaaacctataaacgattacagattctgatgttacattttaaagctataaacaattttcagattcggatgttaccttccaagtttgatatttaatctatttttgtgaaatgttgcagatggatcctaaattcctaagaaaccagaggtatgcaaggaagcacaacgtcaagagtggcgagaatgctggtgtcgaagagtagatcttttgatcgtctgattgacagtttaagttttttttatgaatttcacttgtttagacaaaggaaccaatgttctacaatcagggattatgtctatccagattctcttatatattttgcatgttacttgatttgatgcaattctttcacttgttcgtttatgttcatgtagacctataatctgaaagctgaacctgatttacatatataggtttgtctggcctttacttgaatcaatctggttttattcaccgatgcctgttacttttctagctttcacatttcatgaaaactccaaatggttctattatcatttgaaaataaccagatttgagtgtatatctattgccaatacgtcaaagacaaaatcttattttgcattattgattggaaatttgggtagacgccaacaatggtcttaaattggtttaatatacttgcaacacaatttgtcaaattgtaaaattatatgattttttttcgttctggtgatatgaaagtaaagtgaaaataatttgataaagtggtgatgacgaaagaacccttgtttaagcacacgaaggttacaaagctcgtgtcgtggtttcgattcctttgtctcgccttttagttgcacttcggatagatctaccaactacctaatgccacgtggttatttctttgaccacataagcctatacacttcagagcatcactaatctcacggcaacaatgatcaaattcccacctggcgcattttcattggatttaactttcttttacacagacaaaacatttctgcttgtcatttcttctacgtcacaggctgtcgtttttaaagagagcgaaccgactcgcggcaaaggagcgcgtgggtgtcgctcgatggccttttagtgaatacaaagggcaagtaagggtattaatggaatttagttcataacgtatgaagaattatattatttttctgctgctttaattttttttttctttttttttttctcctctctcttctctcttctttcgcgtttcgaaggttggggaaagctttcgcagaagaaaataaaagctagagagagaatgtcaatgtttttttgatgctccgtctggcaattagggtttcttttttctttgatttcgtccccttcgagaactgaatctcccgcctatatcgacgccgtctaattcctatcatttctcgttgctccaaaaccctaactttactaccgtcggtcattattttcactttctcggctcgatttggtgttggaggttggtaatcagttatgggcgctccggaaaagtctcaatctaataccaattcgatgcaggtgtctctctagctctagctttgttttcctttattggctcacttgattcgagctgggtttgtcttgattagtataatttattgtagagcttctgtattcatattaaatcactcctgcttctgagctgtgttatttattgatgaaattcatggtgaccacaattcaataggtatctcagttttaagagcacacagaagatgagatttgtaatttgactagtttctatggttcacttgttgtgtattagtttcagtggggtttagcgtagggcgtagcgtagttctctagtttctgtgggtgtttgtcctcttttgaacagtgtaccatagccgataatttagagtagctattcgaccatgtggtagaccttacttcttcagataaaacggatctcaattattgagacactagaaagttgcgttgttttgacgaattgtgttgaattgagatggaagggtttcttttctttcttccaatacgctgttggatcatccttcttactcttgtattcattcttcagagagtgaaagtctatcatttgaatgaagatggtaaatgggatgatcgaggaactgggcacgtaagcatcgactttgtggaggtctgttgtgattctaattgacttcctgaattccatctgctgcgggtattctgcagcacttattatgtaaaacatatttccagaatttgtagctaaatggaaatactatatgatgcagcgatctgaagaactcagtctatgtgtaattgatgaagaagataacgagacgttacttgttcatcccatcaaccctgaggatatttacaggaaacaagaaggtagtttttttgcgtcgtggtttaattagctaagatattttggggttttctggttttttggataattggtatctgtttcaatgtacagacacaataatctcatggagagacccagagcgctcaacagaattggctttaagctttcaagagactgcagggtgctcttatgtatggtgagtgatgacaatttttctattaccctcttcatttcatccgtcattttttatattacaatattcttgacttcaaaatggtgtttgtataattcagggatcaaatctgcactatgcaacgaaatttgcatttcagctctctaaacagtaagaattttcttctcgaggatttatatcagttgagaacatctttgttgatcgttatttacctctttattaaatttatgcttattccatatattctgtagtgtcacgtaaatgaattctggagtgcgtttcagtttattttgtagtagtagtgcaagggatttagctaggtttgctgtttcgtgggcatttggatataagaatatttcaatgtaaagatttgttagcgtttgcatggtgatttaaactttcttactaaccgtgttgttttttaatatctaatataaatacttaatctttcatactgtatcctaattagattcaaagttggcatttcaattttactgtaaacgtaacttgagggttttactgattagataatcatctgtgattgaacaggcgaaacatttcacagcttgaacagtgagttgagggagcttcctgctgtagagcttactactcttcccctaatactgaaggttttataattctacactgaccctatacttttgtgatgttttatttctttaaaacagtattctttacctatcccatgtctggggaaaagtgcaaaatatttatgaaggcatcattttattgttttcgcctctcgaatgttttgtggtgccttttttccattattattggcctttttactgtctggaggattaatattatttgacaaatctacttctatccatttgtgactcccagaattagaatggtctttctcactgttatatttatcctctcagtgtgtatcagtctgtggaagtttcttgtttactaataatgtctatttatgctctgaatttgatcctgggatttgttttcccaaagatttaattatattagtccatcttccttgcagattgttacagagagtggcattacagatcagatgcgcctaactgaacttattttgaaggatgtgagtaattgactgttcttgtcctttcctgttcagtttaatgtaaaaataactctatctttgcgctcgctggaaaatcttataccattctcagggtcttctttgatgctgtcagtagagttaggtttttcatgtttacaaacaagttctagcaaaaccattattattgaaaaattgagccctattttctttgtatttttatctttaaggtcctttaaggtacttaagggtttgtgatttcagtgtaagctcgttactttatatactgttattattatagtttatcatgtctttagaattatattctggaaacctccttactctaccttttcccttgctgcagcatgatttcttccggaatctgatgggtgtttttaaaatatgcgaggacttggaaaatgttgatggccttcacatgatattcaacattgtcaagggaatcagttagtattcacaaacattataattattcatgtcttagatccacatatatcagaattatcttttgatgtccattatttcttttatctttttgtacgcagttttgcttaacagttctcagatcttggagaaaatatttggagatgaattgattatggagattatcggatgccttgaatgtaagtttgatgtcattgatcaaagttaatgatagaaatattgtaaaaataatgacaggcattaccttcagaatgtagcggttagatatatgttgcataggccttctagacactaattagattctgttgggacttatattgggaatttcttgcccataaaatgctgaggattttaattgtggtttcatatcttaagtcgttcatggacaccaaaaacttaggtttctttaattactggtggatagttccttgctggatcatatagccatgttcttaagggtttgcttttgcgactgcatatattatatccagtttgtttgtttctcttatcttggccgttgcctatatttagctatatatgacgctgcatgttgtttcacttcacagatgatcctggtgttcctcactctcagcatcaccggaattttctgaaggagcatgttgtttttaaggaggtaacacaatcttgcctatgctattgattttacgtgattcagacccagttaacaaagactgtacttaggaaatctttgagacttattcttgtgactagaactgaataagctcattagaaatattagagacaaagtcatgttttttttgtaagaaaagagcatgctcactatggatgctttgggattagcgttctttggcttttagaaatgagattaatataggatgattgggttttctttttttttcgattctttagtatatcccttttgtttttgtaggctataccaatcaaagatcccttagtcctgtcaaagatacaccagacgtacagaattggttacttgaaggttggatcccataatttttctaaaaaacttgacgccttgtttcttgtggttttaggtctctcaccttctgtcaccttttacaggatgttgttttggctagagtactagatgatgctattgttgcaaacttgaattctgtaatccatgcgaacaatgccatagtaagttttccatataaatcctatcacatacataacatcgaaagcctgcattccatattctttctttaactgaagtgtcttctccaggtagtttcattgctgaaggacgatagcacttttattcaagagttatttgcaaggttgaggtcgccttctacttctatggaatccaagaaaaatttggtatttcccggctcaagaggcatttgttatttattttaagcctcaatggttttgtattcgtgaatgacatttataaaaattattttgagagtaagagatttctttgggataaactttctctagccccaatgttgagatgatctacatgtgacaacagatggaaacaataggtctccttagtatgatatggctgttcaattgagctagtcaggctgatgtgttttcattctctttaaataggtatatttcttgcacgaattttgtagtttaagcaagagcctccaggtggtgcagcagctgcgactttttaggtatgtatttacaagaacctaattacgactggtgtttatcagttactgacttcagaacatttgtagtagctattatagtatcgtgtctgctctttctttgtcaagtgcttctttaagaatagtctttgatggtctttttctctattggctgtcttttcaatgatttttcagggaccttattaatgaaggcatttttcatgtcatagaagaagtcttgcagattccagacaaaaaactcgtattgactgggtatactattttactgactaattattagacataaaagctcattgtggtcactctgcttctgtttttttcataccattaagaaatctcagtggtaatttgctagctgaatactcacgataactattgttgtggatgcaggacagatatcctgattcttttcttgactcaagaccccaaccttttacgttcttatgttgttcggacagaaggaaaccccctcctcggtctcctggtaattttctgtgatctttggtagcctttggattgttcttcagttgcaaggctattcctgttttctttatttaggactgaaataataattggctcccttgtttgggtaataggtcaagggaatgatggaagactttggtgataagatgcactgccaatttctagaaattatccgtaccttactagatgcaaatgcattgtctggtggagctcaggtgcatccttgtttcctttcaataccttattttttgataatttgaacggggtggtattcttcccctgatttgtgtaccgtttttgaatctgtgcatagttaagcttgacaaaaataagttccaagtctttctcttactttccacatggtcttgttattcttgcatgttcctgaataagtagaagagactatattcaagagtattattttaaaatgttggcgttactaatactttgtattcagtgtacatcatgatatctgctagaatgtttaaaaggccctggaattttgtgttcccttacccatttgtctcctcgaatctggtagatagacattcttatatctattgtgtacttgatgcattccgttttagcagagagcaaatatcatggatattttctacgagaagcatctacctgagttagtggatgttattactgcctcatgtcctgagaagtcgagcaacgcatctgaaggtgctgccagaaggattttcacaaagcctgaagtcctgttgaacatatgtgaattgttgtgcttttgcattatgcaagatgcatccaggacaaagtaattatgatcctcagtttggtaattttctgattcattctcatgctggcatttattttattgtgcaatttcttcttgtctgcagatgcagttttctccaaaacaatgtgactgaaaaggttttgcatctcacacggagaaaggaaaaatacctagtggtcgctgctatacgatttgtccgtactctcctctctgtccatgtgagtagattgtttgaacctgagacgatatattttagtcatctgaaatagttcctgagtgctccctgtagctaaaaaattgaggcatattggtgtagctaatcatgatttttgctaaaatagttagataaacttatcgtacttgcccaaatttttgctagtggtaggtatcatatcgtaggctttctgtgacggattaaactgcttgtgacaaccattttttctgcactggcgctatcatgactgttaaatagctcatcaggatgtttctaggacagctatgtgattgctgaaatatatttctgtttcaggatgattatgtccagaattacgtggttaaaaacaacttgttgaaaccgatcatagatgtcttcattgccaatggaacccggtacaatctgctgaactctgcagtcttggatctgcttgagcacatacgcaaggtttttgttttccacctttttcccctttgatttattaagttgggggtgttaattgtatttacttatcgtttattctttttgtgtagggaaatgcaactctgttgctcaaatacatagttgatacgttctgggaccagttggccccatttcagtgcttgacctccatccaggctttcaaggttaagtatgaacaggtactgtttctgggtcttgaattatacttaggaaaattctgtctgtatctttttgtaacaatgtgtccacagtgtttagaaagtgccggaccaaaaagcacttctgatgcggttgatccaagaagaagagttgacgagcgggcattggagaaagaggaagaagattatttcaatgaagacaggtttaccactgggtgttaaaacaatgatttttattgtattttctttactcttcaccttttctcacttttttaaatactgacagcgatgaagaagattcagcctctgcttctaatacacaaaaggaaaaacctgcttctaatatacagaaagaacaacctaagcctcatctctccaatggagtggctgcaagccctacttcttcaaggtatagtagtttgtgaaatgtatataatgcaacatctatgttttaatggatttattgcttctatagtccgaggtctggaggcttggttgattatgaggacgatgaagatgatgaagactataaacctcctccgcggaaacagccagaagcctctgaggatgaggaaggcgagctcctgaggctgaaacgaaaatccgctcttgtagaaagagaacaagagccgtccaagaaaccacggctggggaaaagttcgaaaagggaaaatgtatttgctgtgctatgttcgacactgagccatgcagtgcttacgggtaagaaaagtccaggccccgctggatcagcagcccggtcaatagtagcgaaaggagctgaggattcaaaaagtagtgaagagaataatagcagcagttcagatgatgagaatcataaggatgatggagtatcgagttctgaacatgaaacatcagacaatggaaagctaaatggggaagaatctctggtagtagctccaaaatcatcacctgaaatggctgtaaatggatcctgagattttaacactctggactctttagttgtggctggggatggaaggcactctcatgggtgcaaataaaaccttcagagtgcagactgagacatgataaaccgcaaaagaaaagctttgggcaaccaaacggaggaagaaatgtatagtgagcgccatttgagaggaggtaacgggttcttcgtccgtagtgtttgcagccgtttttttttataatattcatctttgaaaaaacttagcagtctctggtctggtcaattgcatattgtaagacatggtctatcagcaactaactcttcttaattcaagttcctaatggtttccttattttaaatctttctttttctggaaatgcatctctcttcgctgtgtgttaggtggtacagcagccaaagtgtgttatatttttcttttaaaacagttagctgttacacatgagatataaggttttgatatttttgtattcagttttggatttggttttctatcaggaaaaggttcttttggttacaagttcttaattaaataatctaacacaactagtcaactaccatacttgagtcacccacttccaacattcttaacaggcgtgatctaactcatctatgtcctaatactcaaccagctaaagaaaaaaaaacacagcttgtcgtcttctttgactttaatacatgcgtaacgcatggtgcgttccatatttttttgtcattttattttgacatgcttgggagtgtctcttcttcgccatttcctttccccaaaagccatattcatttccgctattttacaacgtctgacgtcaaaaaagacctaaacaattgttgctctattaaaataatttaaactgtttatgtatttgattcttcgaatactgccaacaaaagtggctgtagtttagtggtaagaattccacgttgtggccgtggagacctgggctcgaatcccagcagccacaaatattcatctttttgttttatttatatattgttgaaaagaatctgattgtctagcaacaaaactcgtattgactttgattttgatcgtcctgttggatatggatatcaagtaaactgaaatgtaaaggtcaattggacaagagttaagcaacaattatgtgttaaataagttgagcaattagcaatgaatcagtgcttgttccatcttctcttgaatggcgttgtaacatccgagactacataatggcagcttcgactttgaatccctgtacttgtacgctttctcgcaatttggtcccacacatttctctcgcggaggaggataactgaagcacacagatccatcaaaacacacacttcaaatctcacaattccacatatataaatatgattctataaatatatcctcagatgttagcatacctgtacgtgactggcttgaagatatctggaagaccaatgtcttcagaaaatgtcatagttgttccacttggaccaataaccaatctgatagtgtttgatgcgagtgtgcttgatcttgcagctctctcctgagaagaggaaagatgaaatcagaacaaacagagaggaggagttaataaaatttcatctgtaatcaaaggtacctgagctcgttcttcctgttgtttttttatcttctcctctcttttctttctaccagaatcttgtccgagtattttcctgatagcttcagcctggtgaacaagacaaagaagaagctcttagatcgtcattcggcttgtattggcattatatattaaccagaaaaaatgtatcaactttacctcggcttcttgggcagccttctcacactgcattcgccgtctctgtgcagcttcggccttcttggattgttgctctacctcagaaagcttctgttttggtcctggaattgttcaaggtttagagattaagtatttgcagtcatcagtttgatttgagaaagggaaaaaggtgcaactcacttttagatgaggggcaaggtaagccatcagggaactcaagagaactcgacctgatgacagaatgtggatcctttccagattggagagcccgagtacgtgtagtaggaatttgtccgcttgtttctcctgccgggagcggatcaaccattcccatcaccggctttttccttccggacacagcaagtttgtctgatgagagatgttttccgtcttccatgtcatgaccactgctgtgtatccttctgcctccttcactctctttaccttcatgagagaccccgacccttttagactttaactttacgaggtatctgatttcctcatctccatcatcactgtctggctctggatccaatacacgtttcttaagacctcgtttgctcttctcggacatggacgcaccattctcagtcttagacggatatcctctagattgatgtatatctcctagaaacagtgttttctgaacatgaccattgccttttaccttactttgaaatggtttttgtccattatcctgcattactctcgtatatcagcaaagaaagaaagctaacaataagtataatgaaggacaaactcaaagcttttaacagataagacctttaccaaagctttggtataagtacccgcctcagagttggtttgcaacgtacgggtaacaccagcaccaagcttaagcttcactttcagtttgttctcactcacagacccacataaactattggtattcctaaaacttgggttagcttcattgctaagagcagtgtttgtctgcgttgagggtggcagaaacttgaaactatgcaagctccctttaatatcgcggggtcgacgaggcagagcgcttctccttctcctacccgtaaagccagctaaagtagaagcagaacctccagagtcctccattatcaggacaagcgtagatgcagcaaaatacctgaccacagtaaacaaggtcaatatacacaagtaactgaactataacaactgcatgaaaaatgtttactcaaagcaatttatgaacataactaagcctcagaatctgttttccccagagagaaagatagtttaaaattgaactacatgcactttctcaaattgaattagtcatagcattctcaaaattgaattagacatagcattctcaaaattgacacaaaactaatgaaaccagagaagccaaaaccatcaagcatctactcaagtagaatgatatctaaacctaaagaacgaataagcatacactaaacccacctctaacaacaccttcgcaattagtgcttctcagtgaattcgttaagaaatcccctaaattcaaacgagaatctcacagtaacaccagtgtttcgagggaaagaagaaacaagcggcgggagagagaaagagaagtgcgaagaagaaggagagaaaaaccctagaattagataatggagttgagaagaagaagaagaagaagaagaagaagaagaagaagaagaagaagaagaagaagtctctcgagagaggattggctttaagtgaagggtaaatgtggaagagatgtcccaaaatctttatctcctccatttttctgattttctctcttcccttttttttttcttttttgccttttttttttcgggtcttcacttccatgccgtcccgtttaaatatctccggcgaaacgctcatcgtttctttgtcggggttgttgactaagacgagcgacgattcagcgtttgggttgggcccttaaaatattaaggcccaattatttcaaggctcgtaaaacatgagctaaaccaaaccaaatatgtgatttctaccgatttctattagacttcggttcaggtaaattattcagtttctactttctagtcggttcagacctatataattgactttgattaaaaataaaatatttaaggaaaattaagctaattaagagataattaagctaagtttttataaatttaagaaactcatgattaaaaaaaatatttatctatattcacactttaattttatttaagaaacacatgtttataaatttgcatgagatgttttatccaatgggtaaaggtagtgtttaaataataaagaaagagaagtgagagagatgtgagatagaacgaaaacgttttttttttttttttgatttaaaatatctcttgactgaaaataaatatcatactaaatgtctttcatttattattattttttcactcaaattctcttcattatctcactatactgataacccaattggtaaatatagtgtagagtccaattagcctaaattacatattataaaaagtctcaaaagactattcactccccgaacattgttggtgcaaattgtttttttgctaaattgtaaatatcatatatatgaaaaatcagttttacaaagtttgataatctagaacatttgtatttttttggcaaaataaaaacaaaaaacaaagagccaattgaaaatccgggagagaaatcttttatatatgatatttacaatttagcaaaaaaaataatgtgcaccaacaacattaggaaatgaacagtcttttgagattttttttcaaataaattggtgcacattgttaacataactgatatttttcaaataaattggtgcacattgttaattcatattcaagaagtaacctaacatttgtacaatcgattcacttttaccagattcaaaaacgagtcgttatctctacatatacatttttgtatatatttatatatatatatatatatgtatatatatcactttgtttcacgagaatataacatccacatatgaccacacaacaatgagatacatgataacgttacagacttacaccgtaagcctaagtagagctctcacgttctttacttggaactttggatattcgaaaacgatgtagtaccatgttcaaacccagccaagacccaaatttaaagaaaacaaaaacacttttatatcctcacgattcaaaacgctgtcgtatttcacttgatcaacgtagagatggcgagacagttactaaccatcttcgtaagcttatcggccacgtaagccaacgggttaggctctcccgattcttcaaaaccgtcgttacacgtgctgtaatctgtcatcgctgcgctcaagtttgtgttaacggtggcaatgtcacttgacttgacggcgttaactgcatcttccaaattcacaactgcatcatcatataactcctgacaatcggaggcgtcgactttttcgacgatggccatggccgccttggtcgcggtgatcgaagcttgaatagcgagaatgaggacggaggaagtgtttggtttcagttgaggcgttaagagaggactaacggaagattcgcataacggagggttatcggttttgccgcaaatggttttgatctccggagataacaatggcgggttcaaaaggcttttgggagaactcgaaactttgattccagatggtgcagcagaggaagactccgcaggagcttctggtgatgcgacaggagcctctggtgacgctgcgggagagtatatatctatctcgaccggaggattttttggggaaaatgaatctgctggagcttctggagacgcaacgggagagtctgtatatatctccgccggagaatttgcaggactagcgataggtttcataacttccggtgccggagctggtgtcgaaaatggagaatctgatctggattctacatgcgtagagatggtgaccaaaatagaaaccgtgaagatcacgatgatccgataggttttgttgaactccatttttttcccctttgattgagaaaaaaatggaattctgattagataaaagtgaccaaatgaagaaaagagtttacggagatcggtggaacgtaaatggcgattaaactttcaagttgtaattagtcatcatctttaaacatggtaattgtgaagttttgcgagaaaataggtcaacacgtcaattaacactaacgtatgttgtctttaaaacctttgtattcttcaattaactctaaaatctaagtatagctagaaatctgttaccttaaaccatcaccttttcctcaaattttcttccctttgattttttattagtatgcgttttttgctctaaagttattcttagagaaatgtagtactagcaccaattcagctgttgaaaggttttattcccgttgcttggattctcccaaagcaccaattcagctattgaaaggtgtatttggccggcgctattagctttgatcacagtctgttttatggccaagctaacacgtgatgttattatgtaccttcaccaattggtcttcaatgaaaggtatctggtgggtgaaagagtggacaatttgactgacgatgtagagcaggggataatcatccatggacaatgaccaacaattacttttgttcatagtcaagtcaatatgttactatatttagcaaatatttagagaaaaccaaatttagagtagacatgtaggatagtgtcttgcttttgacgagataatggtttaatactctaactcggttaacaaacgtaattatatttcagtcgggtcaaacttttggttaaatactttaaacgcaatcacgatatatatatatcgcgattgatgattatttggtgttcatgttcttggcgtgtagcttcaacgtggatgctcgttttaatgacgcaatacttttcttggattaatcttaatccgctaggattaacccttaaggttgccaaaattaccacccgtaccattctcacagttccagtggacttgaaaaccagaaaataaaaaaaggcgattcaaagcagagaataaatattaaaatccatcagctcttcgttgattcctatttctatttttccgattgacggagacgccgagatttatccttcatcggcgttgtcttttcgctggatttctcaaagccctagctgaagaatctctgaacaagtggaaatgccgttttggtggccactgatcgtcctcgccttcgcttacgcgatctgcaagttccttcttatgctcattcctcccaatgttccttccattgacgttgacgcatccgatggtatctcttttcttctctgtctgtatcagcttctagtttcgtctatgtctataccccgtaaaacaagcttaatcgatgtttgatttttgaaacagtgttggctcatgggaaagatacggaggagaatagcttcatctatgtgagttctccgatcgcatcattttctcattttcctccacattgtgcttaaaaaatttgaaatgctaggagatttaagctgttgatttggtttaggacttaggtattaataattgatctcagtgttacgaaattaactctgatttccatatttctcaatccaagtgcactatagctgatttattatgatagctaattaactgttagatcagttgttcttagcatactgaatcataagttatctgtgacactggctttagattcctcccagaggaaggagccaacagtctgacaaaaaagttcaatgttatgaacctgccacaatgaaatatctgggatatttccctgctctgtcgcctactgaggttagtagctgatgtccttgctgtgaagggaatatgttttttttataattttataagaatggtgctactttactcaaagtcaaaggtttctctgaaggctatagccaccttattatgagatatgatttacacttttgtgtttccaggtcgaggagcgcgtaacactatcaaggaaggctcaaaagacatgggctcaaagtagcttcaagcttagaaggcagttcttgcggattcttcttaagtacattattgaacaccaagagcttatatgcgagtaaggattcatttctgttaactacgtggtttggtatacaggttttgttttccctgggaacttttctcaaatgatgctaaagtttgtttttccgttatatagagtctcttcacgtgatactggaaagactatggtagatgcgtccctgggagaaattatgactacttgtgagaaaattacttggcttctttctgagggcgaacgatggttaaagcctgaatctcggtaattccacatagcttatataaatatcagtatgaattttagttctcctttgattcttataaatgatttcagttcaaatcttatttgtccacagttcttcaggaagagctatgcttcataaagtatcacgagtagagttccatccccttggtgtcattggagctatagtcccatggaattatcccttccacaatattttcaaccctatgctggctgcagtcttctctgggaatggcattgttattaaggtttaactgcaatgtctttttttgttactatagttcgctgacacttttggtttgatcttttcccaaggcaatgccattcattttccatatctgaataagcttagcatgttactgtttatatgatgtcaacattgtgagcagtgcgaccattgtgaggaagttgtttagtcttcttcaaggcatatatcttcttgagattttgtatatgtttctgattgttggaacaccttttctacaggtttcagaacacgctagctggtcgggatgcttttacttccgcataatccaggcagctttagctgctgttggagcaccagaaaatctagtcgatgtgataacagggtctgtatattatatttatgcaattctccttagcgtgcgttataaaattgatttcctcaaataacacattcttttcaggtttgcggagaccggagaagcacttgtctcatctgttgataaaatgatatttgttggatccacagctgttggcaagatggtacagtcttcagacttggttttccattctcatcagttcgctatgagttgtacttatgcaatatgttgcagataatgagaaatgctgccgagacattgacacctgtcactcttgagcttggtggaaaagatgcatttatcatatgtgaagacgcagatgtctcacatgtaagtgttctttttgtgtcgtcgtgctctcttctgtgtttttatttatttattattggaaaaggaggcgttcctttgataaaactaatgcctatattgtacaatttaggttgcacaagtggctgtaaggggcactcttcagtccagcgggcaaaactgtgccggtgctgaaagattttatgtccacaaagacatttatactgcattcattggccaagtaaccaagattgtgaagtcagtttctgctgtaagtgttccctaactcacaataaaagggataagaattcgcatgccatttagttttgatccctaatacaaacatgaaattcaggcggtccctaattcctgtttgccttgtgatttgtttgtcatcatcactccagcctcttcattagtatgttgtaacggcaaagtagccattctcttttttttcaccacgctttaatcatatacttatatttcctagtatatgcaagccacttaggaggttaactgatttttttcatatgtgatgctctggaagtttaataaaacaaaaatctctttgttccagcaacataagtcttctctttctcaaaatttctccatgttcttattaaaatccttcttttacactagggtcctcctctaactggaaggtatgacatgggagctatatgtttgcaagagcactctgaacacctacagagccttgtaaatgacgccttagacaaaggagctgaaattgcagtccgtggcagctttggtcatctgggggaagatgcagtcgatcaatatttccctccaactgttctcatcaatgtgaaccacaacatgaaaataatgaaagaagaggtacgaatccttaccttcattggctcgtctggcttctgttcctgcatgttgttgcatcacacaatactacacacgagttttaagatttattaatgtgtgagaatcaggcttttggaccaataatgccaatcatgcaattcagcaccgatgaagaggtcataaagctggcaaatgattcacgttatgctctaggctgtgctgttttctctggaagcaagcatcgcgccaaacaaatagcttctcaaattcagtgcggtgttgctgcaatcaatgactttgcatcaaattacatgtgccaggtacacctcactggctttactcttggatgttacctttggaaaagagagaaaaaaaaacagaaggttcgtcatgatctccgtggttaagagttggactttattttctcctttgattttgcagtcgctcccgtttggaggtgtaaaggatagtgggtttggacggtttgctggaatagaaggtttaagagcatgctgtcttgtgaaatcggtggttgaagatagattttggccactcatcaagaccaagattccaaaacctattcaggcaagttttctaaacaataacagagattgaaaatccaatctgattatctaaatgtcctaattaatatctctctgtcatggtcatatcacagtatccggtagcagaaaacgcatttgaattccaggaggccctagtcgaaactctttatggactcaacatttgggaccggctaagatccctaatcgatgtcctcaagttccttaccgatcagagctctaacgtgagcagaactagaaagagccactgaagaccaatgacgaaaaacttggtgtccacataaaacctttactctttacatgcgtcagctgagttgctgatattgcaaagctaattttggataatagtgagcattttgggtttgcatgtaagcctcatagacactggtttttttttttgcctggaagggcgatttgtgacttgtgaaatatttgaaaatccacttttgcgctgtcttataataggaaactgttgtttggtctcagatcgtgcttgagttcatatgtgtagatcagctggtgatgaaacttgataatttcggaaacaaggacaatgaatctgaaataaagagacatgaaactgagataaagaggagtgtgtatataattggaaacctggattgttgacaattttgtatcatatataattttagatttacgcatatgatggatctgagatatacaaaaaaaagatggaaatccggagtgtgtgcgtgtgtgagagcgatatatgaatttgactccaacgtgaatttgagattttttttcatggtatgtgagaaaatttagggatttctatttttgagaatatttttttctatttcttttttgctaatgctttttgttttggttaaaattttatatatcaaaatatgtaaaatgaaaacaataattcgattgggtaagtgacttgttctttatattattttgaaaataaccgtttatacccacccatactgaacctacctaagtgcgcaaaagatggtaacaaaccaaaatatttggatttacacatataagagtccagatattgactcattgacttaatcttcacccccctcccccccccccacccccccccccccccccccccgcccccccggagctaaattatccattcgtttgacaatgattaaggcgaaatatatacgtatagtcatcggaattattggtacgatcagcgtctctccctcttttaccattccatgcaccagtgtggttgtagtagtcatttgcttacaaagctttatatatgtttttacggaactaaaatcaatcgttaacacatgtatatacaagcactttttgtgtagatattactgacactttttctctggcgtgatgcagggaatgttctatccactttgatttcgctctcacatatgtaataatccctgttcttctttctcttgctttttcttttctattttcacattcgttttgtgtatgtttgtgtttacgtatgttctctatttcgaacgttttttaaaattatttcttctctagtaatttgtcaactatattttcaaggtttaaatatagtgcatgtaatctgtcttgttttagtggtttctagctaggatcattactcctcagatttatataagtattactgttttcagacttttatataagtaatttgttgttttctgaccaaaaaaaaaagaagaaggattattgtagtcaagagtgaaagcatttttcattatatatatatacaggccaacggttatacaaacatgcaagaagaaatcagtggagggagttcaaattgctcctcatttagtgctgttgattcaatgtagtttgtgggttttgtatggtctccctgttgttcacaaggacagtattctcgtcaccactagtaatagtattggtttcgttaacgaagtaatctttgtggttgtcttttggatctgctgtgaagacgaatcacgtgtaggtccatcttttatacttagatatgtctaattctgcatattgattttgatgatgttgatgttgatgtgcagaagagaaatgttaatctatgtcttctggctgtgtttgattttgtgacatcgttctatgtgattactatttgggcaattcaaagtttattcgccaagtatacactcattgggattgtttgcaacattttcaacatttgtatctatgtttcatttgccaaggtaaagctttcactctcactctcactctcactctcattgatggttaagtattaattagcggttttgattagttttttttgtttgtaattcgtgcaacaattagaaaaaaatgctggagagtaagaccttcaagtacatgccgttttggctgtcgttagttagtttcatcaacgctggactttggacggcttattctttgatctacataattgatatctacctccttgtaagttttttttttcttttttttttttggcttgaaaacttaatgtatttactccctctgttttatatgataagatattttagaaaaacatttagatttctatgacaaaaattaaattcattcaaatttgtgactatgtatattctacattaaatttcaccattggctagattatctataattaaatattaagttatgtttttaatgtaaaaaatataacaaaaaaattagttagattcttgaactttgtgcttttatctaagacatataataatattttgaaacagatagagtgattaattttcattgattgaatttcatttataacatctatttgtttgttttgtgttatggaacagataagcagcggttgttctgtgcttttcaattaatagtccacgcttgttctctctgtaagagccagaaaattactccatcggagtcataatttgtttttactgaaattctaattttaaagctctacgatctaaaataaaagaaataacgaaaaagaagaagccaaaccgtttttacttttttaggatatggacaaacaagtattaagatatttaagataatttatattaatggacttcattatatataacatacttacttaaaataaatttaattgggttcaataccataaaaattttacaggtgtcaattgtcttagtggacaagagtcaacttttatatatagaagtctaactaattttgcaaaaagtcaattgacccacgtaatagatttagagacttatagagtttcgatttaattatacctaacaaaaaaaaaggcttaatgggttaaacgcattgcagattatatttttattgaatataaataatggtttaattttaaatgtacatagatgtttatgattaattatacccagaaataatactatttaaaaaaaaaatatgacacgtaagattattactataatacatagaagttaatatttttttaatatgtgtttattatttgtcaaactactattattgtttgttgggtggaaataaactattttggtaaagaagaaattttgtttattaacttggtaaagttctccttgtaattcaaactaccatttaataagaggtctaatagtaagataatactaataatagttaaatatctatgaatattgattaaatacatggaaaatattcaatgctctcataaggtaatgcaagattttcaaagtggagttactaaatatgtatatatatgcaaaaacaaaagtttactaaaaatatacatatatgatgatgaggttcaataacaactttctccacattcattactataaatacataaagaaatacaatcttcttcttatatacacaaacatagattacaatcactcaaaacatttcacacaaaaaaaaagaaatgggtaggagaaagattaagatggagaaagtgcaagacacaaacacgaagcaagttaccttctcaaaacgtaggctgggtttgttcaagaaagcgagcgagcttgcgactctgtgcaacgcggaggttggtattgttgtcttttctccaggaaacaaaccgtattccttcgggaaaccgaattttgatgtgattgcagaacggtttaagaatgaattcgaagaagaagaagaaggagatagctgtgaaacatcaggctatagtagaggcaatagagctagacaggagaagaagatatgtaaacgcctcaactcgattactgaagaagctgaagctgagaagaaacatggtgaagatcttcacaagtggcttgaatctgctgaacaggataagttcaataagcccattgaggagcttacgcttgaggaactcaaggaatttgaggctaagattaagaaaataagctgtgggatccaaagtaacattagtcatatgcaggcttcgtcttctctcatgtttctctctaatgataattagcagttatgcaaatgagaaggcaacagtaacaacaccgatttggaactttcattttgtattagtcgttatagatttatatggtagagatgtagcagatggttggtacaggtttattgattgtatcttcctcttgatgatcgatggtttgtaactttcggttgccaaatattactatgaagattttctcttttcaaaaacaatgaattataacaatatctcctactctacaaaattgataatgattacgatatgaaattttaaagcgttatttgtttttttttctcttatattattatagattttgtctacacactctagatatttatctttaattagaaaaaaatacataagagtacaccaactaattaacatatttataaatgtgtttttaacatttttaagttttagtcaaaatagtatcaaaatacataatttgatgtatgtcctatatatcttattccaaattattaaatattacctaaaacaaaaatacagtatttttgtaattgtattctatgaataatttaagaattccttaagaattgtttaagaattattttagagtttttaaaagaaatcttgtagagatttttaagaattcttaaaggatttgtttctggtttttcagattgttctccatatcttctcatataaattttaaaagacctctctttttctctaatagttttatggtacttaacgggtataatacagaagtttttctatcataacaggataaaattctctaaaatcagttcatgtatttgctcaagtatcagaagcataattaaacaaagattctatttcctcgagaaaaatcaaataaaattacaaaacaacaagaaactgtaaaatagaaagaaagaaaaaacctcaaaagaggatttatacaaaagagcgagtatgaagaaggatttggcgtgagcctcatttacagaggaagcaaggaagagaaattttcatttcatgtctctagtttcagtacaacaccagtgatccctattggcgatttcggttggaaatgctcatccgtatccacttcttcgatctcctgtaataatatgatttaatcttttaacacatgaaactattaaacaaaccattcaagctgatagactgtgcttagttggatcaaacctgtactacatcctctcccttaaggactcttccaaacactataagttgatcattcagatccgggattggggccgttgtgatcagaagctcaaaatccttgttgttccctttgttttttggtgttcccaacatgaatgcctcatgttttgggctgtaacagaacatatgtagttttttattttttaaaaccagcgagagatgataaacattgacacttaaaagccaaaagcagagcaagcaagttatacccaatgtgaaggcgacctctgagctttcctttagctgtccattcttctacaggtatagagctcggtgagtgaccagcttgtaccaagtagttctttataacccgctgaaacggcattcccttgaagtgatctttttgactgcaacaatactcaatgttcaacttctactattatattaagctacaatatcgtcacagactgattcagcccatttctctttaatgaggtttcatgttccaaacaaaaattccaagaagagtacaagaggacttaaggatcaaaatcagtcaatcaagaaactaaagctacttgaatcctatcaagctagaagtaatactcctatttaagaacaagtcatgacctagcttaatcaaattactctactgttctttttctatctaacttaaaggaaaacaaacgaattccaatactaaccatagatctagaaacttgtccacaacttcaggggaaccttctttgaagagttcgacagttataagtccttttgatgtgtttatatcctacatgagataggaaaatagaagcaagatatcattaaaatcaatattcagataagacacatcacattttttttacttcaaaaactgatgaacagaacataataccatgatgagaaataagaacaaggattaaaacaagaaacttaagcaagcaaacagggagattaacttacagcaaaaccaggaagatcgtaagttttttgccctgacgcagtattagtgtcctgaagcagaaaccaaagccagatcacatatggtaaataccctaaactctaaacctaagtgctcggaagttcatcaggatcaaaactcaaaagctatacattaaaaaatctctcaagaaaatacctcaaatctctgactccgagtttcatgttcaattgtgtttcttgacctaggagatataaccaatgatatcctttttagtttatagataatcacataaagtaaaaggagaatctactataacagaagtaatgaaaaaggaacaattcaaagatgaaaacaaacctttgggaccaatggcgataggttgtgaccaacgataatatgactacagcaactacaagattacagacaataatagtggaaatacttatgcgacttggacccttcttcttcttgctttgatttagaagagcctgcggttttatcttcgccattgcaccttagtttcgcagaaagcaaacgagggatacaacttgtctctgcaaaccataaatcaacagtaagtgacaagcaatccagaaaacaagtatacactacacaaaaactccaaattcgtatctgtaagactataattcaatttcaagttggtaaaatcaaaactgcaataagattaagttgttacccaactgaagaaaccctgatatcacgtattgaccagattaaaaatctagcatatttgaatgaataaacgcatgtgaaaatatcacaagggttcatacatagcttgaccggtaacttccgatacaccagatccagtacttttccaattatcgatcaaattgaaataaattgaacaaaagtggatatgagaaacggagcagcttatcatgttccaatcaaataataaacagatctttctttctatagaaatccaaagacctgaaagtaaaatcaaatgaattccaaggactttgattgcttcattgggttctcgaaaaacgtacctggaagttagagagaagagaggaatcgtggagattggtcgttgcgtcgatggaaactggtttgaattctctgctctcttttctcttttgcagagacgcttcagatcagccgcgtgtttatccgacggctacgagtccacctcaccaatatccgacgaatattattccacaaacaaaaatacaaaagttgatcatttttgaaaaatcgtatagttcggtctggttttctcatgaaattatctggttatctatttgacccaagaaaatgattctaaattcaaaagaaagtaattttactatggtctagtggttatcacgttaatcatacggtttccgccctaattgtcactggtttgatccttcgctgcatcatttgattttgcattacacatactaaactgtaaatataaataagcattggtaaaaaagtcaaattttctacgtaaacacttacaaaagggaaaaaaaaaatgcacaagcaagatcacttaaaaaaacccaggtcacagtcaattgttcggttttgtgattttcttagccactttttaattgatcggtttagatatagcctaccatcaataaaccgttattgtgttaacctgaaacaagccatccaatatgatctttttaacttgcacaccatctcctctttctaactggcctctgttgattagtaacatcggctttagctctcagttcagtttgagatttgaatgtcgcttctaccgccaatttggttcccttgaacctctccctccgtttctccatctttttcagactctcttgtatacgttcattgtctatttcaacacctttcacttcttctattatctcgccttcttctttgtcatttatatctcgattctgcatagctttctcttcgcttttgcccattaactttcttggtttctgaacatcttgttgctcgattgtatctccgccattggagaatcttttttttgattggttagagacctgaaacacacacacaaaatatctatcacatgagaagggtcttgttcttcattgtacactaactgatgtctaaatatacggatgtgagcaacataaaacctaagtatagaagacagaccatataaagtgataaaacagtcagaaataacacaaagaaaatccagggatataaataactgaaaggcgtttatacttcattcaaatataggtttaaaagcatgtagatttagtttcccaatctttacctttccttgcctaccagctaagtcaacatgatcctgacgcttgatgaaagcatgcccatctcctctcagcttcttggatctgtgatgtctttcatcattttcatgaatatggctctgtaaatatccaaacctttgtttggtcgccatccgattatgtgtcggtactcttatgtcgcggacaaatatctcatcagtatatgatggatgctcagaattagaaacttctctcattgaacattgcatgtcatctgccatattatatcttcctctatcaggaccaacccaatcagcatcatactgtagtctatcttttacgctcacattatggctacgaccaagattctgcgtccagccatctctcggtgcagccttatgaaaatggttattctggctgtcatatgcttcaggtgttctgaagtctctggtatcatctctccggaaatcaccttttgcttctttggtataccaagaatctctcaaagataaagacggtgaggaccaaccatcttggattctatacttataaccatcttcctctgagacaaatctatcaagatgccaatcatgaatgtaatgatgtcttttctctatttcagagaattcctcatgtcttttatacccttgatattctctcatttccacttcagcaaaagaacgcatctccctgtacgccagctcaaatggaattctactttctaccctgtgaactccatcttcatatctatcacgatgcaaattataatcgtatccaccccttcttctgcaataaagatcattctctggactgtgcttgaggttgtgtattgcatgtgcagacgagttctctgaccggtacctataatccatgtcagtaatcggtatacagtcctcataataaggttctcttagccaatcacacccatttctttctttgtagttttcatatgctcggataggacttctttcatgaacatattttctttcacgatgatgccaaccatatcgatcatcctcttctttaaaacttgatctagaatttctctgattaagatcgaaggatgaacgtgaggtatactctttaagatgcgtcccacacttgtaactattagaatgatcaaaacctcgaccgagtgatgattctttgttgttccgccaaccaaacctgtgctctctatgcctatcatgatccacagatgaattcaatctaccatgagatttttctctatagtaatgaacgcctttaccttcagtttcatccctctctaatgtaataggtggtccattctgccagtttttgtttgaatcacgatacaagccctgtagagaaccaactttcttcccacgaccaggatctggtgtaggcgatgcatccttaacatagcgagcataaccagctctcccacagtgccttttgctggagtcttcgtgagatcttctgtgtctagaatgcattgtaccactatcttcccctcttttgatactaattgcttcatgttctgcaagtctagcttcttgtggtggggtactgacttcacgttggtcatcagtagcactgtctttcaatgactctgtttcataatcatcagattcctcatttataccaacagaagaagaagaggtagggctcaaacgaatgcgatctccaagagatgattccctctccactgaggatggatccgtctcatcagaattgcaaacactctcttctttctccttctcaagcatttccttatcactaggtgttgcttccctactgcagcaattctctgttggaagagatttctcgccactgaaacttccagcgttttcttcttgacaccccacaaaagcttcatcttttggagaaccatagactgaattcaaatccttgctaccatatgaatgagaaacgtcacttctagatgcttcatttgatgttatgcatcttgctttctcaggtgtcctgactggtagctcctcaacatcattagtaactgggatctggtttcatacatttaatcagcaatggaagataagggaagcaaaacccagcaaaccaagaatcattcaatctctaacctgtatcaccacgccagggtcaggatcacgtggacgacgcaaatctgcagaaggtattcgctcaagagtaccacctctaacctcaattgctcttcccttcagttgaataggtaagtaattcattaagatcaaaccaactacgccattgacacaacgatacgaaaaaaggaacgaaaacatgtctacttaccaacggtttacagtaatctttccagctctgctcgttaagcccaaaattaaaaaagtcactggtatccgtaccaggatccctccatggcttcttctctaacacatcgagatttacatcaaaaggtgtcctgagaataagagaaacacacatcatgatcttcaaacacataaaccattactcatatcaatcacattcaataaacctaaaacacacatttatcatctaaacaccactgtgactaacctggaccaagggtttgggaaactatatctgtattgagacattcctaaagaaggatcgatgcaagcattattagctgaagcgtttctagtccaccgtctctgaaacgaggaagctttggatgcttcgtatccgccaaagttggtgttaaacacacaagaagcaggaagggctttagagtcgtcgtctttgagcactatattcaaatcatcatcactatcactaaattccgattcttcatcggcctcagtcagattcatagcacaatcgtcgtcgtcacacggactcgaatccttagcaacaacatcaaatttcttcacttcaccttccgaatcagactttaccgtctcttcaaaacccttatcctcgccggagttcgtagcacactccgattcgaaagcatcagtcgcctgaaacttggcatcatcaacgtacaagtcaccgaaatcatcatcagtagaatccattcaaaagaaactcgatgaacaaatccaaatttgacactagaatcatctattccataaagtgagagtcttgacacttgacagttgcataaacccaaaagagatttgggagtgacagaaaacgccttaaaccctaacacgattaattcatatattattcttttctactacataaaatcttatatcataattaaaataaaaattatgcttgtgttgtggctgtggccacacaaaatatgagtatgtttttaatataaataaaatttaaaatttaaaattatttaaaatcaaaatttagaaatatgaacaaaaattataagaagttagataatatatggtaaacttagcaaacataaaaattaaaagaaatattagctgttttctttaattgatgccaaaaaaaaaaaaaaatctctttaattaatattaatatatatccaacatagaaataatcttcaatctatttttttacttaatacttaaagagttagagttgtatcttttcatttactcaaatttgtatttttttttaacaacaactcaattttttttatttttttgtttccatagaaagacatctttatgcttttccttaaaaaaaaatggacttcacaacaacaaccaaaaaaaagaataaaaagatttggatcggagatccggagctgtgacttgtgagctaactaccacgggccacgtgattacacctttaatataatattgtcttctctatctggcagtggtagctgagctcatcttatttgtttcttccctcccatttaatggtttcctcttaaaccattcccttcccttcctcctaactgcaatctactctccacctaacattgctccgttttgactcgctcgactcggctaagtgaccacaggttcgttttcctatttctctaacttttcattggagatttccatgactcagatccgtgtttttttcgaatccgatccggttaatctcaaacaaaacttgtcgatccggtttgggttttagggcctatagaggggatagtgatgagtcgatagtggaatgatttcgtttctacaaagactgagatcttaagtaatatggaattctgtaatgcagtggttgagatttgcagtagtgggtccctggtttcgatcccaaatcgttatcttttaatccagaacaactggaataaagaaacaaagcttcttcttgtttgattcagttctcgatcatggtttgattaaatgaatcaactttattaaagttgtgttagcttgaaaagggagaaactttttgttggtgtgtaaccgatgatctgtttgatctgtttcagtgtttgcttttttgcatgtcaatattttattcacgacttctaaatttcacctttttctgattctcagttcctttcgagccaataaaatggctacgggacagctattttcacgcaacacacaagcgttgttctacaattataagcagcttcccattcagcgtatgcttgattttgatttcctctgtggtgagtgtatcttcttttgtatctttcttaatgtcttaatcagttattctctggatttacttcactattaaatttggtttctttaattatcttaactctttacagggcgagaaactccttctgttgctggtatcataaacccaggttccgagggattccaaaagctattttttggtcaggaggagatcgccatccctgtccacgcagcgtaagttaaataccatctacataaagaaagagagaaatacatagttcagaattttttatcttagttgtctgtttcttgcagcattgaggcagcatgcgctgcgcatcccacagcagatgtattcatcaacttcgcatcgtttagaaggttattattgttttattctgtgaatgcgattttcctgttttactatgtgattctcttgtaatgttttcttttccccttgtattttagtgctgctgcttcatccatggctgctttgaagcagccaactattaaagtagtggccattatagcagaaggtgttccggagtcagacactaagcagttgattgcttatgctcgtgctaataataaggttggttataacactaaactgactcattcctcatgatgcagtattcctaggaacttactattgatcgatcttttcttattgatgtgagctttccgagttaatcttcttttactgattggtcattacaggttattattggaccagctactgttggaggcgttcaagctggagcctttaaaattggtgacacagctggaactattgacaatatcatccaatgcaagttgtacaggcctggatctgttggctttgtctcaaaatctgtatgagctgtggagattgtttttttcgcattttgtagtctacctaagctcatgattatcctcttttgaatcttaatctgagagtttatttctcattcactattttctatagggtggcatgtctaatgaaatgtacaataccattgcccgtgtgacagatgggatctatgaaggtgagtttctatttttttgttcagaatttactaatgaatatgttccttatgcttatcatttctgaagattcttaagatgagtttatgatttgggatggccgtaggcattgctattggtggggatgtgttcccgggctcaactttatctgaccatatcctgcggtttaacaacatcccacaggtatattcttcttgacttttaaaattttgttgctcactgggatatcctcatgcggcctatccattttttctactgtttaaccatgagaaagctatactgtacttagaggcatctgaccttccctctcttgttcagctagcctctttaactccaaaattttgttttcattttttcaatattgcagattaagatggtggttgtacttggagagcttggaggaagagatgaatattctctagttgaagccatgaaacagggaaaagtgaccaaaccagtggttgcttgggtcagcgggacttgtgcacgtctattcaagtccgaagtacaatttggtcatgcagtaagtgtcactcagaaactgacatatagaattttggacgccaaatgttcatctggttccgatataaatcattctttgatatgatatgaaccagggggccaaaagtggtggagagatggagtctgcacaagccaagaatcaagcgctacaagatgctggagctactgtacccacttcattcgaagccctagaagttgcaatcaaggaaacttttgacaaattggtcagtctccaatcaaatgcggtcttagcttgcatttctctttgttgtgatcttatgttcatgttttttctgtcctcctaggttgaagagggaaaggtctctcctattaaggaagtcactcctccacaaatccctgaagatctcagctctgcaattaagagtgggaaagtccgggctcctactcacatcatctccaccatttctgatgacagaggtattattattcttctgaaactaaaccagaattctctctttaagcaagaacagttttttcaaacaaaattctcacgcactgaattttcaggggaggaaccatgctatgctggtgtgccaatgtcatccatcattgaacagggttatggcgtgggagatgtcatttccctcctatggttcaaacgtagtcttcctcgatattgtaccaaattcatcgaggttgctcatctttccatgtactaacacaattattgaacactgttagtactgagattgaatatgttttctgacactgaactttgatcagatatgcataatgttgtgcgctgaccacggtccatgcgtctctggcgctcacaacaccatcgtaacagcaagagcaggaaaagaccttgtctcaagtcttgtctcaggtgaattaacatcccaatccatcaactttttaagtgaagtttgctatataataacttatgctgattattcttcaaacaaacaggtctattaacaatcggtcctagatttggtggtgccattgatgatgcagcacgatacttcaaggacgcttgtgacagggtaaaaaaatcattttatccttcactgcaactgcatcaagcctttcttgaaacttagatataaatagtactaaaatgttgtgccctattcagaatctcacaccttatgaattcgtggaaggcatgaagaagaaaggaatccgtgtccctggcattggtcacaggtaagaacaaacaaacgagcttagatcttcatcgtttgttttcacatgtaaatgtggaaattggcgttatatatcaatcaagtatcctttttatcaatagcaggaacagaacattctctgactggatttgttttcttacatatttgtaggataaagagcagagacaacagagacaaaagagtggagctgcttcagaaatttgcacggtctaacttccctgcagtgaagtacatggaatacgcagtccaagtagagacatacacactgtctaaagccaacaacctggtactcaacgtcgatggagccattggatctctcttcttagaccttctcgctggaagtgggatgttcacaaaacaagagatagacgaaatagttcagatcggttatctcaacggcctcttcgtcctcgctcgatccatcggtttaatcgggtaactgtcataaccaaacacttacacttgttcttaaaacaaatttaaattgatgtggattacgtgaataaaattgttgcaggcacacattcgatcagaagagactgaagcagccactgtaccgacacccgtgggaagatgtcttgtacaccaagtaatcatatcattattcacttcttctggtcgttccttattcctgttatcattctctcccattcagttaggctatgtttgattatatatttgttctgacactctatctgttgtgatctcttaatgcttgaaaaaataaaagaaagttcaattttagaagaattataatgttttgattaaattcttttaaaaagttcaatataatcctgacgttttatcaaatttaaactttatgaatagttcgagttaaacaaataagtcaccatatcccacgaccaacaacttatcttaaaatatttatgttgttgtttacctctggaacattatgaagctcttatcttcgacgctaagtttttgaatattttctaaagaaccaataacactagaatcagtaaaatccaaaaacaaaacaaaaattatgacacttaagcatgttagcatttatgagtgaggaacatatcagagtatggttagttgccggtatttcagccgacagacttggataacgtttgcaatattggatttgaaacggcgatgcagctttatttcttttcatttcttgtcactttttatttataataattttgtttgaccaaaaccaaaaggatgatgttacattgataagaagaaagaagaattgattttcaaatattcaacaaatgaattggttgctcacactctctgcagtatcttttcttacgtataactagatcttttgtgcacaagcctaaccaaataaatagaaccggcgccaacattctccgttctttttctttttctctatggctctatacattgaaagttgaagcgtttgcgtttccattatcgttagaatttcttcaaattccattttctggagagaaagtttgtatcttttggttaggaacagtccaaatccctattttgattcttccttttgagagacaaatcgaccatggttaagcttcttcaagacccgattacacctaacaaggagctgctgaagaagatgatagagctagagaaaagtcaggagcatctaatgcaggagatgtctcggctcaaggtctccacggagcttcggaaggagagccgtatccagtgttccatgaatctgagaccatcgccctggaagttcactcataaacagtatctcaatattttgcagtccatggcacaatctgttcatgccttcgatctcaatatgcgaattatcttttggtgagtgagttctttggccttcctatactgttcacgtcttagctggtcctcaagagagtgatttcatggatacttttgcatggttccaggaatgctatggcggaaaaggtttatgggtactctgctgcagaagcagttggacagaaccctattgacgttatggtagatgatcgggatgctccctttgccatgactattgctcaactttgttccaatggagagagctggactggcaagtttcctgtcaagcgcagaacaggagagaaattctcagctgtcactacgtgttcccccttctatgctgatgacggttctcttattgggatcgtttctatcacaagtgacgtagcaccatatctgaacccaacaatctctttggctaaattaaaggcttcagaagtcgaaaccagctctacccctgcaaggaatagttttgcctttaaacttgggttggacaccaaaggagctgttgtatcgaaacttggccttgattctgatcagcctatacaagttgctatagcatcaaagatatctgatttggttagttcacttgtaggtcgcttgttctcacttttttatcttgttgttgcatgttttgactagtgtgataaaattgcaggcatccaaggtgagaaacaaggtcaggtcgaaaatgccagcaggtgatagtagtgtcacagtatttgagggtgaaactggggatagtcatcattcagatcatggagtcttcggtgctactctctctgaccacatggatgatgcagcatcaagtggtgctagcacaccaagaggggactttatccaatctccttttggtgtattcacatgtaacgatgacaagttttcttccgaacccttcatagattccagtgatggatatcctataacccttttcacctcaaaagctgaagaatggatggtaaagaaaggtttgtcttggccatggaaagggaatgagcaggaaggttcaagagtaaagcctacttattctgtatggccttgtgtacagaatgaacaaaagaaagataagtctcaccagatcaaccgctattctggtgttaagtctaaaagccatgcctctgaaagtaataagcctaccaataacaaggcttctggtttgcggtcttcttgtataaatgcgaacagcgctattagccgtggaattatcagtcacagtactatgaacaaggtggatacaaatagtaattgcttggagtatgaaattttgtgggatgatttgacaatcggagaacaaatcggacaaggtggtttaatctcttaaacagattcatgttttccagtctactccactctttataacatctatcatacattttactgattttgtgtaatatagagtccatcttctgctgacatgctccagtaacttccatattgcaggctcatgtggaactgtctatcacggtctttggtttggatctgtacgtttttttggcttctgatgatattttagaatattcatttgttgatttatgaacccttgccataaacatttgcaagttcagagatcggtcttattgagagttgctaatgtcaccacaggatgtagctgtaaaattgatctccaaacaagaatattcagaagaggtcatacaatcttttagacaagaggtaatgtttttactttctagtcgtccattataattgctcggagtgtagtttttgcagaagacattttaaatgggtcttgctatactgtgaaggtatcgttgatgcaaagacttagacatcctaacgttctgctgtttatgggagctgtgactttacctcagggtctctgtatagtgtcagagttccttccacggttcagtctcaacacttttggttactagtctcactttctttgtgttgtgggccttttaagccatatctcttatacattcccctaatcatttggataaaattttggcagtggaagtctatttcgtctactgcagagaaatatgtcaaaacttgattggaggcggcgtatcaatatggccttggacattgtgagtattagttatatgtccattagacatctgatttttccatttctatgatcattgacagttgcacgttttgtaagtatgagatgctttatttgattacttgtttttacgtcttcttgttcactctatttggctcagtcaacttacatctcaagtagcatattacataattcttcacacaggctcgcggcatgaattatcttcaccgctgtagtccccccatcatccatcgtgatttgaagtcatcaaatctgctggtagacaagaacttgaccgttaaggtaacatgttcatcttgataaacgtttgtttatgaatgataatgttccatcttcaaactgattatatagctttctgataacattgtcattttacatgaatgatctagaaaagtgagaccccaaatctgcaaactggaactagaaacattgtcaactaacagtgacatctctaacaggtagctgactttggtctatcgcgtattaagcatcatacatacctaaccagcaagtcgggaaagggaatggtactattctagacgcttatcgatatgaatcctgatttgatttatagtcaacgtctcacacgatcttgattggcttcttacctgttctgtagcctcaatggatggcaccagaagttcttcgaaatgagtctgctgatgagaagtatattctcgtgttctgtttgattaagttcctttgagtacttgttttctagcctcagttgctaagtagctcttctcattccttgaaacaggtctgacatttacagctttggagtagtactatgggagcttgccacagagaagatcccatgggaaaatctcaactcgatgcaggtatcgtttttgagtgatagaatgatgagaagaatgtgtcttccaaatgacagttgaaatattagcaggtgatcggagctgtggggttcatgaaccagaggctggaaattccaaaggacattgatcctgattggatctcactaatagagagctgttggcacaggtacattaacgttctgaacattgcacaatcattgaatataaccttttattgtaatggttctccttgctttaggtgttctacatgtttcacagctgatgctgacattaatttttgtttctattttggtttgtctcacctgcagggatgcaaagctgagacccacattccaagaactgatggagagactaagagacctgcaaagaaagtatacaatacagttccaagcgactcgtgctgcgttatctgacaagtgacaactctcttctcaaggacaactaaaccaaacaaaagttgacccttttcacttatggcttcttgttcctcaacgccgcatcgcttcaagatccaactattgttcacagaaacaaagaaagagagaaagagagagttggtctttttgaacaacaacaattggtggaaacatgctgtgctggtgtgccaatgtcttccaccattgaacaaggttatggcattgaaaatatcatgaaggttggttgactatggttcgaacggagtcttcccaggtactgaaacaaaatcattgaggttggtcatatgtgctcatatttctatgtttttacaccaatgttgaaaactataaactagtgagcttgactctgctttctgacactttgatcagatatgcataatgctttgtactgaccagtgcgtctccggccatggtggttaagtatcacttcattccaaatttaagatgaggctttaataaatttttgtctacgtaatcagatgtaaattagatcttgaataatgtatcaagctttctttttttctttttaatgaaaccaagaaaatacaagaagaaaaataaaatatgatttcaatttaaaaaagaggtgagtgagttagttacactgatattgcagccgatgtacattaaagtacaatattagaagttggaagcggtgtagcggcgagatcggattatgagggaacaatacatacaaacaaaaaggaaggatgtagaatactagcatctttcatacgttacactacagtcagtatcatggactcatggtttctcgggagtcaatttttttcttaaattacacttttctcgagagaggaaactttggttgggagcgagagagacagtcatgagtcatcaatccttctccatagtcaaatctaatcactctctttttcgaccatacgattcccggttattagctcttcagatttcgaaatccacctgagggtttccgtttttttcctggagcgcaatggaggaggagctgctcaagaagatgcttgagctagagcaaagtcaggagcttctaaagcaggagatgtctaggctcaagctctccacggagcttaggcagccgtcgcatccggtgttgccgcgtcggccgttgagacgtatccagggatcgatgaattcgaatccatcgcccgggaagttcactgataaacagtatttgaatattttgcagtcgttggctcagtctgttcatgtcttagatctcaatacgcgaattatcttttggttagtacttcttttttttttttttggaattgtatagtcaatcgttatgattatggtgacatgattgttctcaggaatgccatgtcggaaaagctttatgggtactctgctgcagaagtagttgggcggaacccagtacatgttattgtagatgatcagaatgctgcctttgccttgaatgttgctcgacgttgtgccaatggagaaagctggacaggggagtttcctgtcaagaccaaatcaggaaagatcttttcagctgtcactacgtgttctcccttttatgatgataacggcactgttgttggtatcatttctatcacaagtgacattgcaccctatctcaacccgagactctctttgcctagattgaagccgcaagaacctgagaggaaacttggtttggactccaaaggagctgttatatcgaaacctggcctcgactctgatcagcctatacaagtttctatagcatcaaagatatcaagtttggttagttcaattggatgttgcatattctgaccttttttatcttactgtttgcatattttgactagtgtcaaatttgcaggcatccaagttgagcaacaaagtcaggtcaaaaatgcgagcaggtgataacagtgcctgtggggatagtcatcattcagatcatgatgtattcggtgatactctctctgaccacagggacgacgcagcgtcaagtggtgctagcacaccaagaggggattttatccaatctccttttggtgttttcacatgttacgatgacaagtttccttcaaaaccctccaaagattccagtgatagaaagcctgcaatccataaggttcccacctcaaaagctgaagaatggatggtaaagaaaggtttgtcacgtccatggaaagggaatgagcaagaaggttcaagagtaaggcctactcattctgtatggtcttgggtagaaaatgaacaagagaaagataagtaccaccagatttatccctctgctggtgttaagtctgaaagccatggctctgaaagtaataagcctactgatgacgaagcttctaatatgtggtcttcctctataaatgcaaacagcacaaacagcgctagtagttgcggcagtaccagtaggagtgttatggacaaggttgatatagatagcgatcccttggaacatgaaattttatgggatgatttgacaatcggggaacaaattggacgaggtagtttacttcataaacagattatctcgttgccagtccattctttataacatcatacatgttactaatatatgtgattttctgtgtctgtttagctaaaatgctccaataattttccattgtacaggttcatgtggaactgtctatcacggtatctggtttggatctgtacgttttagctcctggcgatattgtagaatctacatttgttgatttattcacgcttccatggtaaaataaaattcaagttcagatatctttcttattgagagttgctaatgtcaccgcaggatgtagctgtgaaagtgttctccaaacaagaatattcagaatcagtcataaagtcttttgaaaaagaggtactggttttgatcttttatccataatgattgctctgagtgtagttttggcaaaagacagttgatattttcattggtttttagtagaacatccaaacattcaagttattatattgttcttacttttactttgaaggtatcgctgatgaaaagacttcgacatcctaacgttctgctgtttatgggagctgtgacttcaccccagcgtctctgtatagtgtcagagttcgttccacggttcgctctcatctcttttctttctttgtgttgttggactttcacgtcatagctcctaatcatttgaattataattttcagtggaagtctcttccgtctactgcagagaagtatgtcgaaacttgattggaggcgacgtatcaacatggccttggacattgtgagtattagttatatgttcattagacatttaattatgagttgctctatgtgactacttgtttgtatttttcttgtaaatcttcttgttaactctatttgactcggtcaccgtacatctcatacaccatattacatgattcttcaaacaggctcgcggtatgaattatcttcactgttgtagtccacccatcatccaccgtgatctgaagtcgtcaaatttgctggtagacaggaactggaccgttaaggtaacaggtcatcttgaatgagtttggttttccttaatctttctaaaactaaaataaagatttcggtacaaattatcttcttatttaaatggtctccaaactggaactagaaacatcgtcaacttacagtgatatctataacaggtagctgactttggtctttcgcgtattaagcatcagacatacctaactagcaagtcgggaaagggaacggtactggactactcttttcgatttgaatccggatttatagtcaacctcccgaaatgatcttgcttggcttttcacttgtaatgcagcctcaatggatggcacctgaagttcttcgaaatgagtctgctgatgagaagtatattctcgtgttctgtttggttaaattcccagattacttgtttttctagcctcaatcgctaactagctccatttctttgagacaggtctgacatttatagctttggagtagtattatgggagcttgccacagagaagatcccatgggaaaatctcaactcgatgcaggtatctttctgagcgatagaacaatgaaagtgttttcacttacaattgttcctagaaatcacatatttggtcaaaacttacatgttttgctctatcaatgaagctgacaaataataagaatctctatgccaaaagattggtttcagggtaaacctctattaaaaatccatctagtttcaggtgactataaataaattgtactaattaggaaggtatgaatcataaacaccattatacttactgtaatgtgtaaacaagtgaattgtgctgttacacacatacactttgaaatacctgcaggtgatcggagctgtggggttcatgaaccagaggctggaaattccaaaggacactgatcctgattggatctcattaatagagagctgttggcacaggtaaattaacatattgaacattgcataatccttgctaaagaatacaacctttcattatcacggttctccttgatttagatgttcaacataagtcacagctaacagtgacattattttgcgttggtatttctgtttatcccacactgcagcgatacaaagctgagacccacattccaagaactgctggagaaactacgagacctgcaaagaaagtatatgatacagagaaactaagtgacctcccaagaaagaattcaatacagttccaagcgactcgtgctgcgttactttacaaccctctcctcaaggagaataatgcaaaacaaagttgacatatatctcttatgcttatttgttccttgaggcaccgcttcaagactcaaagactgttcataaaaacaaagaaagatcgagaattgatctgcttttagcagcaacgagtggaaccatgatatggtggggtgcacatgtcttccatcactaaacaaggttatggcgtgggggatgtcatttctttctaatgatgcaagcgtgatcttgaggcctcagattgtttggtttgactttgtcaaacagaaacagagtgacaagatggagctgctttagaaatctgcacggtctaaccttcctgcagtgaagtacatggaatacgcagtccaagtacacgctctttaaagcaaacaacctcgtactcaacgtcaacgagctattatatatctcttcttgaaccttctagcaagtagtaggatgttcactaagcaagagattggttatcgcagcgggctcttcctcctcgctagatccatcgggtaactctcctaaccggacacattcatcttgttcatgaagcaatttgaatttgttagatccacgaatataaatggtcgcaggcagcagacattcgacaaaaaagagaccgaaagcagccattgtacacgagtgggaagatgtcttatactccaaccgatacctatttgtgttttcgtttgcgatttccccataaccaccaccacccc

SEQ ID NO: 1276 - DNA, 63767 bp, Arabidopsis thaliana
ttttaatcatcacgagttgtttcttttttgtcctcacaagtttacatttcccttagatttctaaaggctactcacacatacagtatatcaaaacctgccatacttaattccatattgattcacaatttattttaactgatttgtcaaatgacaacattatcattaaatcatagaacttactccatatagctttataacaacaaatgtatctgacaactttgttgtatgacaaagcacaacataaaacaaatcttattgctactacaacttaatccctacttcctcccagattcatatgtctgagatgagactttatttaaaagcttctgaggccaaaagatacccacttcccggctaagtaaaatgtgaacataaagaaaacacagaagatgcaccaatggagaaatggttccactgaaacgctgaccttacaaccgtgagctggcttgtttcacgggagcgctctgtaatacaaatggaagaacaatcaggaatctgagttacattgagtcaactatgagaggtaaactgggcaagattagatagatggtcacgctagtatgttgattatgtattataaaccaagctgaaagagattatctttattgcaatccaaaagaaactgaaaattacgaactcaccaaaagaactcctttagatcccctctcagccaaaaaagcacaaggcttgaagaattcaccataagccttcgaccactcatccagcctcgagtaaatgtatttcgatccgatggaatcagcccagaacatgattcctcctctgttccacaagagatttagattgaaaccaaaatgagtcaaagagaatttgataaggatctcggagttccagcatatatctcattacaacactgacctgtaaggtggaaaacccattcccattatgccagcaatgtcaaggtctgctgctttgacagcgataccttcagcaaaaaccctacacgcctcgtttactactgggaagaatgtcatttcaataatgtccttctccgacaaattcgccaactgtatgcacaacaaccagttagattccgaaaagaatagtgagttcctttcaaatgcaaatgacaaactttgctaaatttttggacagagggataccttagggtcaagctttactccagatatgcttcttgccttttcgatatatttctttagctcaggatcaggtttcgccttgcgcttatcatcatacaaatagaaacctttgcgagtggcttcacctgaaatcaacaggaaatccaacataatttagaagaaatgttaaatcaaaaagcagtagctagcactcttttcacacataccagctctcttgtcctcttgcataagtggaataatcattgatttgtaagtccgttctgagaagttctcgataaactgcgttgcggttgcaatcgccacaccaaatccaaccaggtcacacagtctgctcgttcatataagcaacaaaagtatagttaacagatgatgcgtgtgaatgacatggatttttacaatgcgatatacctgaagggacccattggcattccaaacttgctgattgccctgtcgattagatatggatctgctccacactcaacaaggaacatagctgcctgtgtgtaagggaagaacatcctattcactgcaaaccctgtgcagtttcccaccacaactggtgttttcttaatcttcttcccaacatctaacaggtcaacaattacttgggcagaggtatgattggtccgaactatttcaagtagcggcatgatatgtgctggactgcatcagaaaaatgaaggtacatgattatgtgtggagtgagtaaaaccactctgggcataagattttcactaaattcatctaaacgccaaaggatatatgtaatcacctgaaaaaatgtgctccaacaattcgatcctgagacttggtccgctccccaattttgttcaagtcaatggtcgatgtgttgctagcaaggatacaatgctgaggacagtatttctccagatcagcaaaaatttgttgcttcaaagatatattctcaataacagcctgttcaagccaccaaaaagacatcataagaaatcaattcacttagatcatgtaacccaataaaaaaacaacacttcagcttgttatgttcatccttacctcaatgaccatgtccacatctctaaagctttcataatcaagagaacccttaaggagagacatggttttctcaaacttttcctgagacatgcttcccttccttacacggctctggagattagctgatccaattatgaaattagtcagatcaagctattgcaattcattggtatgcaatgtatggaactccaccctcacctttaactctgccaattccagcctccaggaatttctcatttacctccttgagaatcactggatagttacttaggatcaacgcagtagctattccagatcccatcaacccgcctccaattatggctaccttcttaatcttccttggcaccaacccacgatcagtaactccaggaacctgtccatacaatagattagagggaaagctttcatgcaactagttaaatccttgtaaagaaaaagaaaaagccagaggtttagtggcacataagtccaaattatatgactgcataaagactcacagaccttagcagttcctcgctgagaaaagaagacgtggatcaagcctttggtggtatccagttttaccacttgtgaggcgacttcagcttcctgtaagtaacaatgtggtggaaattcatattgatcattagtcggggagaaaaggttaaagaactgacatactatgaagcgaagaaagataggtatcataccttttctaaaccagcccttggaccagaaacaatacctacttcaatagcgtcaaggcacattaaagggtgtttcatattgggggcacgcttgagtgtctgtgccttggcaaacgtcagtatctcccttgcctctccaagaggaggtaacttatcagtcttggaaacactagatacccatggttttctcctcccgactatgtcaagggcccagcgacgagcagtggttactaactccgcaggtggcaccacagcatcaataagacccaaagaatgaccttcctcagctttaactggcttagatgtctatatgtttcaacaaaagagatgctattacactttaaccaaggcacgctaatgctaccataagaataaggcactgacataccaaaatcatttcaagggctttggtgagaccaacaagacgcgggagacgctgcgttcctacatcaatccaaaggagtataattagcattataaacgaaagtgacttgactcattcaacaaaaaaaatgaaacgaagatcctcttcccatcctcagctcagtattatgcattgagaatgccttgacttctccacgagttttaaaccatatattgatcagagaattcaaggacttcacagtcagcgaagttgaatagatacctccaaaaccaggaataacaccaagttgcagctcaggcaagcctaactgtgcagcaggagctgatatcctagcatgacaagcctggaaacaaaccatacaactgtatcaccatccttcctcctcaaaaggatttctcgtgaaggtaataaataacatagaaactcataccatagcaagttctaatcctcctcccaaggcaagtccatcaatggcagcgacagacggtttcctagcagctaaatccaaggaaagaaatcaaatccctcagcaacacaacttacacaagtattccataaatcaaataaagtgggtttaagtagaaagatcaccttcaagcaagtcggttatgatgtcaatcgaaatgtaaccagcctttggctctttgactgagaaaattcataacaccagtatacgttactaactagatcaacacataccacactgattcaataaccaaagatacaaaagagacagaaacataccattccccttctgcatttcaccaaaaccagatatatcaaagccaccagagaacctcccctttgcacctgtagttaaataaaaaggaacacaaaagccattaccagatcatctccaaagttttcataaaaaatgttgtgtttttagcgaggaagagaatgatctccagaaataccagtaataacaatagctttaacatcattcctgctcaaggcctcctcgtaattacttttgagattgtatagcactgtacacaaatatccaaaaacagagtcacatacaaagaaaattcacataaacagatcataaattcgatcggaagctcaattacaatcggcgatatttacaaaaccaaatcacgaagcgaaattgacctaaatctgaagaggtaaaatccagtaaattccggatcataaaaataaaatgaatctgagagtacgtaccgtcgaaggatagagaattgacgggaggattgatgagtgttatgacggcaacgccatcgccaccaacttccatcaccgtcttccccttggttcgtgaatccattttcgagcttcgttgagattttgcgagtcaaaattttcggaattaatgaaaaagagaggagacgtgagaaatcagatgattatataattgcaaaagatgatgacgtcagtgataatatggtagagtggcacactcctcaaagcaacggtactttgataatgttttcgatatgtgaatttttatttgttattcgtatccaatttatgtataagttgaattaatcacgaattaggaacaaaatatttgcatttaaactctgcggatttattactaataaatatgtttggctggtcatagtcctgcgactaccaaacttggcggatcttatcttgatactacggatttgtaactaagcgaccctatataggattttacagttgtaaataaactttactagaaagagtatctctttttttttttaacattattagttttttttttttgcgatttatttatgacatataatcgatcatgctgaatattatatcttgtaatatatgttaattctaccatgacatccgttttttgtttaatcagattaaaaaacaaatgtaaatgcaatcaatagttttagacaagtattcaaaccataacttgttttttattctctctatttatggtccggtgaaatatcttttcacatgactaagtatcaactttcatacagttaaccataacagtaataaaacgtctaaaacttaagacttcactaacaatgatggatttgcttaaaacttaaaggacgtaaacgaatatcttccaagatcaaagacggttggcaaaactcaaaagacaaaagacgtaagttagatgtaattttgggttggtaggtagctcactttccaaagataatgttaggcgtttagtgatgaaatagattgtattttggaagtagcctcacattcacatctctaacttgtttgttcatttttaattgttcaaacttcaaagtgtaacaaagaataatcaagtgcaatcttatgttggttaaggttatctttcttgctttaatgaattctgtctatgagaaaagtgtgtccactttgtaagtctggccttttggcatttttcttttcggctttagtggatctgcttgtaaaaggctttttttgaagtcgatatatatagcccaccatctgaaggaaaaaaaaaaagtgatgtacatgaggatacgcgtgtaccgttgatcctctccgtgatattgctgatgtggcatagataagccaatccgatagttttttttctctttttcttttggtactaatccaaatagttattaatactaatcagtaccttagtcttaatccggatactcgaacagaaacaaacacacgggtacgtaacatttatctttttaagctctcttcttagaaacatcttccatcaactcaatctgtttgtctatttcttctcccttgtactgttttttgttttttaccaaagaccaaccgttcataacaatgatcgcgcgacggatctggcgaagccaccggtttctccgcccattcagctcgtcatctgtttgctctccgccgttccgggtaccggagtatctttctcagtcgtcttcctctccggcgtcgcgcccattctttgttcaccctcccactgtatgtttcttctcaccaaatttccttcctttttcagttttttttttcaaattaattttgaggcatgacattagcttccgagaagctcttctaggcggaaaaagaaacatcgaaactgtataaatttagaaagaaaataaatttatcagagagacttaaacttggaaaactctgtttgcttagaatgtgtggtttttctggtaatttttggacaaaggatcaaacaagtttgtcatatttttcacagttgatgaaatggggtggaggaagtagaagctggttttcgaacgaagccatggccactgattcaaattcagggttaattgatgtgccactagctcaaactggggaaggtattgctgaatgtgagcttctcaagtggtttgtcaaagaggtctctttggtttctccgctcaaagtttctttttttcaattgttctgtttcgtttcgttatgatatagacattttggtgtttttccttttgcagggagattctgtggaagagtttcagccactctgtgaagttcagagcgataaagcaactatagagatcacaagtcgttttaaagggaaagtggctctgatttcacattctccaggtgacattattaaggttagatacattttctttctttatggtgttagaggctaagtttgagcatgttactctattgtaaaccatgaacactaagagattttgacatgttaagcttttgtgttatctatatatatatgtttaaaggttctgatagatcaggtatcaaatgtttcacttttataagtacttatatgtggcaaaatctattgatgcaaggttggagagactctggttaggttggcggttgaagactcgcaggattcgcttctaaccactgatagttcagaaattgtaactctgggaggttcaaagcagggaacagaaaatcttcttggagctctctcaacgcctgcggttcgtaaccttgcaaaagaccttggcatagatatcaatgttataactggaactggtaaagatggtagagttttgaaagaggatgttctccggtttagtgaccagaaaggatttgtaacagattcagtttcttctgagcatgctgttataggaggagactcggtttccactaaagctagtagtaactttgaagataaaacagttcctctaaggtacgcctttgttggcaatttgcattgtacatgaacccatcttgtatctgaattaaccacctgaagctatatccttattctcaggggattcagccgagcaatggtcaagacaatgactatggctacaagtgtaccgcattttcattttgttgaagagataaactgcgactcacttgtggagctcaagcagttcttcaaagagaacaatacagattccaccatcaaacacacttttcttcctactttaatcaagtctctgtcaatggctctaaccaaatatcccttcgtgaatagttgcttcaacgcggaatctctcgagatcattctcaaaggtattttttttctaggaacttctcattgttgttttggttttgaggttaacatccttggattattagatatagatatattcttggttacttgcaggttcacataatattggagttgcaatggccactgaacatggccttgtcgttcctaatataaagaatgttcagtcattatctctgctagagataaccaaagagctgtcccggttacaacatttggcagcaaacaacaaacttaaccccgaggatgtgactggtggaaccataactctgagtaacattggagcaattggtggtaaattcggatcccctcttttaaacttaccggaagttgcaatcatcgctcttggaagaatcgagaaagttccaaaattctcaaaagaaggaactgtctatcctgcatcgataatgatggtaaaagctattcttgttcattcatttcttcttagttacaagaattgttgttaataaccaaggtctgattattttgactcaggttaacattgctgcggatcatagagttctagatggggcaacggtagctcggttttgctgccagtggaaagagtatgtcgagaaaccggagctgctgatgcttcaaatgagataagaaggaaaggttcatgtttatttgtgaatcattatgtatgaaaccttcatgttcgaataagatcaagaactgagctagcagttgtaaactaaacaagaaagtaaaagtcatatctaataactcaacacaaaactgcaacatatgaacactagctaacctcataagtcttaacacggaacgttttgtaaataatgaaaatgtatttatgaagacgacacgttaatttcttaaaaggatcaacattcgtatctgtgtactaaggactaacgtctcttttcaagacattaataataaaggagtcgtgcaagacaaaggaatatccactcttaccggttccagtcactttcgaccatcacgacttgaaaaatccaaataatgattattcagaagttgttaaatacaagcatgcatgtatctattatctataaaaagaggcaactaaattgattcacgtgagatagatgaaactttgcagctttcaccaaattttgaaaagatagatgaaacatcacatttttctattgaatatttttccccgaccaaaaagaaaagttaaattgttctttttgtaaggagttgttaactttttacgtgaccaagtaaattggggaagaagagatagaaatcctctgtggctgctccatgttaagctctcgtaagctcagataaggaatcgccacgtcacctttcctcgccggcgtcaatgttcccgctataggtcccgacgaaggtttactcgttgttgtacgatacggtgtgttcgacccacttattagactctccgttgcgtaaatcggacccgacattgacatggacccggttacggagcgaaagttcctgaccctacgatcttcgttcacgccgacggtggagattggccatttccgccatttgaaaaaagggagagctttcttccaccaacaccgtttcttcttcttgtcgttgtgcattgtggaccgggtcgggttgtcttttgaaatgggtttctggatcttgaattgaagaccgttcgtgtatgattttgatgacgtttctctcttatgcttcctcgcttcttccataacctttccattaagacatcagaaacagagccaaaattactcaaaaacagaatgcaaatgcagagccagatccattggatttgagttttgttgatttgaaacgaaacaaaacattagcaaaaacgtaaacatacctgaaagtagtggagttggggatcgaagccatagtcgctgaaatgttgagagttggagatggagaagattggggaaatgtttgacatttttcttacgaggtcgtttgttgtttaatggaggaaaaatgggtgaaagagttttgtgaagaagagatagaagagaatggagatggccgttgagacttgaaagagagtgtggggttcactcaaattcaatgcaacgagagtcgtctattctgtcattttcaaacaacccgtatttttctaagttttttttttttttttacttttataaatggcccatacatgataattcatctccttttcaattccttttttagtcattacaattttatcattcgtctttacatttcataccacaaaaaagaaaaattaatcaatcatatcatattccagtacctaacgaataactaattatacgtctatatttaacaatgcgaaaataactctccatataacaataagcagaaaaagacacgtaaatggtacttactgcatcgtacgctataaagtcatggttttagttcccgaagcgaggaatgttaatatgttattgttttcaccattcaaacttcaaagacgaagggattcaatattggatgtagccaggcgctctcaatctcgaaggacgatacatgtgcatcaccatcacgtgaatctatataacacatgcatctcctaaatgttttaattaattaaaaactcgtcagtatttatttatattatccaattaaaaggcattcagatattataagtaatcgtaataagtgccttattcgtgtaacattgagatatcgataggccttttctattctatataatcagggttttgatcagcttccacactatgacataatcaattaatcattcttcaaacagtttttagttttaaaacatttacaaattaaatcaatttacaaaatttggaatctcctacactttagctgtatacggaacttgtgtttgtgggatccacgtatcgccacgtaagaatctgtcgccagtgtataaaagagcatcttggggcgttagtttcttaattccgggccatttaactctttgggcctgattcgatccaggcccagtattcatatgctcggcgtagtatagcgtcttgagcgcaaaatctccactccagggaagccatcccgccggatcgatgacgtcatcgatcgtcgttttcataatgattgtcctcgagaactccttccacggtcttcctaagtaagctttattcacagatttcatcggaatatacgctggatctcccgttatatggcagccatggagcaccaatcctgtcgattcacggacgttacttcgtccctgagctgtaaccatacacgtttgacctttgttaggttttcggacgacgattttacagttctggaggatgcatttcgcgtctccgaagatgaaatcgacggtgcccgagactgtgcagtcacggtagaattgccggtgagagtgaacgtataacgtgtcttggtgcccgtcgatttgacagctgtggaatacggcgtaatcagccgagactcttaacgccaccgcttgtcctccttctggtccagctgtgttctcgattccgatgttcttcgctgtgaagtggtcgccttcgattgctgcgaaacaataatttggtaatgtttagaatctctctttgtggacttttagagtttggagattgaaactcactgattgtggctgttaggaaggtcttgaccttgccgataccgaaattgagactaccggtgattagagtcttgtttggcccatcgccgatgaaagttacgtgaggcattttcttggtgaccgtaactttctccttgtagataccttctttgatgtgaatgatgaatggcactttgttgcctttaggcacagcatttagagcatcggtgatagtcttgaactgtccagttccgtcttgagccaccacggcattagccttcacaggtccaggtcctcctccttgagctgccatgagccgtcgtgcctctggtccaacccaagttgggatactatcttctgtagacagaagctttctcgcgtactttgctaaagctccggttagtcctggtttgaagcatcacattactgtccaatgattctgactggttggttatggattagtttggagatctctttagtaaattgaaaagatacctgtaaggttggagtttgggataagagtggagattctagtaaccatggcaaggctattgctactaagctctcttgatgttttgaagatcttgagcatgtcttgcataagattagacttaatttccccaaaggaatccatacatgtttgctggaatgcgatggagccacttagccaaacccgtagatcctcaacaaagacctcgatctgatcaaccgagaatccatgatccatacacttcttcaagtcatcgatagcatcaatcatcagcttctcacacagctcgaaagcaccctttgcttctgggttcttgtcagccttggctttgatatctccagaggccttttccaggctttcgttgatggatttgatagtgaccttgaagccgagtttgatgaggtcgacagggtcatcggaatcgggagaagcacccattaagctgttaacacaagtgtctttgaagtcagtgggtgcacaaactgcttgaaccgctttggtggtttttctgatatgattttcatcgtctttgggagagtgtttagacgttacaacggctacagagacaaccatgatgactagaaaaccggagacactaccggcgacgatgaatttcttcttcttgtcaccatcagaacccattttttctgtttcctatatattcacaaaaattctaaaggtcgaaaaaggtatctttgctcaagtattttttcctacttttctaatatgattttctacacatgttaaaaatggagcagatggggcctataactgtggctataactatgaggccccttctagctctgaatttttttattttttttttagggggaagggatcttttcgtgtttggtatacacaatgcttagaacaaatgaatcgaaagatcgatggggttaatatagaaaagagttgtaatactatttctggggttttaggaaagaacatgaggctatgttacattttctgtctttagtaaggtttttttttcccaatctaaaatgatctggtttccggattttatgatagcctatgaatagtaagtatggtcatgaatttgtgggatgaagtgtgagatacatattaatcgtaatcttgatgattttcttaagagaatatgtgattcgaatgattcttactaaatgggggaaattgttgatttagagatgaagaataagggtttagtactgttgaatgtcacagtgcaaatcatcatccctgttaactactagtgaagtagtgatgtttaataatgtaccaaaaacccttgtaaattttaaagcccacgaacctgctttctaattctaaaaaaaggcgggtgtaattcgggcaaggtccgtttgtacaacgacgtagttatctatttctcccccaaaattcacaaacacaaccctaatttctcatatcgcgccatcggaactgtgctaaattacacgttccgacacataattaatgtaggattctttcttctgctttcctcagtttcgtccgaaagaggcaaaattcaaatcgaattctcgaagaagctcatctgcattaagtttgaaagatctcttcggaagaagtaataatgtctctgacatgcgtaaatatgtcggaggatgtctggttgacttgcctcactcacgcattatccaccgagaccgaagaaatcatgggtctccttctcggcgacatcgaggttcacactatttcttcatcttctcttcgtctacgctttacttttactctgcagcgaatgtttcatcttacttggattcgatattactctaatttaattgaattcagtccaaaagtttggctttttgccgctctgtttttgatgatattttaaggcttgaacaattcccagataatcaaaatcaatcgctgactttcaaatcttgtttgtggtattggaaattgacttagtactcaaagaacggcgaaagtgccacagctatgatctggggagcatcgcctcagccacgatctgatcggcagaaggatcgagttgaaaccaatcctgaacaattggctgctgcttctgctcaggctgatatatcctttttgtaaacttgctattttcagattgatggtctctatgtgtggttcttcttgtgtcttttagatatgatggtttggttaaaacaagagtgttttgttgtcttccttaactaacctctctgacacagaatgacgatatcaacgggcagaactacacgggtcattggatggtaccactcccatcctcatattaccgttcttccttcccatgtcggtatgtatcatcatcattgtaactttttatgattttttttatgatcttgttcctcatatttatgtcctgcagatgttcggacacaagctatgtatcagcttttagattctggttttattggcctcatattttcctgttttagtgaagatgctaacaaggttggtatttgctttctatgagtggattagcaagttgaaacttttcaggattacttctcctgtttgctgaactggctttgttgatgtttccaggttggtagaatccaagttatcgctttccagtcttctgatggaaagccgaatagtattcctaaatcaatgagcctggttcttgctaataaagattctgtcatcgatatagaatcttcatctagttcttcggactcgatataccagcgatcctcttcttctaagcccgagctagacacaattgatactgctacaacttccggatctaaggtctctttttccaaatgctatatagcattttactcgagcttaatgaaagttgacaaattgtaatatctgcatcattattcaaaattctcaagacaatcatggtactatttctgactgaaccattggctgcaatgtatatacacattgatgtttgagttttgtatgtgtatgtggctgactagggtggaggacgggtttcagattttgggcctttctttacaaacaatattgaggccaatatcaccggcagagatgaaactcacaaatcaggcaatctcagcagcacaactataggaattgactcgatggacatgtctgaaagtatgcaagaggcaatgctccgttcaaatttagataccaggtatttctcaacatacgcttctaggcttatgaacactacaatttttcaattacgtaattactaagcttaggaatttacgtgcagtggtgcggggtatgttagaaaagaagtcccacttcatgttttgccaacttcatcccttcttccagtcaattcacctttagcatcttttaaaagcctgcaacgagtactgtacgaggaggaacgagcagcgtactaccaatcagtgcagcaaaacatgaggttttcaattaatctttttcataccctaatcatagagattttagtgctaaagctccttctgtttcttctctagagatgggcgagttcatcctcttgctttcattcacaacacatcaacatatcaagcctccatgtgcaagttgatcgaatactggttagtgaagcgtgttaaaacatttgatacgtggttttgtcattcgttatatgaacttcatgcttttgcagcttgagtcctgccattaacgcacttcaagataggcagaaggagaacaagatccgggtatgtgtctcctcataaataaagctctctcatggatgatgcttttttttggttgggtctaaaacctgttgtgtgttgtgcagttagcaatgctgatggatgaagctgaggttttggaggcacaaaaacttaaaggagcagagacaagccggagaccatctcatctggttcacggttctggcagccgaagcagaagaggatcgtagaaagacctgcaactaaagacacatgcccgtcttctttgtgtatatttctatttggacatttgttttcttacattgtattattttgaccagactccatcgctttgttgttgtttagaatctgatccacttttggaagaaccaaaaaagaagaatgagaagaacattatttttgtgactttagtttaagatacgttttcgtagtaagatttaatattataaagtattaacattatgaaacagataagatctagtagtaaatttattcagatttactgtttgtactaaaagacccaagaacaactttattaatgatgtaaaaaaaaaaaactgatatcttattctgagaatcgaattcgcatatcccaaaacgctttaaagctttgaagctctttgcagttctaacttgccaatggtcccaagatgaacctcatcaggtccatcagcaatcctcagtgttctagctgtagcccacaaatgcgctaaaactgtgtccgaggatacaccggctgctccatgaacttgtattgccgtgtctagtaccttcaatgccatgtttggagctgcaacctgagtaccaaaatgattttgcttcttcaagatctgtatttgtcaatttctggcgcaaaacaaatgtcaccaaaatacaacagtttttaccttggccattgcgagaattcctcgagcttttttgtttccaaatttatcaagatgatcagcagcttctagaaccaacaatcgggttccttctagctctacccgtaactgtatcagacaaccactcatataagaagaacataagaagcaattgggagataaaagcagtgtcgtttacctttgcaagatcagagacgaaagaaccgtgctgcgcaatgaacttcccaaaagtttttctactcagagctctttgagccattagctccattccacgctctgctgcacctattagtctcatgcaatggtgcagtcttccagggcctaacctaccctaatataacaaacaacaacgcaagcaaccgataaatacacaatccttacactctttgttactgcaagccctgaatctgtgaatcttttgtagtattacctgagcaatctcgaatcctcggccttctccaaggagaatgttcttcgccgggacaaccacattttcaaaagaaatttcagcatgtccatgaggtgcgtcatcaaaaccaaacactgtgagaggcctcttcacacttatacctggagtccgcatgtccactaatatcatagactgctgcttatgttttggggcgttgaaatcagtttttccctatatagcacagatatgaattcatgtgtgtgtatttacatatatagatagattaagagagaaatagaacaaggaaagagaactaaccatgagaataaggactctgcacctgggatccatagctccacttgtccaccattttgtgccattaatgacgtatgaatcaccttgtctatatcaacatcagaattagctataaggaacattgcggactgagtctcattttttgggagttaccagtagaaaaattgaagatgacatatagctttcaaatgttttcatttttttgttcagttgagaattcgaatgaaagtagatatcaatataaagaaaatctcttaccttcggatagagcattcaatattggttgcatcagacgatgcaacttgtggctcagtcatagcaaatccagaacgaattcttccctcgagcaacggaataagccattcagaaatttgttctttgttaccataccgcagtatcacctacaagatagtacagattatataaatacaagtaacaagcaatgagacaactcttggaacggtaaacaacatcaggcttttatacctccatgtttccagtatctggtgcaccacagttaaacacctgtggagcccaaacagaacgacccatgatctcacaaaggtaaccatactccaggttcgtgaggccctcaccaaacaattgatcaaaagacttgcccgagaggttatgtttattctcggtagccgccagttctcttctagctctagcagcactatctacctgcaagaaccaagaatcaataagtacagtctcaatcagggtaaaagtaataagagatttgtagcgaaaaagatgcatacaggaacaaataagttccataggccttctctctttgccatttcctttaacttttcctcctgagggtgaacggtccatcgcatatctgattgagcaagtttggagaactcgttttccattgggtagatatgagtttccataaacttgatcaacttctgccttaactccaatacttttctgttggggatgaatctcccgcttccatccacaaggctttcatacgacggagacacgtctctttgaactgcatccatatataagaaatgtaaaataaacagttatccttaacaaacttgaatctcaaagaggtcgattaccagatggagggtgttctggaagaacattttcacgtgcaatataacccaaggcagactctacaagctcattagcttgaacccctgtatttcgcgctctttcaccggcagaagcattcccctgcatgatcaacacaatgtcaatggctctacaactgcataataaagaatcttagaattcaaaaatatgcccggggaataccattaaccatctactgtacacccctgtgtagattgaagcagcccgaaataaggagaacgctacgtagaacttccagtttgcagcaggccatggttttccctaaagttcatttgccaatatgtcactacaacagaaattgagaaaatataggcaatgtacaaggaacacctgacttgattccttttaaagactacatgttgttgcaggacaataccgatgcagaacagtattctaagagaaattctggcatcgaaagcattccttctggaagcccagtagtttcaaaaccttcactaacatgctccttatcgagctgaacattcacaatgtaatgctgccaacacaaatgaactgtatatcagagcaggaagcaaagaaaactgctttatgagtacaatacaacaaacaagaataggttattaccatgcagctgtatgcaacatcacacatttggttcccaagcgtggacaattcccagtcaattattccaataactcgatcctacagtttaagatattttcagttaagtctccgagactatccaaggatcagaaaacaaaagatcttgaaagtattaagacctcagaaggatgaaaaacgagattgtcaatgcgaaagtctccatggacaaggcctgatgttgctccagttgaatcttccgcggggatgtttttgcgtaaccaatcaacaagctcaaacatctttggattcctttcaggtttaccttcacttgttgaagccaaatattgtttgaaccacctatctatctgaaatggaggtatccaaaagaaaaaactttagcaagagcatataagcattaagagaacatcaaactagtgagtagtgatttggaaattcaccagccccaaataaagaacaaacctgtcttttgcagtaattgcctcgccgaccatatttctcaagaccaatggcatccacatcagcagagtgaagagatgccaaggctttggcggttgcacgatagatcgcatttctcctttcaggtgctacattctaaatcaaaaccgatgaaacacacacaaatttacacctttcgtttacaatgagtcacatctcaagctaaaaaaaccgtacatacacattcacataacagagaatatcttaccggcaactttggatcaatgaaaatacgtccttccataaactccataatgtaaaaagcagtcccaatgacagcagggtcagtgcataagcagaagactttaggaacaggaacctgtgtatgttcacctaaagcccgaagcacctacataaaccaaccaccatcaaagtattaagcaaaaaaagcatctacctttagttgataccgtatctcttataagcagcatcacaaaaagttacaatgattctgcatttcaaaacggtactagaaacaacaaaatttcatcttcttcaaaaatcgagtatgaacagttacaatgaattttacagaggtaaagattattaattgattgatacctgaaactctcgatcaacagcatgagcagattgaagaagcttgccaggaggcttcttcctcaaaacgtatcgtttcaaggaactccctgagccaacctctatcagaaacgttggattcgactgcccatgtccgaactgtatgtaaaccaaaccaaaacaaaacacagtcagataaaagtttctttcttaccggagaaaaaacctcggcgattggaaaacatacctgtgagactttgaattgggaagggttggtcggaaagccagagacgttgtcggcggcaaaacgaaacaaggcatcgtgatcgaaacggtgagctgattggatacgtgtcacaagatcgcccgtgctgcttcccatgatgttccttcactctcctctatctcgctctgctcctcagagattcatcaacaagaatagctctctaaaacacaaatacacgcattcataccaacaattccatttacggaaagtcgcataacctttcttttggataattttctttttacttttgaccttacagcaatttcagaaatgtttatctacttttcttatttttggagagataattctatgttttctttttttataaatagtaaatacagtaaccattttgattttgataatcatcgttattatcgtcattgtgattttatatgcatccaaaaaaagccaaagataattactaattactaaccatatataggttggaaaagttatccatgaattaacttgatggacattttgctaactcaaatcaaaattttagattaggtgatttgacttaggacgtcatattcacattaagaaagctaatacaaaatgaatacgttttatagctaacgaggacgaaattttctttctgaaaacacttaagaatgaacaaacaatttgacaagcgataattgaaacatttttttaacactgaaagtgtttcaattaggagtgttgaagtatttgacaagaagatttaaagtatttttctgttgggaaacttttaactactaaactaaggaatttaatgtagagaaattttttaatagcccatctaaaaagtataaatcaaaggcccactaagcccatatagtttctcaaagcttctgcaaagagaaggaccgaagaagaacagaagccgaaaccctcaccggcgatggctcttatcagcacacggcgaacattatcgacactcctaaacaaaaccctctcttcctctacttcatattcttcttcatttcctacgctctcttctcgttctcgattcgccatgcctctaattgaaaaggtttcctcttcccgaaccagcctgggcccgtgttacatctcgacccgacccaagacatccgggtccggatactcgccgctgaatgatccttcgccgaattggagcaaccgtccgccgaaggagacgattcttcttgatgggtgcgattatgagcactggctcatcgtcatggagttcactgatcctaaacctactgaagaagagatgatcaattcttatgtcaaaaccttaacttccgtccttggctggcaagttccttttcatttgattttgactctcaaatgttttcttgtgcatttggggattgacggatttgcattttgtgggtaataatggttaaactatagtgaggaagaggccaagaagaagatttactctgtttgtacttcgacctacactggctttggtgctttgatctctgaagagctctcttgcaaagtcaaaggtatcaacttctccatatttgcaattaggtttttaagccttttttgctctgacatagcttttctagttgtttacttatgatgttgagatttatcgtaaaaggctttctctgtttggtactgctctgttcaacagctaggaggaaacttctcttgatctttgttttatcgcagttattgtctgtctctagtactataaaatgagaacatattttactgtttgagaaatctgatctagagttgtgtgattcattagcattgcctggtgttctctgggtgctgccggattcctatctcgatgtaccaaacaaagactacggaggtgtgtaacgtttgtagattttgtctgaatgattgggtactgagatatggttcttaatactgataccatctgtctttggctctcatgttcaggtgacttgtacgttgaaggaaaggtcatacccagaccacagtacaggttcacggaacagcgtcatactagaccccgtcctaggccaaggtatgataggcgccgtgagacaatgcaggttgagaggagagagccatccatgggtcttcattctccagtaaatccgggagagttcaacaagcccagtgcttaatattaaacatgaacaatgcattatgtaatggatggagtttattaggattatggtatttacatgcttgtcttaaacactcatgtgagagacttttcagtttttatccacttaatcaaacaaatcaatcatcattcatgtctctaatgatgactaaacactactctaaacagaacaaattataaaaatctaatgtgaacttgcgaaggagaaattaaataaatatgtacaatgtaatatatatacacacgagagatcatatgatgtaattggaaccgagattaagaatacttttaaccaggaatcatcaccacgaccacgaatttgtcagcataccggagataatgcaatgttcaacttctccctttcaccgtcggtcacgatcctcactatcctcttgaacgcaaagtgcacacaattagacaacgcgatccagcaaatcacttcatacacaaattccatcgctggatctgaccaagacgaaaacgaagacccatcccaattatccctcccgaaaccaccgccgccgccgccgtagttccatccctttccgcctccatcgtttcctccgcctccaaatccaaatggaccgtcgctaccaccgaaatcaccttctaacagaaaacgaccaaaatctcctgcgtcatctccatctccaccaaacgaaactcgcctggttcgtcgctttttacggatccggcgaattgtcttataagagctagatctgaccggtggaggagcaattgcatcgacggggaaaataatcgccgatgcttgaacgattcctccaccgggagattgatgatcaacaacggaatcggcgaaagaaatgtgattggccaaatccaacctttgaagaagagatttcccaaacgcgataccttgcttagccgtgcaaactgtgactgtatctgcgatcaaagagaactccatgatgatctacaaatccgacgacgacgacgaccttgttcgaattctcttttttccctaaaatccacgaaatagttttggattagggatttttacaacattgccggcgaatttgggtaatgacgggaaataaatcaggaagctgattcggatccgaaggaggcggataaattgtacacgtaactgatttgcgcgttgaatagagaagccacgtgtcttgcagtattcacacgtgagtcgcacgcaagaagggtccattaatacgtgaaagcccaaagttatgggttgggctatataattcattgaagagttttcgtatcacatttctgaaaatatacgggttctattcataaatataaggaaatatgtgtcaaaaaagcaatattgtgggagcagaagatgtgcttgttcatgtgatcatttctcaaggaaatttttctacatggagtaaatcgagagattataacaacgtcgatttaaattatatgtgatttcttagaaagaaatcgatggcatttcatatgtttaaatgttcttacgaggttgtttggtatgccttctctgaaattcacaccaaaaaaaaaatgaagtaaaatttatagcataaatggctaaacatttatcgtcggtccataacctaatccttctgcagattcatcatcgacaatttttatgacaaatctcacgtgctcactgacatttgttttttcagactttaagagcttccaaactttgttttttcatacattcgttaaatatgtttcagaaataaaagttcaggaagtaattgacattttttattgataatctagacgttagcattcccatgtgattattactttcgggtgaccaattacaaccgctatgtttgacttaatactgattttgagcagtaatgaatgaattaggtttcgaatatattactgaaatttgcttggcttcgttacaagaagtcaattacaagtaaaactttgtagttcaaatattaatttccatgacataatttaaagtactaaagtgtttttgagtttttccttatagatcaacgcgcatgtaatacatttggtacatacatacttagcttatgtccaaagccaaactactgtttttgttgtctcaagttatagtcaaacatcaaacaccagaaaacaaatcacggaatccgatcggaatccaattttcaaagcaaagctagatatatttataatgttgttacatattttgtctctagacaaatacatactcctatacaattagacttccgaggttttggattcaatctatgcaaaatattgtgctaaaaaaacaatataaaattctctctgcttcaatatttcaactttcatgtaaaaaattatctaaggaaaaataaaactgttccatgtaaactgtaaaaagagaagaatagttggtagtcgcttcatctactttgattgtttcacatttgtcatttgatttcaaataaaggcataaagtgtttgtttacttctcttctatatatgtatcacaagttccgtgtttcactattaaattctctacatttaacagctatctaacatcgtagatgatttatcaagtactttatttttttaaaaaatctttatcatatagtattagaaaacttcacctaaccactcatcatatatgacaatctactatccacgacatgcaaccttctcaaagtaatttatgtttgcatatgtaattaccgttatatttatttcgcttaacaacgtcaaagaaaacaaagaatcgacatttatgtcggtagaaaaaataatacagccgttttgttcagtttacaaattacaacaactaaagtagcaattttatttattttatatcttaattactcaattctattgaatattgagatttttataaaactttatttgaatatttgcagtaaaagcgagttacacaacgtggataaacggctaaatctaccgtaattattttctttaactcattagttttactcgttcttcgtgttgatttttttatttgaagaatattggatttaataatcataaatggatttaatttaagtttctctctctttctcttccaatttaaaatgggtctatcccgcaaagtctgcctgccttctctcaacgtcttctctctctttctgttctactcactccttccatattttgttttgccttcacctccattgtcctggaaacttttgttgcgatgggtaagatccgacccggaccggatccaaaagcggcattggtctcagatattttagcgctatcgagatcaccaatctcttgcattcacatcaatcgcatctcatccggttcatgtttcatcgactggtatctcattctcggtgtatgtatatgttctttcttttctttcttttttctcaatttatctaaataagattggacgaactttttattgcgttttattcaagttagaaaaataaagaaaaagagaacattatgaacaaaataacagattcaggaagatgcagaggtgaaggtcatacgtaaacgatatcacaaattaggtctgattctatttcatgttacgttatcaaatattcaaatttgacttttgattagctataatttttttgttatggtataaatctgagctaataacatgctttatttttgttcagctttgaaggttcatcccgataaaaacaatcacccaaaagcagatattgcttttaagctcatccacgaggtcagctatgttattttcttatctcatttaaaataaaataaaaaatcctagcattcttaacgtgaatatatttatcattttctcacgagagacaataattcaatataaaatgtacgtgtgtgtgtgtgtggacatgaatcgtacgcttaattctagagcatcatcatgtgctatccatgaattcattcattttctcaatacaactaatattagggagtagggatggtcctttaaccggttttggcgccccatataggcttatttatgtctttccgacgaaacaaagagaagaagcttcaacatagaccgacgaaataacatttgtctaaaatgcagccgagtctcacacaaatccaaagaaaaccgtaatgattctaaaccgaaccggttctgtcaaaccctcaaggacattagggacaagttcagagaagagaacatggtgatagagagatgtctaaaaaccaatagtgcattcttcatggggaaccgaaccaatgaaaccccgccggtttatggtataccaaagcaaaaccggattaataaggagtcgcctgtttttaatccatcggattataggttatggggttatccacatgtgagaaatcgggtgttcgactacaacttgtcgtccgattggaatatgttcacgagaagcagatccacttgtgttcactcatcgtgatgatttagctttcggtttttaattacctttttaatttactttttcatcctagtttaaataagtgagaaaacatcaattgaattttgtagcttcattgtattctatcattttattcatattgggaaatctatcacctacaatcataatttctccttcttctttgattaacaacatgaactaaccacaactgcattacagagttatgatacaattgactacatgtcttaagttcttgttttgttgttgctatatatatcttggtttagtgctcacggctagttgcttgtcgtttaaagagaggaatcaatgcttggctattgtatccacacctgagcctctaaagagttaaacagacagattcttgtgtgacggaggatgatgcagtgatttattgcttcaagtgaacttgtactgatcgattggcagagtggtgatgggtcaaaaacattatactcagattcaacaatggcaaccggttggggtgatgatgaattgaaacattacaagaagtaagaaaaaaagggcaatgtcctggtcttagtggacaatgaccggataaaaaggttcgagataaatattaggatttaagaaacgaccacatcctttcccttatataaccgattctctcagtgtcccaacccttagctctcaaaatctgaaaaaacaaaaaaacgagacagtgatgaagtgaagatgtaataatatagtagtgtctatcaagttcttcgtgatttttgtgtttaccttccatctcacaatacgaaactagggtttagctctgctttcctgtctgtcatttttctcttcaaaagatctaacgagtttctttttgtggtcaaattgggccgcagcccgttttctttggaataatacttattggatcgaatattgttatttgtcaaaactatttttcatacagagttggaacaatactcagccctgtttgtttgattatttggcatttacatccaaatgatctatttagatgatgcatttgaataatgtttgtttgattatttagtattttatctaaatgatgcatttaaatgaatatttctttgtttgatcattttgtaattcatctacattctcattctaataaaaatgactaaaatacccattctataattttaacaaatgacaaatatttaacatcattaccaaatataattttaataaagaaatgattttacggttttggcggaaaaatatgattttacagttttggcgagaaatatgattttgtggttttggcggaaaatataattttacggttttggtggaaaaatatgataataaggttttggcggaaaaacatgattttgtagttttggcgggaaaaatacaattttacgattttggcgtgaaaatacgattttacggttttggcgggaaaatacaattttaggttttggcgggaaaaatatgattttacggttttggcgggaaaatacgattttgcggttttggcgggaaaatacgattttacggttttggcgggaaaatatgattttacggttttggcggaaaaaatatgattttgcggtttggtgggaaaatatgattttacggttttggcgagaaatatgattttgtgattttggcggaaaaacatgattttatggtttttgcgggaaaatatgattttgcggttttttggactaaatcatctccatccaaatggttcgatcaagttcatccaaatgagtttcacaaattagtctaaatttacaaagtcattcagatggaccatccaaatgattcatccaaatgatctgttaatttgtcaaaaacaaacatcatttttcatccagatgatctggatgaaaaaacaaactggaccttactatttgaaaataatactatagaattaatttaattttaattagacgaaattagaggacatgaaatgccaggctggcaaattaacgtatgattggagtgggacccatacccgccctgtcagtccacatgctccgctctactcgtcttcttcacatttactgcttccttcaatcttattctaaccatttcttctacatcttttatttttcaagtcgaatgttctatttcctattcagattatttttaaatttcattgtatctgagctttattttcttccgaaattttataatttccaatgattttctttataaaaaatcaactacataagtaattattggttcctaaaaacctatatagtagtatagattcaaaaaaaaaaaaaagggaacagatcataaaatttgcctaatctagtttttcaggacttaaaaagaatgttctcattagtaaatatgaattttcagattacttataaacatatgggtcttattttcccattagaatataagataaatatgtacattttattgactaatttagaataataatatttgaacggtgataaatctaaaagataagggaaaaacagtcagagacatatatgtaaacattttgaaaaattaatataaaaatcttaatttgagcacaaaaaatataattgaaacagaacataaaaacaaaaaaaaatatcaaacacatgccttgtctaaacaaaactacaataatattttcatattattattttgttggcaaggcacacagcttaaaacagccatattaacttatctcttggttttttcttcctcaccctctcgtcgtctcttctctctccaaagccgagaagatttgtcggcgataatacgttaccagatcccattaatcaatatgaagacatattcgacattaattgcttaaatagtgtatagtattgattatacattaatgattactattttctctcttttcccacaatcaatttctttctctatatatcttattttatattcctatttcgcattattaacaaaatcaatttatttgcgcatataaggctgtcatttcggcgtcaatcttcttccttccttatttttctttcttctaaaaattatttatttatgtttctgtaaataaaaattcgtttttttctgtcaatcatactgttttgtctcagaataaaaaaaaaaaaccttcactgttttgtgtggtgtggttacgaagaaagaactcttctccttctccttcttattctttctcttcttcttctctctctctctctctctgagtgtctggttacatttggcgcgaaaagttcttcactttatagcttttttatctctttaattatccgacagcttcgttacaaataaagatgtcagtaagtgcgttctctctttttgcttctctcttaactaccattacattacatacctcttctttctaggttgtccctttctcggaattgctcttcttcatcgtttctttaactatttacttctctatttttcatcattccgttggatcggattctaaacagtttgacaaacctggatctgtaattctaactcagattcttctgttgtagcaggtggtaacaatcttgatactggcattaaccagtgttattcccatttacgcaaacgttcacggcgccgggaaaatatgcgacgaacttggccggcgatcattgagtacaagaccacacagtgtctccattacagattttggagctgttggagatggcaaaacgctcaacactcttgcgtttcaaaacgccgttttctatcttatgtctttcgccgacaaaggtggggcccagctctatgttccgccgggacattggctcaccgggagttttagcctcaccagccacctcactctctttctcgaaaacggcgccgttatagtcgcttctcaggtatattacaatgcttctttctcattctcacatttatcccaaacttttaaatttatccaaaaaccccaaatttttacttcaaaaggatccatcgcattgggaagtggttgatcctttaccttcatacggaaggggaattgatttgcctgggaagcgatacaagagtttgatcaacggtaacaagctacatgatgttgttgtaacaggtaacaaactatgctttatacatttttatttcattttcacttgttacaatatccttcaaattataatatggttactccatccttttccttggttaggtgataatggaactatagatggtcaaggcttggtttggtgggatcggtttacttctcattccttaaagtataaccgtcctcacctcatcgagtttctttcttctgaaaatgtaattgtctccaatcttacgttcttgaatgctcctgcttattcaatctattcaatctactctaggtaagagatagttcaacactatctaggcctcaacctttttttggtttttttgaatgataaagtcttgactctaatactgtccttgtgcagccatgtatatattcataagatattggcccattcttctcctaaatctccttatacaatcggtattgtaccaggttagttgtctctacttcttctagactaaaaccctttttgttgtgtctaagcatagaagaacgaaatgtcttatgttttgttatgtttctcagattcttctgattacgtctgcatccaaaactctaccattaacgtggggtatgacgcgatttccctcaaaagcggttgggatgaatatggaattgcctattctcgtcccactgaaaatgttcatataagaaatgtgtaccttcgaggagcttctggttcctctatctcctttggcagtgaaatgtctggtggaatatctgatgtcgtggttgataacgctcatatacactactcgttaaccggcattgcctttagaaccacaaaaggcagaggtggttatatcaaagagatcgatatttcaaacatcgatatgttgagaataggtactgccattgttgctaatggtagctttggatctcaccctgatgataaatatgatgtgaatgctctcccacttgtgagtcacatcagattaagcaacatttctggagagaacattggcattgcggggaaattgtttgggatcaaagaatctccatttagctcagtgactttgtcgaatgtttctttgtcgatgagctcaggttcttctgtttcttggcaatgctcctacgtttacgggtcctcggagtcagtcattcctgaaccgtgtcccgagctgaagagagatgctgatgcttacggtagagctgcagtctagtgaaacagactgcaaaagaaaaaagaaaaaaaaagcaagaaacatttcttgggattctttgataggattcaattcatcaatcatttcatattttgtggagttagagaaggtcagattctttcctcaagtaaaccacattgtctttagatcatacatgttcctttcggttattctggtttcctatttttatgttgtttgcatattctgagataagaaatctgtacaggttcatttcttcattcatgtgtaaacaaagaaattttgtttcagcagttttccacaagccattaataataaaaaggagagatagtttcatttttccagaaattttatttgaattatctcttatcaagcttcaaagcttaatctcttggttatcagtgacttatcagttatcaatcttccaaacataacccaaaaagcggaccaaagataatacgaaaacgccaagaaaacagaatttattttggctctaaccaaaacgtactaactttttatttgagtcagcaaactttcgactccaacaacttttttactattttgaatatatgaaagtctcaatgaaaggaaagtactctgtttccggttatgcacataaaggttccaaggtacaaatgacaattatatatggatgcaactctgcatcctcttataacttacaatattttgcatcatacattgaaaccactcctaacaattccaacctgagatcctcaagtctcatgcaccaaccacaacaaggcaatggatttataacgagaaattagaaatcgtcttcaagcatggttgacaacaacaagcctcgcacaaactcactctttttcgccttctcctgatcttcacctgaaagtggagcttcttgaatgtctctgcataaatgaaagccagataccaagtgagaaacaagctctatgatatcttccttcgcaccaggagttcaatagacgtattataccttttgagagattccttaatcgagacttttgtagccgcgtttcctacagtcacaggtgtagcagatttgtttgcagactggttcactgaaggagaattaaacataaaggatgacagcaacggatcagaatcgatattggttgaagaagtgaaacttgaagatccaccaagaagagactgtaggtttgcttcccggagttcctttttcaaggcgagataggtagagctatatcctcctcttcgcaaccttctccttcgctgtacgtaaaacctctcatcaaggaataaacacaagttctaccaacatgattgtgtactaaataaagaaccaagctattcacagactaagcatcaaatattggaaataacaaatatcaagatgtcgaaatgtgaaaggatatcttaaagaaattcgcatgttgcgtcgtaatatggccaacgatatccaatcccaccctcttagtgcatacaggacagacctggaaaaaacaaagaacacatttttaagtccacgtttaagaggaaacagagatgtagctaaaaaaagtagcagtctggatcatgaaaagatcactaatgttaccgaccgaataaacgaaatattccaagattggattcacaaggctgctaaatggattacagtgctcatctgataagaagaaacaacagaggtagccagagaacagttcatcatcacgaagaacagaaaaaaaaaatattccaacatgttcaatttttctaactataaaccagaaattgcagcattggatcacaactaaggcaaagaactgatcaacctaagaatcaaacaaagcatcaagatatctatcctaaagctaaagcagggtttgatagatgatcaattataattaccccattcttggcttcaacaggatgttcttcatcaatgtgacaacaaagcccaacaatgtcaaaatcttcagcgcaaaaagggcatataaactctgccttcaaatcgtcttctccttcaagatcctcgtaccctcctcctaaatacaagtctgccaccaaaaaacttcaaaagatcaatctcatgaccaaagcctaagaacaaacaccacttgaatcctaacaagaaaaatagacgcgcgaacctgatcgggattgacagcgtctggaagaagaagaggatgaggagaaaacagagggacaattgatccaattggaatccatatcctctgattcttacaggattgagattaaaggcgacaaatttgaatgtgatcaaagaaaccctagaaggacggtagagagagagagagagagagagagagagagagagagagagagagagagagaaaaggtgggaagaagaaatggaagcgaaagacttgttaccgaactacaacttcggacaaggacacaagaagacaacgttttgtttctacctgttataccctcgagttttatgtttatttatagttttgcacctttgattttcagtcgtttcacgcggtttggtttcgattggaccgaacagaggaagtggtttcgttgctatgcttcacacgtgtaacgttggtctaccacaagtccgttcctgcctgagaattgaaactgcccgcatttatttctaattaattttaggaatcttttttatttttttcaacaattttaggaatcttaaagttgatttgtcccttgaattaaaaggttagtaaaatactaaaatggagtatcaaaaaaccaacaaacactagtccactccaaacctaaaccggtatgaccctaaattggtatggttgatagttgatacaatcgttatctatacttaggatatgagcctgtctacttatagtcaattcatttcaagttgataatttcgtaagtcatgatcagcattatgtctaatagtttggttgataattgtttgattgaaggagaataattagcttaagaacgttgtattattgtaacaaatgattcgacagattaacgtacgaattattctttttattacaaataaaagctcgagagcgacatgagtcatctcaatttgtaataagaaacaaaagtaaagaaaagaagttgcatgtgagggaagggaataaagttgtggtatgaatttaatatcttttatcaacaaacaaggaagaatccaattaatatttggcaaccaacaaatatagagctttctttcctttttcccttgtgattttgtttgatcttctctttctttcattttcatagtgcaacttacttcaccccactttcattcacattgggtgcattaatgtaatcaatcacagacaacattttttttctttttgtctctatcacttatgcatatttgaaagacgatttattcaatgcaatggtattttgtttcatgatgatgagactggtccttttgcatcaatgcaactatgtatatacacacatactcgaacaaaggacgaatgacagattatttgcatcgatcgatatataatattgcaaacggagtcttaaccacagcatcgatttacagtgttctcattctttcatcactgaatttgctaaactgttttaaacgaagcccaaatctgttttatatgtctacctcgtttgatagaacaaataagacataacgactaatgaaaaattattttgaaagaataataacatacagtatgtcggccttgtttgaaactccgacgttagcgacatatataagagagttagacacatttttttttataaaagttgtttgggaccgaaatatgtggcgaaaatgttgttaacagtgattacaaacgatgttgaagcataatgtgtgttgtcgtcggaaaaacctcagttacaacagtactgtaaataaacctaagttgcaatgtaatcactgacttattcttctaaaaatgtaacaatttcgctgacttgatcgaaaataagaataatggatgtgttgctaacgcttgaatacgatcaaaattatcttacttggcagttaggttaacagttttactgcttttgtgtcaacgaaataacgcaaaaatcttatctctagatagctcgtactctagaccacaagagataatgacatgacatcagctttctcatatccacgtgtcttctctttgctcaccaatctttaagtgccacgtgtacactcttcctcacctaacaaaaacaaacgggtctagcaacaaacattgtattacacgattttttacttagttccaaaaatcgtacagctagttctctcaagcctcaggtatatccgtattatatatatccattttgatgaagaagagcgtgaaataaaacaatgcaaaaaatgacatttcgagcggctcatcttttgtatgcgacgtgcattacgattgtacaaaatcatatctaaaattaaattaaaaagattatattaaaagtcatctatacgacttcatatataaaaaggaatgatgatctcaaactttaggttgaacacattaccatttgacatttaccgcgttttttcggtgcttttattacacaaaccttcggctagaagtcaaacgtgttggctccgtgtgttctttactttttagtgcctgtaaatttgttatttcatttgttagctgatgaattatttcatgcgatcaaattttccaacaaaactaaagaattatatctgaaagtaaatttacagatattgaaagtaacattttcaagatactgtctaagtatacgaatatatatggcaaatgtgcataactttttttttttttggacaaaacaaattgtgcataacctttaaatctttaataataacgaaaacaaataattatttttcaataaacaatttaataatttaaaaatcttaaattcgtcaataaagagaggaacacttttattctagcctctgaatgtgcttcttctctctctcttttcttctttcatcttctctcttccttatcacttgactttagtccaaatctctagctcatttgtcagacaacaaatttctgacaatggaagcaatcagattctctaatttgtcaggtcttcttattctcttaatgtcactgcctcttttagtgacttcaaaggacgaaactgtttcttgcacaatgtgttcctcttgcgacaatccatgtaatcctgtcccatcttcttactctcctcctcctcctccgccatcaagctccggtggcggtggatcttattattactctcctcctcctccttcaagctccggtggtgttaaatacccgcctccgtacggcggcgacggctacggtggctattatccgcctccttactacggcaattacgggacaccaccaccaccgaatccgatcgttccttattttccgttttactatcatactcctcctcagggatattcaggctcggctcgtttacagaattctctcctctttgctctgttcgccgtcttgctctgttttgtgtgacggcgattcatctgtatttggccgggaaaagtgtacggtgtaaaactgaaatatcttgtttacttatttaactttttttacatttttgttgacaatttgtatttattatatcttttcaattaattaagaacatttataactactcgttgtgttagaaatgttattgctctcatatcttcttcaatatatatatccacaagatggacattaacataattaattacatgaaactgagcttcagtgaaaaaaaaaattctagcttcaattactgtgtcaggaagtacagggtaaattagttgagttcacttaacactattttgtcggttcgattatctgttaatcaaacgaaatatgattacatccacgtcatttttcattggaaaattattcaattaaaccagttaaccatagtggtttattttttgacatttgatgtgactgtcgttaacttggattggatatattgtacatcgctttaaaatattatttattttcctgttctaaactttattcataaaacaaaagttttccttctttcaaaaaaattatttccagaaaaaggttatacgaaaccgacagacaacagacccagtgaaactagtaaatacacccaaattaaacgagaactaatattgtattattgttggcttcaaaatccaacatttgttctccttctgtttgtgtatttgtttctagtaaaactttggtttatgatgcaatacaacttacgatggtcgatacaacgtagtttataaaagtcttcataaccctaccagtgcattaaacatcaaaatttacatattctgacttctgatgacaaagatccagtgcctctctaagtaaccaaccaccaagagctctagtttaggccatgactttactcattggccatgtgatcgtatcttcttcctctctctctttttttcatctttttcttttcaatttttagattgccttttaaagtttcttaaagaaaatgtggtaaaaatattagctggccagcacgtgcgagttatgggttgttatggtcccaccaatccgatctaacacaaattcggtataatccggtatactgtcagactggttgttatgttgcattattggaatactgaattttagttgacaattggattatcaatccacgtcagtgactggtcaatagtacgtgagtttttttgttttaattcttcacgagtttacaagttgactccttaatgaataaataaattcaaaagcctaatgagtaatgccgtaatggtaatgagagagtaaccgagatcaaatcgttatactgaacaggtcaactgtatcaattgggctaggctcaccaaagaccctttgaagttgggctttactatttagtaaatttgtagcttttccccgcccttttatgcttttccttgccctgattatgaatcctctgggctctggggttaacaaaatttgttgataatttgatggggaaacacaattatgctaaataaaaactcagcttatttgttttaattttgataataaaatgaaaagtttagattcttgagatttcaaaaggaaagtggataaagtgaagaaaaagaatcaactttgaagagattctaggaacatgcctcaaatacatggtatccaatggtgtgtttatcctattatggtactgtattggaaaggcaaatgaataaagtatagattaagtagtttatgagttgacaaaataaaagtttgtttcatttatgttagtaagttggttccatggacttcagaaagaaaaatctaggtaaagttttcgacagattcaacgttgggccagcccatttcatgtataaccccgttttttaaaatattgattgttgttataaagcaatatctagttttatataattaaaatttatacaaaaatggcatcaatgagcccaatccttgaacagtcacgtgaaacctttgatgtaatatgtttgaactaaggtaatataggccaacattccgtgtaccatatgctacatttattgcaaatggtcattacccccataacattcacactgagttcaagctgtttgctgcccaaacaagaaagtttttaagtttaaacgatcctcttattagttatttctaaaaccattattgaattagcgagggaaagtttattgaaaatttggttgttttcaaggtttcattggaaaagaagcggcaaattcgaacattagaattttcgtgaaaagtttcaaaataaaatctatgtgcttgacagataggcagtctccattcttgtcctaataaagacaaaacttttcaataaaatacaattgtcggaagaaaatcattttgacctttcattcattcattcattcttcaccagagatcacataaacaagatacaaaaatttcaaaatttagttaattcaaacaacaccaaaaaaacgcatacaaaaattacacattaattcgttacacatcctacaaaattaattattatttcaccttaaaacttaagatccagaaaattcgttaagcataaacggaagaagcataagagagagccatgagtaacacggcggcttgctcttcttcgccaagcttattccgccgttgattctcagccgttgatcgctgcatcatcacttctctccccaattccattaatcgctgcttcaacgagtcaccaaacttcgggtttctgttatgactcttcttcttcttatcttctgatctatttgagatcagtgttcttcttttctttctgtttctgatcccgcatgcgttacaaagcgactacacaaaaagcaatcggatcagatcgaactagataacaattaggtcaaattaagatcggggaagagactaaccttgggaccggcaggaccgcctcgccaaagaggggttttgctggtaccacaaatggcacaactcttcttctcgttgctgatagcttcattactgctactgctgctgtgttcttcgatcgcatctactgatgtgagtttgctttccattgattctgaatcgattacctaaacacagaagtagtagcgcgttaagcttaatcaatccgatcgctagatatcagagcgagaagagggaatcagatcactcactttctcggtgggatctagcattaccagcttcaggaaccgcagatcgtgattcgtgaactagtgtcaagtcaagaagatatggatctagggtttccgatagagatcagagtaggcaagaaacatataagacttgatgagaattcaaagacgagtggatcaggggaacaaaaatttgaatcttgaaagtagaaacagagagagagagtgtcagagaaacagagattttttttttttgatttcaaagaaacgacccaacagatacctcacaaaaactaaaccaaatggccaattataaatgaaattggttcggctaaaccctagctttaatttattgctttaaaagacgaaattacccctgtttacgtcctctaatatcaggctagagccacccgccaaatatcgcacataaccctgtaggaaaattttcgcataatttgggcgccatttcgaatggcgtcgtgtttttcctaataatggtgtttaataatactttcgtcccggtttaatgtcaaccaagaaatggggaaaaagtctttaatgacgtcatatctctctcttccaagtttaagctacagtgttattacatggaccggatcgtgaatttgatgtgccacataacttggatccgaccagatcaacagctctaaccttttcacttaggtattgaaacgaacactgcatacaaacaaatgtcttaagactacattcttcatctatgaaactagaagacattcttaccacatctcaaatgcaaacaacacggtaccaatcctaaattacggcgattctaatcaaatcataaagagtacaaaagtgttttctcagtaaaaacttcacatctcgttgtcaatgatatcgtgcatcatctgtaacggaattagcccttctgtcctgattgcatctttgcttgggtcaggactgatgaagaataatgtaggtaaccctcgaacctgtatcacaagagttggttaatgtaagaatttacattgatatgctgagaggagattcatgaaatttaaaaacataagctgcaagttacagtatacctgcatgtcgcgtgcaaactcgtactcatcatctgtatcaactttcacgattattgcattgctctcatactctactgcaagctgtttcacaatgagcaaaaactatttaacacgagtgtcatgagtgaaaaagcaagtagataaagccaatcaataagaagatgcttagattctcctatctcacacatttcttttgaatttgtagacatgccaactacgcgacaaggtatctttgtcataaagtatgggagaaacagtcgtaagattggaactgtttaactcctttatctaattcaccaaaagaactaaaccatagaagagacttgattaatgagagcggtctttcaactctagtcaattgccaaaccaagacccaagacaaatccagagtgcccccaatacattttcatagcccctctttaaacattaagatctcagtaaactgtaaagatttgttgatgagctaccaaagctataatgcactgcccaactcctatgcaagttacaatagtactgcactagacttaacagtaatataccatcacatttcaagattcaagtatattataacgaacaaccgggttccaagagccaacgtttggaaatatataagcattctagagtctacacatgaagcaagtgaaatggagaatgtgtaagaaagttgagttatgagaatccatggtaccatttctagttcctgggccatcaagatacaaggtccacaccatgtcgcataaaaatcaacaatcaacggcaccttcctatctcctttcaccagttcctgaagttcttgagctgacaatttcttctgtcaaaccataagaaaaggaacaaaaaacatccagaaatcagtgaggcttccacatgatggtatcaacaagagtcattcataagattcaaattaagcaaatctctattctgaagtatttaacagtgtactggtcgaatctttgatagaactaccatatatcgttcttatataataactacatctatgcccagccaacttaatttcccagaaaggcgaaaaaggaagtcgtaaaacgaaaacaaacatgaaattttttgaaatcgacaaaatatgttgtttggagcgtgagagaaagcgagaaattgtccgtaccacaagataatcttctctgacaaacttgccgcgaggcggaggacagagaagctttcgcggacgcgtcaacggcgagaagggcaagtttccggcggtggaggaggagaacggcgcggctaccggtcggatttccctccggataaagagagaagacggagcatggagggaggatagaatcggcgataacggagtgttgaggtgtggaaaagttctggattgaacaagagccattttggaaatcgatttctgcttcaaaatgatttcagttttagcttttgaggggttttagacgataaggcaattgaactggacatatactaatagttcattagttcttgtctttttacaatttacttgctcaggtaaagtcaaattcataataatttattgctgttttatgtatactttacttcataattcaaataaagattcgagtctttataactcgaagataaacccttccttaggtttgaccaaaaaaaaaaaaacctttccttaggaaatcagacaccaaacatattaagaccaataaagggtttatggtttcaattttttaaccgacatacaaactgttgtcaacacaaaaacaaaagactccactgtaagtttttataaccctccaaaatttaaaaacaacacaaaggtcgactcacgaccggtgtaccagtcatttcaaaaaaatagccctggacaatgaaccaaacactttctcagacgctgtacttttaaaccgaccacccggtacaaacctctgagaccagaccagaccagacctggagtataaccatggcagtgaaactagactctgactgactctgacctttcaccattctcaagttgcaagcttccaattccattcctgtgggtttatattgatctaaatatcagattttgcatgttttcatcaagagacgttgttagaaatttaagaatttttacttttatttaccttcagctgaagttgaatcctccggatggtactggagcttgattccctccaaactggaacccagcctgagaaccatcaacacctggaggttgctgtgtctcatcatcttcctcttcaagccagtatgtctccagaattttaacagccttctcatagatctcattgttgtcatggctctgaaggttctcgatcttttctagcccttctgcatcatcaatcagctgagcgtaatagttcatgtctcctgtgtgacccaagttcttctctgcctctcccaccttcaaaatgttttccaatccttcaaggcagacagttatgattcttggatctgggcaaaccaggagatcgcataatggttttatgcacccttgctccaccaggtatctgtataaccaacgggaacagaacatcaatatatatatacacaaagtatatatatgagagaagaaactggaagttagaggaacgcaaaaaagacagtgacatactttatttgatcatgagaaccacctgaagttgcatttgaaattgcccatgcagcttccttcttaatgtcaaattcagcattttgaagcagactcaccaacggggaaatcaaattagcctcaactaccgtctgcaaccatcaggggaaaaacaacacaattaatgaataggtatagaagtctggatgggaaacggtacaaaacatatgatgaaacagtactaattgcctacctggatctgatctttgttgcctgctgtgatgtttgaaatcgtccagcaagcttccttctttatgcttttcttatggttttgagtgagcaggttggcaagacaaggtagagcaccactattgatcacgcactggagaagaagtaaaatcagatttccaagtaaaacgatgtaaactatttcagatatagaaaaatcacctttgctaaactcatgaaaaaccaaatttcaccaagcaaaaaatttgtgcatgttgttggtttaaactttaaaacaagaattaattgtaacaaaactcaaacacaagcaatatatagcaaaaaaggcactgcatcctatctgctaatatggacagagtggcaacagagggagaatctcatgataagcattcaatactcccatttttcacataaaatgttggatatgaataatagcaacagggtgccatacatttgaacaacacctcatcgcaattaccagtcttggattagatgatatgcatggtatatcactaacttcgacatgtttttgctatcggttcaattaatgaaaagttctagtggtatcttcagacctattcctaaaggccaaagaattgcataaccacaaagatattctttggcatagtaggaaaaatatatactatcatatacaatgtgcaaaaccgaaatactgtgagaaattcaatagacaggatttagatccatacctgtgtttgtatatcatctccagtaactatatttccaacagtgcgaagagcaggaattagcacagatggagaatgatggctaaaaatcaagagcaaggtatcaagttatttgtcaacaaatgtgtgaagtggacatgaaataagggaattataaaatggtactgacaggagaagttcaacaagttttgggacaacaccggcctggatgacagtctggattttgtcattggtcccatcagagaggtaagaaagagcccaacaggcatctgtcaagacttcttcatcatctgaatgaattagtcgttcaagggcgggaagagcaggtttgacctgttaaacatgcttcatatgttagaagaatactagacataaacattgacgaaacaagcttggaggggaaaaaaatagacctggtcaaagtgaggctgaggcttgccacgacagaagtttgacaaggtccaagtggcatttcgaagcatggacaatttagcatgctcattaagctgattgagcagcggaagcagtgccccacatccaagaacaagatcacggcaccgtggtgaatcaccagcaacgttacccaaagcccatacagcctgcaggttagagcgaaatcttaagatcagggtttcacaaaattttcaattgcataatctctcataataaatgagaagacattctgtagtcatcagaagttccatacctgttcacgaacatcatcgctaggggaagcaagaagctgaacaaagattggaacagcattgtgatcgattacaaccttagtgtgatccgatgttccagatgcaatgtttgttagagcccaagctgcctcaaactaaaataaaaatcataaaagatgagaagagaagattacagtgaagaatgaatcaataagagacattaattatctcacctgaatggcggggtaatcttctttcttaagaaactcaacaaacctaggaacaacaccagcacttatcacttcctcgattggaggacttctctctatgcaattataatagagacagagagacaaaagttaaaggggacactccaaattatatcaaaacgggaaataaaagagaattaagaaaaggaattaccaatagagagaagcttcctgaactgagtagtggactcaagctgcaaggcagggtcatcggaccaaaccccagcgaccatatccttcagactatccaactacaaatgtttttttaaagccaatcaatcacaagacaactaccgtaaccagaacccaaaaacgaaaccctaaaacctcagtaagccgacatgaaaatcacaaacaaaaacctagaaaaccgacaacaaggagtacaatcgaatcatctaaaaaccagaattgtaccttcttatcgacggaggcggcggaagctgaagggaaaccctgaagagcttgcataccttcacgtctcttcttcatcaaactctcctcacgcttgcttttacggatctcaaccatgttgtcttctctcctccgtcgtccttcctccgcatccactgcaactttgtatcggttccggcgaacctccgtcttagcgttgggtctcagtgacatggctcttgctcgacaaagaaaatccgatgaaaagatataaacccgatcaatgaatgcacacaagcacacgcaaagactggtctgtgtattatatagatcctgccgagagcaaataaattataattataaaaaaaacctaaaaattgatttgggagtggaaaagtgataaagaaagagttaagaagcagaggcagcgagggacaagttgacaacagcgcatccaaagaatgaaagcacttttttatttatttttaatctttgttcttaatttatactgtaattgctaaaatattcacttatttacagttttgccactatttatttatgcaaacaggtgtccacaattaggttatttacataattagccccttactattgtgttctttgaggcaagctaatgtattcttctttatatctcaacaatttgaagatccttttgttttcatgacttacaagtggactgcgattatcttaatattaacgtatatagaccttggttactatataactttttgagttttgaatctacgtttgtgtttatacattttttcctttccaatgaaaagtcgttgtttgtcatatatggattagttatttctctctagcgagatatcctcagtcagattgtccactctttaaccgactacataccgatcatcgaagaccaacctatgaaagtaactgacgagatcataagtttgcttggccatgaaccagaccgcaatcaaggctaacaacgccggccagataaacggctcaatagctgggttggcgctacgggaaaatccaagcagaggtaacaaagacttcaagagcaagtaagggatgcagagtgtggctagaagtgtggttatgatcgaaccaatcacatcttgaagcagccacattgaaggaagcttattgattcccacgtttctgattctcttgaactttccccgccatgccttagtcgcgaaacagttgacaggaaacgagatttttgctcaggaggcaggacagtttctttgttatgaagtgatatcccaaggaaaaccacctgactatggctggaaacgagatttgacgcagagtgaggaaaattcctaagtaggcaaagggaattgacagcgtcatcatgtatccaagaatgacaggtgagttttcgaataaaccgccacctcctacaattgctattgcaatccagcgaaaagaaaacggcagaagaataaagaagaaagacacacatatgctgatggtaagagcctgtagataagataacaaacagaacctgttattcaaaacatgctccatatggtaattaagttacatagggtggacgaaggaagagaactagaagggacattagacttacatcaaaagatttgttatccagaaagaaaagcagccgtccaatggctccaagttcgtgaacagcaacaccaactagcctaggaggttccccgaagaagctttgcaatagagaataataccactcacaaacgatcttgttatatttccataaaacaagcacaaacccatctcctaagacattcttaatcaagatgtcagcctgaaacccagcaggatgtctcgcgataatgggctcgtgtatgggtatcctcatgaaaaacacaagatgaccgttgtataacaggccatttaagaaacatgcggacttggtagacattccataatctctcttgaacccaacaacaacttcttggcccaaaggatgtaaagaaaggcagtatgtgttcaagataaacgccatagcccaaggaacaaccattctcacgtaaggtgatgctctcattaacacaaacacgtattagaaactcgtgaactggaagtctctctggagcgtcctacaatgaaaacagagagcatttcatcaaacatttggtgtgcgagattcttcttaaacccatattacaagaaacagagaagaaatcgaaaatcccaacaccatgacacaaatataatccccaaaaacatcactcataacaaaatactagtaaataactttgatattctttctaaaatcgcagaaattgaagtttaatcgaaaacgaaattgtcacataacgctatagaacaagaacctcattctttagagaaaaagaggtttgtataataacctcgcactgcttgtatccgcggagattgagccagatatgaagacagtcttgatgaacattgatggagcctcgacacgcgcaccggataccataaggggtttcctggttcctccggtgatcggcaaatcctgcacaagtcttcttcttctttatcatcatcgtgtttgtctgtgtcttctaccagagtagcttgatcgtccatttttctgatgaaacagaaaggtttcttctctatctctcgtcttcttcacttccttgagtcaaagaaattccaaattttgaaaaaaatggtttgctgctttatttataccccaatttgtaaaaggccacgactctgggttcattcaatgggcttatatgatttagcaacgagatagattaattagaggcccatatatgatttattagggcacgttggtcatttaaagtccactataaattcaatcagaaattagggttttgtgttgcagacgccgtatttgtatcgcggaaagtaaacctagccgagcagatctacctctctctctcagtactcaggttagcttttcttatatctacggccgatctctggcttcatttccccctgttgtttcgttcgttattcaattgaatagtttgtattgtggtcttgtgtctcagagatggccaagtcgaagaatcacacggcgcataaccagtcggcgaaagcccacaagaacggaatcaagaagccaaggagacaccgtcacaccccaaccagaggagtaagtctcttattacagttctaacctaactgatttcagattcgggttatagtgttggaggtttgattattgcgtttatgtgaaatgatgtttcagatggaccctaagttcctgaggaaccagaggtacgcaaggaagcacaacgtcaaggccggcgagaatgctagcgctgaagaataagtgttttgattatctgtgagacattttgaagtttttttttaatgaatttaagactttcttagacaaaggaaccaatttactttgcgcttttgatcatgtttacgcaattgtggtttgtgtactctcttatcctggccttaatttaatatcagcagttttctatgcatcttctcttatctgcaagttacttgattcgttaccgattcttttattgtttagcatatatgtttgtgtgtacctgaaatctgatagccgaatttgatctacaaattagatgttaagcatataatccgtacttgatctacaatcatctttgattgttaaacatatatgttttgtgtttttattgtttcttttaaattacatgtagcttcgctatttgttggttcatgattgccctagttgctgcatcttcaggatgattctctataatcctgttttgtataaaattgtctattggtattgaccatttacaatactgtcgttcctgtttggttttgtgtatgcctagtgtttacgattagtaatcgtttgaggtttcattttggataaaatagggcatcttctttgcatcccactggtcttcatgcatcaattttgtttagcaacatcaataataatctcggaatagttttaaaacaaagttaaccctaccaatgtttaagtttaaaactttaaacaaatgaagttgtgatgactaaagaacccatttactctccccgaatgttacacagagatcctgataggtcagaagaactgttaaatatcgtttcggcaagcctgacgttgtttaatctcatgtctcgatcagaaggaaaacgttctaaattttatttctagaaaaatttcactctagttaacgaaagcagttgttgaatagtgcttctaactcaattgttgacgttctcagtccacgtcctgtattaccgactcaactcacatcatcaaccctcagatgcagccaattccaggtcatatgcctcctcattaactattttccttcttatcatttatttagatgaattttcaactcttaaacattttcttgtattttgtccctaacagacaaatgtgttctgcttaagagagcgagatcttctagagcgatttacttctgaagttgcacagcttcaagggagaggagaaagtcgagaattctctttcctcctggtaaagcatttttttcacctaaaatttgcttccttttctgttctccgacctttaggattcagtaatagttttcttctcctttccatccgtacttgcagagtcatcaacttgctgaagacttaggtaaagctttcacagagaaagcaatgcttcaaaccattttggatgctgaggcaaaactacctactggctcagtaaaggtaggtcaaaaggattattacctgtgacgttttgaacctattcagttgaatcatggttgttttgctagctctagggatcacggatggtacttcaggcttccatgtcatatgattagccattaacgtgcagagtaattgattttaaactatagttttttgctcgatagattgtaaaaagctgtgagacaagtgggatgttttgcttctctgagcacaataatagttcatcagctttagtcactagcaaaggagactacgcactagcagaggaaataatctaaactaactagtaacgacctccatgtatttgatgacaggatgtgttgggtcttgtaagatcaatgtacgcattgatcagcctggaagaagatccatcgttgctgcgatatggttacctatctcaggataatgttggagatgtgaggagagaagtttcaaagctctgtggagagcttagaccacacgcgcttgcactcgtcacttcattcggcattccagactccttcttgagtccaattgcattcaactgggtcgaagccaatacttggtcttcagtttagttacctgctagtaacaatctcttccataattcccatatatctcttataaaagttatgtttccacaaatctacagaaactgttgtatgctcgtcataataaaagggtatatatgatatgtatccagggtttattctttacttaaaactggtccaaacaaaaatgtttggtaataatttcaaattcttataataattgttattatgattcttgattggtttgagttgtggataaaattttttgagtacttaattcattcaattttcactagacatgtttatatttttaatttatattgaagtttgccagattaattaaggaaacacaaacgactaaaaaaaaaaaaaaaaaacacaaacgactacgttaggtgtgaaaacaaaattgaatttgtacgtctctaacgaccaaatgactatcaaatgacaggcaaacagttttcttaacggaaaaaatacagtaaaaataagaaaaaaccgtttgatcatgtttataaaaaattgaagtgggctaattttgtcaaattgatttagctaatgaaacgggcctaagtgggtctattttaagcaagtatacaaaagcttcattaccggaagcccatattctcgccaatcacatataagaggccactatcgtaagcccatatattatctaagaggccactgtggtctgtggggtgatttaaattccatctagggttttgactattgtgtatgtcacctatctttcctctcgcgtctctcccctttactcaggttagctgcttatatccggctgatcgctggatataatttgacttttaactcttctcgtttgtttcgttggtgattgagtttgaaaagttgtgttgtgccgttgttacagaaatggcgaaatcgaagaatcacacggcgcacaatcagtctgccaaggcgcataagaacggaatcaagaagccaaggagacaccgtcacacaccaaccagaggagtaagagtctctgttacattttaaacctataaacgattacagattctgatgttacattttaaagctataaacaattttcagattcggatgttaccttccaagtttgatatttaatctatttttgtgaaatgttgcagatggatcctaaattcctaagaaaccagaggtatgcaaggaagcacaacgtcaagagtggcgagaatgctggtgtcgaagagtagatcttttgatcgtctgattgacagtttaagttttttttatgaatttcacttgtttagacaaaggaaccaatgttctacaatcagggattatgtctatccagattctcttatatattttgcatgttacttgatttgatgcaattctttcacttgttcgtttatgttcatgtagacctataatctgaaagctgaacctgatttacatatataggtttgtctggcctttacttgaatcaatctggttttattcaccgatgcctgttacttttctagctttcacatttcatgaaaactccaaatggttctattatcatttgaaaataaccagatttgagtgtatatctattgccaatacgtcaaagacaaaatcttattttgcattattgattggaaatttgggtagacgccaacaatggtcttaaattggtttaatatacttgcaacacaatttgtcaaattgtaaaattatatgattttttttcgttctggtgatatgaaagtaaagtgaaaataatttgataaagtggtgatgacgaaagaacccttgtttaagcacacgaaggttacaaagctcgtgtcgtggtttcgattcctttgtctcgccttttagttgcacttcggatagatctaccaactacctaatgccacgtggttatttctttgaccacataagcctatacacttcagagcatcactaatctcacggcaacaatgatcaaattcccacctggcgcattttcattggatttaactttcttttacacagacaaaacatttctgcttgtcatttcttctacgtcacaggctgtcgtttttaaagagagcgaaccgactcgcggcaaaggagcgcgtgggtgtcgctcgatggccttttagtgaatacaaagggcaagtaagggtattaatggaatttagttcataacgtatgaagaattatattatttttctgctgctttaattttttttttctttttttttttctcctctctcttctctcttctttcgcgtttcgaaggttggggaaagctttcgcagaagaaaataaaagctagagagagaatgtcaatgtttttttgatgctccgtctggcaattagggtttcttttttctttgatttcgtccccttcgagaactgaatctcccgcctatatcgacgccgtctaattcctatcatttctcgttgctccaaaaccctaactttactaccgtcggtcattattttcactttctcggctcgatttggtgttggaggttggtaatcagttatgggcgctccggaaaagtctcaatctaataccaattcgatgcaggtgtctctctagctctagctttgttttcctttattggctcacttgattcgagctgggtttgtcttgattagtataatttattgtagagcttctgtattcatattaaatcactcctgcttctgagctgtgttatttattgatgaaattcatggtgaccacaattcaataggtatctcagttttaagagcacacagaagatgagatttgtaatttgactagtttctatggttcacttgttgtgtattagtttcagtggggtttagcgtagggcgtagcgtagttctctagtttctgtgggtgtttgtcctcttttgaacagtgtaccatagccgataatttagagtagctattcgaccatgtggtagaccttacttcttcagataaaacggatctcaattattgagacactagaaagttgcgttgttttgacgaattgtgttgaattgagatggaagggtttcttttctttcttccaatacgctgttggatcatccttcttactcttgtattcattcttcagagagtgaaagtctatcatttgaatgaagatggtaaatgggatgatcgaggaactgggcacgtaagcatcgactttgtggaggtctgttgtgattctaattgacttcctgaattccatctgctgcgggtattctgcagcacttattatgtaaaacatatttccagaatttgtagctaaatggaaatactatatgatgcagcgatctgaagaactcagtctatgtgtaattgatgaagaagataacgagacgttacttgttcatcccatcaaccctgaggatatttacaggaaacaagaaggtagtttttttgcgtcgtggtttaattagctaagatattttggggttttctggttttttggataattggtatctgtttcaatgtacagacacaataatctcatggagagacccagagcgctcaacagaattggctttaagctttcaagagactgcagggtgctcttatgtatggtgagtgatgacaatttttctattaccctcttcatttcatccgtcattttttatattacaatattcttgacttcaaaatggtgtttgtataattcagggatcaaatctgcactatgcaacgaaatttgcatttcagctctctaaacagtaagaattttcttctcgaggatttatatcagttgagaacatctttgttgatcgttatttacctctttattaaatttatgcttattccatatattctgtagtgtcacgtaaatgaattctggagtgcgtttcagtttattttgtagtagtagtgcaagggatttagctaggtttgctgtttcgtgggcatttggatataagaatatttcaatgtaaagatttgttagcgtttgcatggtgatttaaactttcttactaaccgtgttgttttttaatatctaatataaatacttaatctttcatactgtatcctaattagattcaaagttggcatttcaattttactgtaaacgtaacttgagggttttactgattagataatcatctgtgattgaacaggcgaaacatttcacagcttgaacagtgagttgagggagcttcctgctgtagagcttactactcttcccctaatactgaaggttttataattctacactgaccctatacttttgtgatgttttatttctttaaaacagtattctttacctatcccatgtctggggaaaagtgcaaaatatttatgaaggcatcattttattgttttcgcctctcgaatgttttgtggtgccttttttccattattattggcctttttactgtctggaggattaatattatttgacaaatctacttctatccatttgtgactcccagaattagaatggtctttctcactgttatatttatcctctcagtgtgtatcagtctgtggaagtttcttgtttactaataatgtctatttatgctctgaatttgatcctgggatttgttttcccaaagatttaattatattagtccatcttccttgcagattgttacagagagtggcattacagatcagatgcgcctaactgaacttattttgaaggatgtgagtaattgactgttcttgtcctttcctgttcagtttaatgtaaaaataactctatctttgcgctcgctggaaaatcttataccattctcagggtcttctttgatgctgtcagtagagttaggtttttcatgtttacaaacaagttctagcaaaaccattattattgaaaaattgagccctattttctttgtatttttatctttaaggtcctttaaggtacttaagggtttgtgatttcagtgtaagctcgttactttatatactgttattattatagtttatcatgtctttagaattatattctggaaacctccttactctaccttttcccttgctgcagcatgatttcttccggaatctgatgggtgtttttaaaatatgcgaggacttggaaaatgttgatggccttcacatgatattcaacattgtcaagggaatcagttagtattcacaaacattataattattcatgtcttagatccacatatatcagaattatcttttgatgtccattatttcttttatctttttgtacgcagttttgcttaacagttctcagatcttggagaaaatatttggagatgaattgattatggagattatcggatgccttgaatgtaagtttgatgtcattgatcaaagttaatgatagaaatattgtaaaaataatgacaggcattaccttcagaatgtagcggttagatatatgttgcataggccttctagacactaattagattctgttgggacttatattgggaatttcttgcccataaaatgctgaggattttaattgtggtttcatatcttaagtcgttcatggacaccaaaaacttaggtttctttaattactggtggatagttccttgctggatcatatagccatgttcttaagggtttgcttttgcgactgcatatattatatccagtttgtttgtttctcttatcttggccgttgcctatatttagctatatatgacgctgcatgttgtttcacttcacagatgatcctggtgttcctcactctcagcatcaccggaattttctgaaggagcatgttgtttttaaggaggtaacacaatcttgcctatgctattgattttacgtgattcagacccagttaacaaagactgtacttaggaaatctttgagacttattcttgtgactagaactgaataagctcattagaaatattagagacaaagtcatgttttttttgtaagaaaagagcatgctcactatggatgctttgggattagcgttctttggcttttagaaatgagattaatataggatgattgggttttctttttttttcgattctttagtatatcccttttgtttttgtaggctataccaatcaaagatcccttagtcctgtcaaagatacaccagacgtacagaattggttacttgaaggttggatcccataatttttctaaaaaacttgacgccttgtttcttgtggttttaggtctctcaccttctgtcaccttttacaggatgttgttttggctagagtactagatgatgctattgttgcaaacttgaattctgtaatccatgcgaacaatgccatagtaagttttccatataaatcctatcacatacataacatcgaaagcctgcattccatattctttctttaactgaagtgtcttctccaggtagtttcattgctgaaggacgatagcacttttattcaagagttatttgcaaggttgaggtcgccttctacttctatggaatccaagaaaaatttggtatttcccggctcaagaggcatttgttatttattttaagcctcaatggttttgtattcgtgaatgacatttataaaaattattttgagagtaagagatttctttgggataaactttctctagccccaatgttgagatgatctacatgtgacaacagatggaaacaataggtctccttagtatgatatggctgttcaattgagctagtcaggctgatgtgttttcattctctttaaataggtatatttcttgcacgaattttgtagtttaagcaagagcctccaggtggtgcagcagctgcgactttttaggtatgtatttacaagaacctaattacgactggtgtttatcagttactgacttcagaacatttgtagtagctattatagtatcgtgtctgctctttctttgtcaagtgcttctttaagaatagtctttgatggtctttttctctattggctgtcttttcaatgatttttcagggaccttattaatgaaggcatttttcatgtcatagaagaagtcttgcagattccagacaaaaaactcgtattgactgggtatactattttactgactaattattagacataaaagctcattgtggtcactctgcttctgtttttttcataccattaagaaatctcagtggtaatttgctagctgaatactcacgataactattgttgtggatgcaggacagatatcctgattcttttcttgactcaagaccccaaccttttacgttcttatgttgttcggacagaaggaaaccccctcctcggtctcctggtaattttctgtgatctttggtagcctttggattgttcttcagttgcaaggctattcctgttttctttatttaggactgaaataataattggctcccttgtttgggtaataggtcaagggaatgatggaagactttggtgataagatgcactgccaatttctagaaattatccgtaccttactagatgcaaatgcattgtctggtggagctcaggtgcatccttgtttcctttcaataccttattttttgataatttgaacggggtggtattcttcccctgatttgtgtaccgtttttgaatctgtgcatagttaagcttgacaaaaataagttccaagtctttctcttactttccacatggtcttgttattcttgcatgttcctgaataagtagaagagactatattcaagagtattattttaaaatgttggcgttactaatactttgtattcagtgtacatcatgatatctgctagaatgtttaaaaggccctggaattttgtgttcccttacccatttgtctcctcgaatctggtagatagacattcttatatctattgtgtacttgatgcattccgttttagcagagagcaaatatcatggatattttctacgagaagcatctacctgagttagtggatgttattactgcctcatgtcctgagaagtcgagcaacgcatctgaaggtgctgccagaaggattttcacaaagcctgaagtcctgttgaacatatgtgaattgttgtgcttttgcattatgcaagatgcatccaggacaaagtaattatgatcctcagtttggtaattttctgattcattctcatgctggcatttattttattgtgcaatttcttcttgtctgcagatgcagttttctccaaaacaatgtgactgaaaaggttttgcatctcacacggagaaaggaaaaatacctagtggtcgctgctatacgatttgtccgtactctcctctctgtccatgtgagtagattgtttgaacctgagacgatatattttagtcatctgaaatagttcctgagtgctccctgtagctaaaaaattgaggcatattggtgtagctaatcatgatttttgctaaaatagttagataaacttatcgtacttgcccaaatttttgctagtggtaggtatcatatcgtaggctttctgtgacggattaaactgcttgtgacaaccattttttctgcactggcgctatcatgactgttaaatagctcatcaggatgtttctaggacagctatgtgattgctgaaatatatttctgtttcaggatgattatgtccagaattacgtggttaaaaacaacttgttgaaaccgatcatagatgtcttcattgccaatggaacccggtacaatctgctgaactctgcagtcttggatctgcttgagcacatacgcaaggtttttgttttccacctttttcccctttgatttattaagttgggggtgttaattgtatttacttatcgtttattctttttgtgtagggaaatgcaactctgttgctcaaatacatagttgatacgttctgggaccagttggccccatttcagtgcttgacctccatccaggctttcaaggttaagtatgaacaggtactgtttctgggtcttgaattatacttaggaaaattctgtctgtatctttttgtaacaatgtgtccacagtgtttagaaagtgccggaccaaaaagcacttctgatgcggttgatccaagaagaagagttgacgagcgggcattggagaaagaggaagaagattatttcaatgaagacaggtttaccactgggtgttaaaacaatgatttttattgtattttctttactcttcaccttttctcacttttttaaatactgacagcgatgaagaagattcagcctctgcttctaatacacaaaaggaaaaacctgcttctaatatacagaaagaacaacctaagcctcatctctccaatggagtggctgcaagccctacttcttcaaggtatagtagtttgtgaaatgtatataatgcaacatctatgttttaatggatttattgcttctatagtccgaggtctggaggcttggttgattatgaggacgatgaagatgatgaagactataaacctcctccgcggaaacagccagaagcctctgaggatgaggaaggcgagctcctgaggctgaaacgaaaatccgctcttgtagaaagagaacaagagccgtccaagaaaccacggctggggaaaagttcgaaaagggaaaatgtatttgctgtgctatgttcgacactgagccatgcagtgcttacgggtaagaaaagtccaggccccgctggatcagcagcccggtcaatagtagcgaaaggagctgaggattcaaaaagtagtgaagagaataatagcagcagttcagatgatgagaatcataaggatgatggagtatcgagttctgaacatgaaacatcagacaatggaaagctaaatggggaagaatctctggtagtagctccaaaatcatcacctgaaatggctgtaaatggatcctgagattttaacactctggactctttagttgtggctggggatggaaggcactctcatgggtgcaaataaaaccttcagagtgcagactgagacatgataaaccgcaaaagaaaagctttgggcaaccaaacggaggaagaaatgtatagtgagcgccatttgagaggaggtaacgggttcttcgtccgtagtgtttgcagccgtttttttttataatattcatctttgaaaaaacttagcagtctctggtctggtcaattgcatattgtaagacatggtctatcagcaactaactcttcttaattcaagttcctaatggtttccttattttaaatctttctttttctggaaatgcatctctcttcgctgtgtgttaggtggtacagcagccaaagtgtgttatatttttcttttaaaacagttagctgttacacatgagatataaggttttgatatttttgtattcagttttggatttggttttctatcaggaaaaggttcttttggttacaagttcttaattaaataatctaacacaactagtcaactaccatacttgagtcacccacttccaacattcttaacaggcgtgatctaactcatctatgtcctaatactcaaccagctaaagaaaaaaaaacacagcttgtcgtcttctttgactttaatacatgcgtaacgcatggtgcgttccatatttttttgtcattttattttgacatgcttgggagtgtctcttcttcgccatttcctttccccaaaagccatattcatttccgctattttacaacgtctgacgtcaaaaaagacctaaacaattgttgctctattaaaataatttaaactgtttatgtatttgattcttcgaatactgccaacaaaagtggctgtagtttagtggtaagaattccacgttgtggccgtggagacctgggctcgaatcccagcagccacaaatattcatctttttgttttatttatatattgttgaaaagaatctgattgtctagcaacaaaactcgtattgactttgattttgatcgtcctgttggatatggatatcaagtaaactgaaatgtaaaggtcaattggacaagagttaagcaacaattatgtgttaaataagttgagcaattagcaatgaatcagtgcttgttccatcttctcttgaatggcgttgtaacatccgagactacataatggcagcttcgactttgaatccctgtacttgtacgctttctcgcaatttggtcccacacatttctctcgcggaggaggataactgaagcacacagatccatcaaaacacacacttcaaatctcacaattccacatatataaatatgattctataaatatatcctcagatgttagcatacctgtacgtgactggcttgaagatatctggaagaccaatgtcttcagaaaatgtcatagttgttccacttggaccaataaccaatctgatagtgtttgatgcgagtgtgcttgatcttgcagctctctcctgagaagaggaaagatgaaatcagaacaaacagagaggaggagttaataaaatttcatctgtaatcaaaggtacctgagctcgttcttcctgttgtttttttatcttctcctctcttttctttctaccagaatcttgtccgagtattttcctgatagcttcagcctggtgaacaagacaaagaagaagctcttagatcgtcattcggcttgtattggcattatatattaaccagaaaaaatgtatcaactttacctcggcttcttgggcagccttctcacactgcattcgccgtctctgtgcagcttcggccttcttggattgttgctctacctcagaaagcttctgttttggtcctggaattgttcaaggtttagagattaagtatttgcagtcatcagtttgatttgagaaagggaaaaaggtgcaactcacttttagatgaggggcaaggtaagccatcagggaactcaagagaactcgacctgatgacagaatgtggatcctttccagattggagagcccgagtacgtgtagtaggaatttgtccgcttgtttctcctgccgggagcggatcaaccattcccatcaccggctttttccttccggacacagcaagtttgtctgatgagagatgttttccgtcttccatgtcatgaccactgctgtgtatccttctgcctccttcactctctttaccttcatgagagaccccgacccttttagactttaactttacgaggtatctgatttcctcatctccatcatcactgtctggctctggatccaatacacgtttcttaagacctcgtttgctcttctcggacatggacgcaccattctcagtcttagacggatatcctctagattgatgtatatctcctagaaacagtgttttctgaacatgaccattgccttttaccttactttgaaatggtttttgtccattatcctgcattactctcgtatatcagcaaagaaagaaagctaacaataagtataatgaaggacaaactcaaagcttttaacagataagacctttaccaaagctttggtataagtacccgcctcagagttggtttgcaacgtacgggtaacaccagcaccaagcttaagcttcactttcagtttgttctcactcacagacccacataaactattggtattcctaaaacttgggttagcttcattgctaagagcagtgtttgtctgcgttgagggtggcagaaacttgaaactatgcaagctccctttaatatcgcggggtcgacgaggcagagcgcttctccttctcctacccgtaaagccagctaaagtagaagcagaacctccagagtcctccattatcaggacaagcgtagatgcagcaaaatacctgaccacagtaaacaaggtcaatatacacaagtaactgaactataacaactgcatgaaaaatgtttactcaaagcaatttatgaacataactaagcctcagaatctgttttccccagagagaaagatagtttaaaattgaactacatgcactttctcaaattgaattagtcatagcattctcaaaattgaattagacatagcattctcaaaattgacacaaaactaatgaaaccagagaagccaaaaccatcaagcatctactcaagtagaatgatatctaaacctaaagaacgaataagcatacactaaacccacctctaacaacaccttcgcaattagtgcttctcagtgaattc

SEQ ID NO: 1277 - DNA, 90142 bp, Arabidopsis thaliana
gaattcattaaagcaagaaagataaccttaaccaacataagattgcacttgattattctttgttacactttgaagtttgaacaattaaaaatgaacaaacaagttagagatgtgaatgtgaggctacttccaaaatacaatctatttcatcactaaacgcctaacattatctttggaaagtgagctacctaccaacccaaaattacatctaacttacgtcttttgtcttttgagttttgccaaccgtctttgatcttggaagatattcgtttacgtcctttaagttttaagcaaatccatcattgttagtgaagtcttaagttttagacgttttattactgttatggttaactgtatgaaagttgatacttagtcatgtgaaaagatatttcaccggaccataaatagagagaataaaaaacaagttatggtttgaatacttgtctaaaactattgattgcatttacatttgttttttaatctgattaaacaaaaaacggatgtcatggtagaattaacatatattacaagatataatattcagcatgatcgattatatgtcataaataaatcgcaaaaaaaaaaaactaataatgttaaaaaaaaaaagagatactctttctagtaaagtttatttacaactgtaaaatcctatatagggtcgcttagttacaaatccgtagtatcaagataagatccgccaagtttggtagtcgcaggactatgaccagccaaacatatttattagtaataaatccgcagagtttaaatgcaaatattttgttcctaattcgtgattaattcaacttatacataaattggatacgaataacaaataaaaattcacatatcgaaaacattatcaaagtaccgttgctttgaggagtgtgccactctaccatattatcactgacgtcatcatcttttgcaattatataatcatctgatttctcacgtctcctctctttttcattaattccgaaaattttgactcgcaaaatctcaacgaagctcgaaaatggattcacgaaccaaggggaagacggtgatggaagttggtggcgatggcgttgccgtcataacactcatcaatcctcccgtcaattctctatccttcgacggtacgtactctcagattcattttatttttatgatccggaatttactggattttacctcttcagatttaggtcaatttcgcttcgtgatttggttttgtaaatatcgccgattgtaattgagcttccgatcgaatttatgatctgtttatgtgaattttctttgtatgtgactctgtttttggatatttgtgtacagtgctatacaatctcaaaagtaattacgaggaggccttgagcaggaatgatgttaaagctattgttattactggtatttctggagatcattctcttcctcgctaaaaacacaacattttttatgaaaactttggagatgatctggtaatggcttttgtgttcctttttatttaactacaggtgcaaaggggaggttctctggtggctttgatatatctggttttggtgaaatgcagaaggggaatggtatgtttctgtctcttttgtatctttggttattgaatcagtgtggtatgtgttgatctagttagtaacgtatactggtgttatgaattttctcagtcaaagagccaaaggctggttacatttcgattgacatcataaccgacttgcttgaaggtgatctttctacttaaacccactttatttgatttatggaatacttgtgtaagttgtgttgctgagggatttgatttctttccttggatttagctgctaggaaaccgtctgtcgctgccattgatggacttgccttgggaggaggattagaacttgctatggtatgagtttctatgttatttattaccttcacgagaaatccttttgaggaggaaggatggtgatacagttgtatggtttgtttccaggcttgtcatgctaggatatcagctcctgctgcacagttaggcttgcctgagctgcaacttggtgttattcctggttttggaggtatctattcaacttcgctgactgtgaagtccttgaattctctgatcaatatatggtttaaaactcgtggagaagtcaaggcattctcaatgcataatactgagctgaggatgggaagaggatcttcgtttcattttttttgttgaatgagtcaagtcactttcgtttataatgctaattatactcctttggattgatgtaggaacgcagcgtctcccgcgtcttgttggtctcaccaaagcccttgaaatgattttggtatgtcagtgccttattcttatggtagcattagcgtgccttggttaaagtgtaatagcatctcttttgttgaaacatatagacatctaagccagttaaagctgaggaaggtcattctttgggtcttattgatgctgtggtgccacctgcggagttagtaaccactgctcgtcgctgggcccttgacatagtcgggaggagaaaaccatgggtatctagtgtttccaagactgataagttacctcctcttggagaggcaagggagatactgacgtttgccaaggcacagacactcaagcgtgcccccaatatgaaacaccctttaatgtgccttgacgctattgaagtaggtattgtttctggtccaagggctggtttagaaaaggtatgatacctatctttcttcgcttcatagtatgtcagttctttaaccttttctccccgactaatgatcaatatgaatttccaccacattgttacttacaggaagctgaagtcgcctcacaagtggtaaaactggataccaccaaaggcttgatccacgtcttcttttctcagcgaggaactgctaaggtctgtgagtctttatgcagtcatataatttggacttatgtgccactaaacctctggctttttctttttctttacaaggatttaactagttgcatgaaagctttccctctaatctattgtatggacaggttcctggagttactgatcgtgggttggtgccaaggaagattaagaaggtagccataattggaggcgggttgatgggatctggaatagctactgcgttgatcctaagtaactatccagtgattctcaaggaggtaaatgagaaattcctggaggctggaattggcagagttaaaggtgagggtggagttccatacattgcataccaatgaattgcaatagcttgatctgactaatttcataattggatcagctaatctccagagccgtgtaaggaagggaagcatgtctcaggaaaagtttgagaaaaccatgtctctccttaagggttctcttgattatgaaagctttagagatgtggacatggtcattgaggtaaggatgaacataacaagctgaagtgttgtttttttattgggttacatgatctaagtgaattgatttcttatgatgtctttttggtggcttgaacaggctgttattgagaatatatctttgaagcaacaaatttttgctgatctggagaaatactgtcctcagcattgtatccttgctagcaacacatcgaccattgacttgaacaaaattggggagcggaccaagtctcaggatcgaattgttggagcacattttttcaggtgattacatatatcctttggcgtttagatgaatttagtgaaaatcttatgcccagagtggttttactcactccacacataatcatgtaccttcatttttctgatgcagtccagcacatatcatgccgctacttgaaatagttcggaccaatcatacctctgcccaagtaattgttgacctgttagatgttgggaagaagattaagaaaacaccagttgtggtgggaaactgcacagggtttgcagtgaataggatgttcttcccttacacacaggcagctatgttccttgttgagtgtggagcagatccatatctaatcgacagggcaatcagcaagtttggaatgccaatgggtcccttcaggtatatcgcattgtaaaaatccatgtcattcacacgcatcatctgttaactatacttttgttgcttatatgaacgagcagactgtgtgacctggttggatttggtgtggcgattgcaaccgcaacgcagtttatcgagaacttctcagaacggacttacaaatcaatgattattccacttatgcaagaggacaagagagctggtatgtgtgaaaagagtgctagctactgctttttgatttaacatttcttctaaattatgttggatttcctgttgatttcaggtgaagccactcgcaaaggtttctatttgtatgatgataagcgcaaggcgaaacctgatcctgagctaaagaaatatatcgaaaaggcaagaagcatatctggagtaaagcttgaccctaaggtatccctctgtccaaaaatttagcaaagtttgtcatttgcatttgaaaggaactcactattcttttcggaatctaactggttgttgtgcatacagttggcgaatttgtcggagaaggacattattgaaatgacattcttcccagtagtaaacgaggcgtgtagggtttttgctgaaggtatcgctgtcaaagcagcagaccttgacattgctggcataatgggaatgggttttccaccttacaggtcagtgttgtaatgagatatatgctggaactccgagatccttatcaaattctctttgactcattttggtttcaatctaaatctcttgtggaacagaggaggaatcatgttctgggctgattccatcggatcgaaatacatttactcgaggctggatgagtggtcgaaggcttatggtgaattcttcaagccttgtgcttttttggctgagaggggatctaaaggagttcttttggtgagttcgtaattttcagtttcttttggattgcaataaagataatctctttcagcttggtttataatacataatcaacatactagcgtgaccatctatctaatcttgcccagtttacctctcatagttgactcaatgtaactcagattcctgattgttcttccatttgtattacagagcgctcccgtgaaacaagccagctcacggttgtaaggtcagcgtttcagtggaaccatttctccattggtgcatcttctgtgttttctttatgttcacattttacttagccgggaagtgggtatcttttggcctcagaagcttttaaataaagtctcatctcagacatatgaatctgggaggaagtagggattaagttgtagtagcaataagatttgttttatgttgtgctttgtcatacaacaaagttgtcagatacatttgttgttataaagctatatggagtaagttctatgatttaatgataatgttgtcatttgacaaatcagttaaaataaattgtgaatcaatatggaattaagtatggcaggttttgatatactgtatgtgtgagtagcctttagaaatctaagggaaatgtaaacttgtgaggacaaaaaagaaacaactcgtgatgattaaaacatgacagaaatggcaggggaccctaaaaagaagaagaaatggagaaagaaaagataagacaaaagatgtattcatgaattttagaaaagactccaatagtcaattttgtttggaccaccaacttttgtttttctctacgtctctgcttctacgtacgttacaattacatattcgaatatcaacttactcccccttgaaaaccagtaaaaacattgatttcctggttaatagtacacatctttggttaatcgttctggttatacatgttggtatatttttcatacgtttattctcaagattttggttttcataattcataaaaagataagataggttgttgttattagtaaatgaatttgtttgcatggttgggcctataagaaggaagccggtgaatttcctaattaacaaaactaaaggataagtgatatttaatacagtaacatgggaccgggcttaacatgggaaacaactagggtatttgcatagtaaatgtatttatttttgttgtcaacaattaaatgtttattgatgttaactattttatcataaaacttcaatgatgaggatagtcgacgaccaacatgatgatcattaaactttcattttttcgtataatcgtgtatttaatagtaataaaaatagtaattagtaataaaataaatccatggacataaaagacagagtcggtaaaaatattaggatcttctggaccatatcttagcttattagacttcagagatttgctatcctatcaaatttaggatctgtattgactgtattagatcagaactttttgtttgctcatcaatgatcagattcaaacgaaactagtttaagatgtgtttttttgggtagtttaaacatagaaaccaagggaaatagttggaagaataaactaatctatgatttatccgctagatgaaactagttgatcggattaacctaatcttcaaataatacttaatcctacagtcctactaataatcaaagtggtaatcttagaacggtcactttagacgacatgtagttagcgttttcataaaactaaacaatggacacgtggacatcgggtgaattaatgacccgcaaaaagagagattagtagaattggagagacagacccaagttaaaaagatctgaaaccaaaaaaaacaaagcaaacaattgaaaaaagagaaagagagagctcgagagagagagagagtacaggtcagaactcccacgtgcacttggggaactcaactcctttctctttctctacaaactctcgacacagacctctctctctatacttccctcacaactctctctctcaaaagaagctgaattctttcttcgtttgatgccgtgaatcacaaacagaaacagaggaatcagagagtacttcaccatcttgattctttcttcttcttgtttccttctttattacaatggtggagctcaaagatcaacaagacatgggagaaggtatgcaatgcattacacatccttacacaaagaacccaggtgggatctgtgctttatgtctccaggaaaagcttggtaagctcgtcacttcctctttccctgttcctaaacccaaccatctctcttcttcttctcctaaatccttcactccttccacgacctctctcgctctgtctctctcatcggcaagcaatggcagagactccactaacaacaacaatctcccgtttcttctggctaagaagaagaagaacatgctcgcagcttcttcttcatcttcttcttcttcctcttcgtcttcttctgcgaatcttatctacaagagaagcaaatcgactgctgctgcttacggtgagagtttcagccaaaggaaacgaagtgggttttggtcttttttccatctctactcttcaaaacatcagatcagcaacaccaccaaaaaagtcgataactttagccatttaaggaggaaccagagaacagagtcaaaaacagagacttcttccatgagggtcggtggtggtggaggcattgatgtgatagttgaggaagaagatgagagtcctaacaaagtggtttcagaaacgccaacgaatggtataggtggtggtggtggttcgtcgtttgggaggaaagtgttgagatctagatctgttggttgtggtagtagaagcttctctggtgatttctttgagaggatctctaatgggtttggtgattgtgccttgagaaggattgagtcacagagagaagccactaaggtcattagtaatggtggtggtggtgaagcagcagatgcaatgagtgaaatggtcaaatgtggtggcatctttggtgggtttatgatcatgacatcatcatctacaacatcatcaacaacatcatcaacggttgatcatcatcataatcataagatggggaacagaaactggggatgggctttcgcaagtccaatgagagccaaagctactgctactcatagaggtcgtaccattacagagtccacagctgacaacaagaacacatcttcaaatttggactcaatcccttcattgttggctttgaaaagctaaagcgagatggcattactaagtacttataatccgaatttagagaatttccatatttcattcatgtgtttttagttaggttgttctttcgttctttggacattggcttgatcttttaatgtaatgtcacactattttcttgttcctttctatgtttggcatctttggttatatgttattcataagcttgaaacctttaggagaatgagcttaggatacttgctgctttgtcttttactcttctatgattattttcttattcaatggattattacttaatacacattgtctaattctcccaagattcttttgtcttatggtgtcactgtgatggtaaaccagatgtgttacttgatagtactataataatagtaacaaaaccaacttgaaaaaagcagtcaacagggtttagggggttttaagtattaaatgagtggaatcaaaaggcacatgcctttgcacatgcattatgatgccaataccttctttgtttttgagccccacaatctttaagtaagacatgcaacaaacaagaagtcaacaacatcttataaaaaccatcatcatcatcatcatgatcaattcttcatcaccaaccagctaatctctataataaattacatctatgcaagccaaaatattgagtttgttgtccgacaaaaccacaagttatgtatttgcttcacattgaaacgtcaagtcgatcaagacataacaaatttgtttctctgtttttttttttttttttgttaaaatatttgtttctctgttttccctcgtagacataacaaatctgttatgattttatgatacattaatatattcatatactctataacagaactggtgtgatagaataataaattcagattgataatcagatgatatattgtgtggaagagatggtcgggacaaggacatcaaaaggggtccatgagctgaaataaagactacaatcctgcaaagagacagaagagaaaaaaggctgccttctgacgtaacactattcagataaattaaattatttgttctgttaaaaacaaataagagttctggggaccaagtttggacttctcatgcatattccaaaaatctgcataaatagattcttcagacgtgaccatgtgaatactatcaatttcccgttgtgaaaatatttatgcagcatcttttgatcgaatgtaggaccaactttagatctctgataacttttacgacttagtctgattccattccacagtaattgttgtctctcgtgttaatgtcattgtgtactctgttgaagcatgatcttaagtgataataaatacttgcaaaaatcactatctacacagaagtaaaatggactactaaactacattttctctgtaactcttgtacaagtatcacatagtgcagcttcactgcttcacatcactctagtttaaagcatgtgtatttacttcttcactgtgatatgaacatgagtcttcatatatcataccgttgagctgattgttgaaattgtagtggttacctcatatacttgtcctttgtgctataacggaatccatccctgttttgtcgaaagaaattaattagtgtcggactaagtgcttatataatatcatttaaaatggtgcaaagaacttcatagtttgtgtgttagtcaccttaatgaccccagcttctgtaccgcaaaaaacaatgtcattagcagtaaggaggcttgttatcttgcttcctgctgatagtcttcccactttctgttgtgtccttctcaaccaaatcttgtttccacaaaccatatgatctttactataatatcaaatagaattgtgattttggtctagctaggaagtgttttagctttatagaaaaagattacctgaagagtgtttgcggatgaacttcgattcaggtagatgaagtcttcaacaacacccattgctactatattagaccccttttctgctgttattgacatttggggctcatagttccttctcagatcctgtaagccatttttatcgaagtcacttttttagtctcacattgtgaaaaatgttaatgtagttttttacctttatattagacatctcaacatatgtgcttgagctatataacatatctttgtacacaaccactgaattgataggcttgttttgaagtctccagctcctcgtcggtgctttaatctctttctcccgtttatttgcaacaattaattcctgaaaaactatgtaaattacttcgtgtcttacataatttagtatcatttggatgaaaggcaaggtatatatggcaatacatacctgtatacttgtatctatgcatcctatataaatctttccttgagctgataccatactcttcacacctttacctttgaagatactttgagatattcttgatgaatcaagcagctgaagaaagttattagcctctgagtgtttaaatatgacttgggaactattatatgatattactatgtaaatagtctctgccttcttgtggcttaatgagagagagatgtctaccttcatcttgtgcccttttgttataacaaagatcatatttccgaatgcttccagtttccttattgaatcttttgtttttatgacttcagcacattccagttttcctttaactatctgccatacctatataaaagaaggtcaaacatagatacagttttgtcctgatcctagtgatctgtccgggaaacaaagagttgaatcattatcataccctgatagttttatctgctgatccacttaagacacactctcctgtttcagagagtgaaaagcatgttactgtgcttttgtgctccttgatgtcccataaaagcgtagctattttcttattcacattccacacctgatacattgttttgcattctcaaggtaagattctgtgaaacatttgtcttcctagtcatttttatgaaaagtatgatacataccctgattgaaccatctgagaatccactaaagagcaagcctttatggtagatgagtgctgttacagctccactgccagattgatgcatctctacggtttgtgtatgaacacaagatatgcgttggtcctatcaatatttgtgtatgattctgttatacatggttggtttaagttgtgaaaatggtagagattgtactaatttggttgcaggtgaagaaaaacttacagatttgctgaatagataatatgttgctttatgcagttcgtctgccatccaagtcacatgtgaaagacgtctcaaagactctctaactccttccgagaaattgactagtttgtggattcctgtgtgaaaactacactttagtataaaacttaagagtcacatactttagtttggtatgaaccattaattcactacatgaaagttaggaaattcacctttgccagagctaaaattatagatgcatatacaagcaagaagtctttcttcaagctccaaaccagggtggagaaattgtgctacctcatcaagtaaaacttcacatgctgagtattttaaactatttggaccttttgaaatctctatactgagccatgcaatggctataagacatgcttttgaaacactcttgtttttactctttagcccttcttgtaaaccacaaaacgtggctttgcctgtatcaataattcttctagctatcttacaacaccatccatctattcctgtatcctgcagaagttatgaagttttcataagtcactctttttggcttggctatatgataaaacttacaaaaaggtacctgcaagcattcatctgaccagttgatgtttcttatcatattcatatgtgacatagaagttagacctcctcttttcattagccaagcagcagtgtaaggttctcctgtccatgaataagttccaccgatattcgcaagaatgaacgttgataaaagctgcatatttgaaccttcactatatgtaactgcatcaagtagagctctggtagcttcatttctgtactttttgttctcaggtggagaatcctgtagagaatttcgatacgtaaatatatattcttagagatagaatcaacaagattttgatatttagaactaaccagtgcatttaactgaagcaatatatctgctgcaaagagtttgtgatcaccctgcaagtgtttaatacagtgcaataatgtgaccttaatgtcaaaacttccttctttctttatctgttgcagaatcttgattgctgatgacctgaaattacaagtaaaagtgtgaatggtagtttaaaaatagaaactttttgctgagatatgtataccttggtatcttcaggacctcatgaagaaattgaagagcaatgcaaatttcttcttggtctttgctttgcaggagatgcgcaaaaggagccactcgagtatgctgataaatatacttcctgtgaagtccatcaaattgcatgcattttactaaaatacttgtcaaggagatgaattcccctgagtttccactctttgcaacatcaagaagtccacaaaggacagaaggagagctgattgcagccaagtgcattgtgtttgtagcatgatcaaaagcagtgataagcacttcaattatcatcaatgatgctgcaggcggcgtcaaataagaaggtgaaggtataaatgtgtaacaagaagatgaagaagaagtggatgcaacaacatcaacaagagctggtaaaagctcaagactctttatttctgttggagatggctttatcaggtagatgagaatagctgcttcttgcacattttgtttgagagcatttgctaaatgacttaaatttaaacccttccttttgacctcctcaagagctgttctattaactgatatgatcttggtaagtgccgtcatcgacgccttaatcacggtcttctcctcggaactagaaatagccgtaaacagctgatccagaatgacatcttttagcatgctatacttgaatccttctttcctgttcagcatttgatatatcattgtaacctctgagacatatttctcatctgcattccctaacacttcctttatcaagctctgaaggttcatccataaatccattgttggagctcttctagaaagcgtctcaagtccattccctcgttttttggtctgcaaatttctcctcattccttcaaaacttatggaccctttttgtccaaatactgatatttcttccaaatctagttgcctcaaagaagatgcatcttctaagtgggtattccaagttgtctttgattgttgagcctgaatttcaaagatagaacggttaaaattaccgataaaactgctggatctgttggctaatgtgtcctcattataagctttgtttgcttccttgtgagcttgttgttgggaaacacagaagatgtttgctaatgtgtcctgatccacaatagagtttgtgggagatgttaatttttcattcattctttttctcggaactttcgaaaaatgaatgaaagtgtttggttagaggaatctaccgtgccaatgtcttctctagtatctggctgagactcgttcaagaattcattaaggcatctgactcttgtactttttccaggctctgcattgtaatcttcctgcaggttacaatccaaacattgagaaccttcgaagttattttcagatttctcaatcttccttgatgctttgattttgttgaaaatgtcattaagttcctcctcttgcaaatcaacactgtggaggttctggtactgcaataacttcttcaacatggaaaccaataaattaaagaaaatgtatgttacttttcgcccaattttgatgattagatatcactgagaatcttcaaaagcatgtcttttcattagtaaaaacctacctcacaagtttctgacaactctagcttctctgcaactgaatgtgcattagccgcaaatatttcttgcctgttcatatgtagtggttgagatttaggtacaattggatcttatctgtttaaggtagaaaaaatgaagagaaacagaaccaatctaatttaagtataagcattgaatccttacccatattccttctgccttctaaccggtgtctctatacattcacgtggcggctgatgagtctctccataggacataacttggtaataagttgctctgtatttatactttcttgcaatctctctgatctcttcatctgacttgtacacaccaggagtgaagaaaatgctctcgcagagttcaggggcaatgtcggttcttacaatctccggcgagaccaaaaccgactgcagaaaatgcaatgtggactgcaaggaatcaccttgaagatagcttacaatggagaggtaaaagtaagagaaagaaatcaagactgtgtttggaacaccagaagtggtggtcccttgttcgtcaagcaacgcaggcatttgaagcattctctctgagtttctcagacgagacgtcttttcttctgagcattcgggatgtatagaagcttcgatgctatcgattccccaatagagattggagagagcagagtgttcagaggagaattcaaacagagtattatcttcttcaatgctgagcaatgtgatgcatttctgcttaagcgaaatccatgcttcagggtctgatatgacgccgaggatgtagacgttgattgaaactagaatcgaatcaagagatgaattctcactacatgagataaaagtcgattgagaagatgaaaggtaagccattttcacatactttgttgcacacaagtttggatggttttatctatgggataagatgagagaggaagtgaagttagagattagagatgagagagtgagtgtgtgtgtatgagaacaatgtagtctcgtgaaggaagcagccaaactccagaacaaaagaaaatgattggtcctactttgtaatcttttgctgtcaaaaggacgcaagaaacaaaagtcaagagtgttgcgtgtgtttgaggaaaacgtaagagaaaaaacctaacatagctttttaatcatatgattcatattagtaattcctttttcacatcccagccattgtctcattatattatgtgtagtataagttgactttctcaattaatacagtagtaaactagtaacctgtatatatactctttttacacatattgaaacagcattacgaaataatattaaggaggctatgatttgtgtgagtagtggaagaagacggttgatgagagtattaagtgtagaaatcttaattcaaccacattatgaatattaatgtccatcagggatttgttgacttgacccgtcggacccataacacatagcttggagaaatgaatagagaaaatccactggactagtattcacaacttacaccgtaaggtttggagaatatgacatgagaaaagtgtgataaaatgttgacttatatacgctaggattgattaggtctaatggcttcggtgttctaattaaggaaatatcgttacaaatggttaaaaatttgggcccaatgaaaaagaagggaatttgagaattttctgtcacggggaaacaaaaacattatgagcgttggggaaaaaaaggacaaatataacaaaaatggtcaaagagctcatttccctcccatttctcacaatccaacaaattgattcttaattcttatgtcctttgtgttggcgctcattgtgatcgatgaaagctggagctcatttccctcccatttttcaccatgctcacaataagcttgtttttttttcatttaattgtttttatttatttataaagttattgtaaatgacgtcgaaatttcgaagaaaattaaaaaaaaacaaaaacgcatgggaaatgctttacactttttcaaaagacaaacgcgtccctcgttaccctatattttttaaaaaaagcaacaaacaaaaaccaattcgacaaatctccattccaactgtaaccaaaaaaagagaaaagcaaaaaaaacactctctgcgattcacactaagtatctaatgtatcaagatcgtcaaggcgttgtaggaggcggaggcggtggcggttctgcgccacacggaatcatactcgccgtcgttgttgcattagtggtgcttgttccgttcttcatcggagacagtggtgaggccattacagatgcgatcgcagagcttcttagtccggtgggacttctattgcttcctatcatcctcctcctcactatacagtttctctcgtcggaacgtggttccttcgtgtcggccattttctccaccggagaaccagaatcgattcacagggttagcggatctcccgtgggtgttgctctcttcctcgtactgatcttgttcttactctactaccgcttctctatcttcggcggagatgatggttccgatgactgatgcgacgtcgtcttttcagatctagttttttccctctttttcttttttagggaaaacaatatatttatgtctttattcgattttcgtttttattttattttgtttgacagttgaaagtcaaactatatacagcagttgcatttcatgtaggtacgcacgtgtgagtcacgtgagtgatgagtgtactgaggttgtataatttagtaaacatgatgtgattacgattaatatgaatcccgaacttttaattagctccggttctggatttcaaaataaaatgccaatgcgtttaatcataaactgaaatgctgaagatttttagtgtaatcaaattaaaatagacaattgaggatctggtaggaatattgataggaaaaacaaattgaatatatgtcatatgaggactatatttgatgggggacacattggagtttcggactcgtccccacatgaccacgtgagaactaatgatagttgagtcatttttctgatttctcatttgcaaatcctatagaataataatttcgtaacccttttattcctactgttcatgttaccaccatttacagggaaaattctctatgacaaatttctttaattttaaacaactttaaaagtacaaggataatatcaacaaatcaaattatatttgttcataccaacaaaaaagaattaaagtatatctgatattgaaaaattaaaatttgtaaacaacaattcaattttcactatcaggcctcatcatcagcaagtgatgttttcttgggcctagattgtgtgatatatactttccatgatatttgattttctaaatttcaaaactcgaaaaacatttagactagttattgtagggctttaccccaaagggagcccttccagaaattctcgaaggcccaagacaagcttaggcccaggagggggtttggaaatagttttcaaccagcaatagacgcgcctcggttagtacctcattagctgcgtcattgccccaagcgcaaagatgactttcaaccgaactaaaccctctttatttatacccgaacaaaaccaaccatcttacaatttcttttcgatgtgggactccctctagttatattattctagaaagaaacctattcgctagatgaattgaacagactctcttcttctccaagtctctaccagaagacggcaacctcttctttctcaatacaactttaaatctgaaagcgacaagattcgttcacatatataactctgtagctttgtagttactgaagatccaagggtctttcgatcacttgcagggaaaattctctaacacaaatttctttaattttaaatttataaagtacaaaaataataccagaattcaaaatcagagtatctgatatgaaactagaatctttaaacaacaattcgaatttcactatcaagcctgatcatcagagaaccacattgttacccttttctatgtacatcaaattatcaaacacgtaaagtgtgcatctaacttgctaaatactatctacatgaagaagaagaagaacttcaaaactattctttaagagtttccttattatgctggcatcactcggctttcagttgcagaatctcctttgctgtcctagcccggaaatatggcatttgttcctgtggaaatcatacaaacagtttcaattataagcagtcttacgtctttcaaaatgacactcacctactaaagacaatggcaggtttagtatctttctgctatttacctgagtgaaacaaagatccagacctctgctatagaagtcgatgtatttcaccataaacattccacaatcgaatctacaaaaatcggagacaaagttattatgaatgtatgaactagtagtagctgacatcttttttaggaagacagtacccatttctctgcattggaaggtcctggacaaattcttgtctccatcgacttacatcaaggtctacttcactcttatccctcacttcatcgacaaagtatctagcctgacaaatgaaaaactacagaatcaggatatatatgttatgacacaaaacatggtttccttactcatatattaccagtgcatcgaggattttaggctcccttcctttgaaagagtcaagatactggaatttctggtcctttatattaattacagccaaagtccagtggatgttcatatggatagggataaatatctgaaaacaaacaaggtctcttagatggtaaaatgaaaaaaaaatgtttgattatctcaaaaaggagtttaatacagagagtggtcgcagaagaagcacacaacaagtttaccttgtcacagtctttgagatggtagcccaacctcttcattgaagtccatcttctcactgcaccatagttgtatccagtcgccgaattaactaactgaggtgtgatttaaggtaatgtcttcttgttaatattcatgagcatatataggggctaaaatttaaatttcattagccatagaaatgggtataaccttagtgaagaaaaatgtattgaaaaaatgacatttaagaaacttctttggttctctagcttccctttctttcagcaataccatataaagattaatgacctacatagaacaaagtccaaggtttttaccaaatcatagaggtcctaattagacaagaaaattatattcaatctctaagaagaaatcacgtgagatttagatgcgtcgactaacctcatcgttcaaccatttgcctggtttaaggcacctcaagattttcccggtaatatcaatatttgagttcttatgagtaaccaagatgtttctgcagcgagagacgttcatacaattacatcacaaaaacaaaaatgaaatctcagagcaagtaaacaagagagcaagaatcaaaatcatacgaatcattagctgagaatgcacgcctgactgctgtctcctcctctctagaaagaggtacaaatgcctcacgttgtacaacctgaaaatcaattatagaacaatgaggcaccccgatttcacaaaatctaaagaaaccgaccgattcatatcacaaagcatacacgcttaaactttagccacacctctactggttcttcatcttgtctccaaaaggaagacaagcttcgtagtaaagcacgacctctctctttaaaaaaatcaacaaagcctctgtctttcagtttagaagtccggttcacagcactctcaagaacctttctgtatgcttcaaaacttgtgacatcagtcacagggcgattcacaacgagtgaactactattagctttagaacattcacccaccctcaagctcccatttttcagactggcaacctcagaaaacaatccatttcccatctccgccttctcttccacctcgtccacctccatagccacgttttcgacaccctccctacttgtatcatcagatatcatttcaacatctccaagctcatcatcaacatcaattacttctctatccgttctatagcgtaaagacgaatcaagtgcatttcttttccacatgtcattgttccttgtgagaaaggttcccaacacattaccagaaccttgtcgtgtgctacgatctcgaccgctattgagtatccgcacaggcgcatgaacttgtctccgcaacgaagatttcacttctgggtaacggtaaattcctggagccatgggtcttgatgaatgtgagaaaccggagtgtttacaagggtttaaaccggcgctccgtttgtggtaaccatccatatccattggtctgaaacagtaggaaccataaccctcgaaattcaaaatttgatcccacaaaactgaaaggtcaaaatcccccaattcagagttcaaaaccctagattggtttttcatgaaataactctcgggaagcaagcaagtttcaacttttcattaaactcactggcgtttccgatacacagattcggacccggacatgagacccgggcgggttttgttttggaagagataggtcaaactcaaatatgttgacttatctcataccctctagccgaaagggaggtttctgggtcatgttgtttcttactcggctaaacctatgttttttcttctcgttaaaccctctctgctctctgttctcctgaaagctgggcttttcacttcagaatttccttaaaaataaaagctttgatctttttagttattatcttcttcgatcgtgttaaattttgagacaaatcggtgatttggaacaggaaaatcaggaagatgcggatgctattaagaccaggtaatctgtgtatgcgcatttcagtttctgaaaattttcagtgtttaatctgctcgattttgagctgaattctggtcgtttcttcatagtattgtagcctggaggttgataactcccatatgaactattctatggtgggattcgctagaacaaaatgttttttttttttttgtttatccgctcattagtttgatcctgatttgcgttatttttgtcttatcactgcaggaattatattccatacagatacaaaatcatctcgtgttgtcacagtttgtaagaacttatcatctttatctgataatggcgaaaatcatgagaaaccatatacatttgagggtaataggcaaactgttaatgatatttgcaatgttttggagactggtccatggggaccttcagctgagaatactctatctgctctaagttttaaaccacaaccagaatttgtcattggggttttacggaggctgaaagatgttaatcgggctattgagtatttccgttggtatgagagaagaaccgagctgcctcattgtcctgaatcatacaactccttgcttttggtgatggctcgttgtagaaattttgatgctttggaccagattcttggagaaatgagtgttgcaggatttggcccttctgttaacacttgtattgagatggttttgggctgcgttaaggctaataagcttagggaaggttatgatgttgtgcagatgatgaggaagttcaagttccgacctgctttttcagcttacacaactcttatcggtgctttctcggcagttaatcattctgatatgatgttgacactctttcagcaaatgcaggagttaggatatgaaccgaccgttcatctgtttacaacattgattcggggatttgccaaagagggtcgagttgattctgctctatctttacttgatgagatgaagagcagctctcttgatgccgacattgttctttataatgtatgtattgatagctttggtaaagtgggcaaggttgatatggcatggaaattttttcatgagattgaagcgaatggtttaaagcctgatgaagtcacttataccagcatgataggagttctgtgcaaggcaaacagattggatgaagctgtagagatgtttgagcatctagagaagaatagacgggttccttgcacttatgcttacaacacgatgattatgggttatggttcggctggaaaatttgatgaagcatacagtctcctagagagacagagggctaaagggtctataccgagtgtgattgcatataattgcattcttacatgcttaaggaaaatgggaaaagtggacgaagctttgaaagttttcgaggagatgaaaaaagacgctgctccaaatctttcaacctataatattctcattgacatgctgtgtagagctggtaaacttgacactgcttttgagctacgcgattctatgcagaaggctggtctgtttcctaatgtgaggactgtgaacataatggttgatcggctctgtaaatcccaaaaacttgatgaagcatgtgctatgttcgaggagatggattataaggtttgtaccccagatgagattacattttgctccctcatagatggcttaggaaaggtcggaagagttgatgacgcttacaaagtctatgaaaagatgttggattctgattgtcgtactaactctatcgtttacacatccctcataaaaaacttcttcaaccacggtagaaaagaagatggacacaagatatacaaggacatgattaatcaaaactgttctcctgatttacagcttcttaatacgtacatggattgcatgttcaaggctggagaaccagaaaagggaagggccatgtttgaagaaataaaagcccgtcggtttgtcccagatgctcgaagctactcgattttaattcatggactaataaaagcaggatttgcaaatgaaacttatgagttgttttattccatgaaagagcaagggtgtgtcttggacacacgtgcttacaatattgtcattgacggtttctgcaagtgtggaaaagttaacaaagcttatcagctgctggaggaaatgaagacaaaaggttttgagccaactgttgttacgtatggttcagtcatcgacgggcttgcaaaaatagatcggcttgatgaagcttatatgctctttgaggaagcaaaatcgaagagaatagagctaaacgtggtgatttacagtagtcttattgatgggtttggaaaagttggtaggatagatgaagcttaccttatcttggaagagcttatgcagaaaggattaacacctaatctttacacatggaactcattgcttgatgcattggtcaaagctgaggaaatcaacgaagcgcttgtctgttttcagtcgatgaaagaactgaaatgcacgccaaaccaagttacttatggtatcctaataaatggtctttgtaaggtcaggaagttcaataaagcctttgtcttttggcaggagatgcagaaacaggggatgaaacccagtactatttcttacaccaccatgatatcaggacttgcaaaggctgggaatattgcagaggctggggcgctcttcgatcggttcaaggcaaacggtggtgttccagactctgcttgttataatgccatgatcgaaggtctaagtaacggaaacagggcaatggatgctttttctctttttgaggaaacacgtcgaagaggattacctatccataacaaaacctgtgttgttcttttggatactttgcataagaatgattgtcttgagcaagcagctattgtgggagctgttttgagggaaacgggaaaggcacggcatgctgcccgatcttggtagacagtttatcgataatctcgtttcttgtataggaaaaccaagacattttgggttatgtctgatttcagttaagtgagcattctgaagcacaagtatcccaagttttctggagagggcaatgtttgtttgacatctgtcagtgttcacagatcgagaaagatgggtgttcttcactggaaatatgctcaataaacaccagataattacttctgtttcccttcttcgtttgtatcatttaccagaaccttcatggtaacttccccatccagatgaatcttctgcgttcttccttatgttggacctgcaccttccgattcttatcattgccatttttgcaggatttgaaaggagactattgctcggtctatatgtcgacttcggtatgagctcttattcatcacgaaggttgtaatttctgtgactcaagagccagcctcttattcagtgaaagcaggaatctttaaggagattgtgatttgaagtgaatttcataagaaagtgtctgttttgctctgtcttacatacactgaaactacacgagtttgatagagacgagataacctccttcaaattcatcttttgctcaccttttgactttaataatatgttctacgtctgtttccattgataaagttctcttacgattcttgctcgagtaaaactatcattttatcaaaccatagaactcaatttagaaagacatgtttttctgataaatgaactcgattcttgattcattgtttacattgcgtgtggcttttaaagataacgtaaataattgataagttgggtgtgaaaagaaatacacaaagaagcagagacttttccatggaagcaatgggaatgataagatctttccatgctcatcattttgatctttccataccaaaactcataaagacaccagaaacattttttttacctttttgacgttacaaacagaaatcccaagctcaaaatatgactgagattcaaagatcccaattatcatctctcaccttcatttcacttattagcttttagagctgggcacttgggttctgtggcaattgttgcagtaactcttcttctaattcatcgtttggtgtttgtatgtcctgctaagagtaaatgcatatatattggtacacatataaaaagaaagcaaccatacctattctagttgctgaatgcatttttacctgtgtacttagctctggttgtggttgtagaggtggttcttgtgcaacagggtatgcttgtggctgagacattctataataaggttctttcagatcgaatttgcatgtcgatgattggagaattccgccttgacttgcaccgggcccccacattttagctgttaaaaacccattttgttatcagatcaggaaaagaagttgaaagttggttcatggtgctttcaaatgacgaaaacacagaaaaaaagaagaagcaaactgcacctgataaagttagatctatggtgtaactctgagcactgtgggctatcaaatgaagtctaccagtgatctcttgacctgccattacgtaaataggctgcgagagaacacatctgatttggtaccaatgcgttgtaggtgcaccgggagcagttgtgagccatctttggaccgtgctgttgaaaatagagtaaaacgagtttgaaatataaatcttcaattgcaaagagaaacatgaagatgaaaagttttgaatgaagaagaataaaaagcaagagttacctcccgtcaaagagaacgtcaaaccagcaggcaagtccatgcattctggtgcacatggaagcagtgaacttcaacgggatatcaatctcgtaaaaatcttcttcctagggaaacgaattcaggggtaaaatgagattgtaagtcattcaccccaccatgaaagatcaaatttcttgacataatggaacgctgaggaacagtcttaactagtgtatgtataccttcatttgagtgaaatctatcatgtggaacatcggagaagccactaataatctcggatcaaatgcatcaaccacgggctgtaaaatccatagataatgattcatcaatacccgttatgttgagaataaccaatatgttagttggtgcaaatacatatttcgattatgttgtgtgtgaatacatatttcgattatgttgtgtgtgaatatacctgagaaaaataaccttggtgcgctgatccatatagaggtgtcagatcaactccataatagttctgctgttgccaaaacatagcctgcatagaggaggaatgtatattattgaatgcttaagacttcatagaaaaactgaactaaaccagcatattttggaaaaaattctgggaagtaattcttagaataaccagttgcattccgtaccttatttgccatctcaataaataagaattcatcagaaaaaggtgccatgtgaatcctacagtgataaaactacatgagagtgaagacatagtaagaaattaaataaggaaaggctctcaaaggttgcctttaccttccgacagtgggaaacattttgccttttggagtcataaaacgatccctagcaattacatacgattctaacattctctcgttgaccaataaggtgcctgatttaaaacataagacttgtcattcaaatgattaatggaactttcaatcactagtgatgtttttacgcatatttttctctgaccaaggttttttctggtctaaagattccaagttttgtaattttcaaaggaaaaagacgcacaaaaaaaaaagtacgtctctgagatacatacccatcggttcagaaatcaaaatatctgctttctcaggcaactcgatatcctcaactttacccttgatgacctacacttgtgcaagcttcaacaacatcagacaaatgcatataacacaactctatatactgaccaaattgaattagaagtcttactgtgattcggtcagcgaataatgggtttccagcaatcagcttacgagcatactcagccatttctgatgcttcaaccgcatacacatgtttggcaccagcctaatatagcagaaaataaagatatgtatgaagaagatgaagcaaaaattcataagtaccataaccatctgatagctatgtcagccgctcacaccgagacataactagaaagtagttcacatttactttggcattactaccttttgcatttatggatcaccaattcggtggattaaggcaaggagaggttcgagtcagagatgtatttgtaaaactatattgaggacttcgcaataaacaagctttctttattcatagtctagctttacagataaagctctgcctatctatcaacctcttcttgtttgaccatagcaaagtcttagttctgtaacctatagcctaaatattaaatacctgggccgcaaacattgacaaaatgccactcccagcacccacatcgaccacaacacgaccagcaaaatctgaatgattctccatgactgcggcatagtacgtacctgaagacatgaatgaggttcataaatagttattccaagacaaacagcggtgagaagaaaacagaagatattcgtatgatgggtttgaatcgtttaaaatcaagaaaactggaacagttttgaaacaaacaacacattgaggccagatattttacctgtccgcacataatcttgtagcatattttgctgatgtagaagttgtccataataatgaaaatacatttttgccgatgacgcctctatcttattgtcgaacttgcttttattagctgaaactgttccattttgcaaggatgatcctagaaacggaaaagtgagaagacagtaaaggagtatgcaataatattatgcatagattttgaaatgggcaatgacagtgaatgcacaagtagccacagagagaaattggttctttacagtctgagaaaaaaacatagattttcataaaactattctataatggggcttcaatactttcttaattaaaagccagaagaaaagcaaacataaggcattcatgctataacacctccaagaaagtaaattgatacaatggcgcaccttgaacaacagaatcatttctccactcttcaaaggactcacaaaaatccttgctatccttctcatttttgaattttatattgactcctttggagaatgatttctgtttcacaaaatcatttcattatgaagaaaagtggattaataaagaaggcgagacaagatattcactttaaagaataactaaagaaattgatcctgctcccaagtactcaaacataacgtacctcctctgaagaacttgaaccatcagatacacagatgaaatggactggccccaacttgaataactgaggggaaaaacattgacaaagatataatacgatcaatgcacgcattctcagatacaacaagacccaataagattataaaacataagcaaaacaagttttaccaaaattcaaactttcagaattaaaatatatcgtcaattgtaaaaattagtatgaaaaccatcttcaatctcagattagttacagaaaaataacagagtttcgtcatcttcatgtagcaaaaacaaacgttttaaacgagatgggaaaaaataatcaaaaccgataagaaccagcggaacagtaacataagcatgtgaatcgacattcacctgagcggaagcgagatcaaaattgaaacaatgggtcgaatccgattgcagaaatcggagctccgtgactccatcaacgtaggaaaacgtagctacagctggagaggacgacgaaacggaagacgaagagagatcagtgactgactctaaagagtactccagctgctcaagctttttcacagaagatacctccatttttacaaaacgatgcgaatgtacagatacagtctctgtatgtgtgtgtaaacgaagcttaagaattttagggtttttctgctgagagtttccgaactctctgagagggagaagagttaaagccgccaaaaggagtaatgaaacggtggcattttcgtaatttttactatgattatgggataggattgtaagttacatttattaattcttaaaccaatttcatagatcaaaaagttcgaatgtgaatgtcatacatcaaccaacaagttctgcgaagaaaaaaaagctcgctttgatctgaaaacgaacgagatctttattcttcatcacacaagaagagaagagatccaaaatcatctactactttaaactaaccaaaacatcctaacaactaagtagctttgcatgttttcttgttatgtcctagtcccttgcacttgctacactgtagctgacgtttcatcatgtccaacggctcaaccttctttatctttggtcttcccggtgtcctccgtgtgggtggaggagtcacgcaaactaacccctccggcggatcatccagcatcatcctgtccatgtttgggacaggttgaatcgactctgcatacattaaccggtgactctcaactgttaagtacgtagagcaatactcatacgggcttttctctatgcatccaatcacggcaattgcatggctacaaggtaacccagttagccgccaggtcttgcagtcacaatcacactgattgatatcaactatactgaccgaagattctcctccattaacctggaataagctcccttctggcgatgaaacctgaagtaattgcgcaagttctatttctttctgtagcttctcttcgttagatggtgttagagttgtgacccattcccgggatttaacctgcctggtataaatagattgcatcatctttgctcgaaattcgtcaatcatttgggtaatgggaaactcatgtgcttcagaaacccagctgtagaagtctttcccaaagtttgagttcatcttgttatatctctctccttggaacagcgcatttgcccaatggtgtggttcactttctataacccagttgtaagcatcaggagatatgctttttatattctccaaggcaaggtaataacccacgggtgttgttgcatatgccacagagtagaaatcgttgagcatataccgtcttgcttcatgggaaaactgccccttcaagtccacatttagtttttcagcaagctggcctagacagtatgcatgatgtgcgtctttttcaaagacctgcgctatcgcattcttcagaccattctggaaatctgcaacaaaagtgattattcgcgactcagacaacgcagttttgagttgttccaaaaaccaaagccagttctcctctgtctctgaatccacaatagcaaaggctactggaaatatgccatcttcagcgtcagaagctgttgcaacaagcataaccccttggtattttgagtttaagatagcgttgtcaaggaacaggagagggcgggaaccttgtttaaacccagatattgaagcatagaatgatatgaaaagacgatggaagctcgaatcttcttttgtcatgaaagtggcaatactgccaggatttgtctccttgatcttctcacagattaggggaagttgactatacgcctctttataagaaccctgtagctgctctcgggcaatctcttttgccctccatgcctgtgagtaattcaactgaataccatactctttctttatgtcctcagcgatatccttgggcttgtagtctgggaaggctttcaacttctctttcaagatggttcttacccatcctctagttgcacggtaaccaggtttgatgacagctctctcacaagtgtgcctcgggttcattttcttgatacatattaactgagtcgttgatagcctcgatgcagtgatacgccatggacaaccttgagctttgcatttgacagacactcgatggctgtcatttttcttgtatttgtaagcaaacccatgggcgactgaatacttgtgtaatgcatctcggaattcaagaaaggtattaaaccgttgatcaacacccgtgatgacgttttcccactgctgtattgctgtgtgatgcctctgatcaaccaaaacaaaattgcacggcaacggactatcatctggcatcgccatttcaatttgaaaatcatttgccatatcctcctcgacaccatctcctacagcacaaatagcaggtaccaccccttctgatgccgttgtcctacttgacctgtagtagcaattcacagattagttactttctttaacctgattcacagatgacatgaattattatgagtaagaagaaactgacactgcacttcattacattatagcaatagttttggcgattaaatggcagacctcatagccgcaaacaacttgaaaataaccacgtacaattcttaccatgaccagctcaataaaccaacacaagttctaacattggactctatagaccaaggaaataaaaatgtgtgaaagaactagaacaaagcaaaagaaacatctacctactagctggcatgacggagagatttttggcagcagcttcctcgggaataacgaagatctcgacagtccctgcatctgaagaaaagttgaccattcgtatgaaatctttgtccttagagatggtaataagggtcttcttgtttccagggagaaagtacttaagggtcattgcctccaaaccaaacccaaaattttcagccagctcagacttgaaatcagtcattgaagtattctgatcaatgtcaattgcaaaagcatcgccgccagaatacgacaacgatccatctttgatagtaacaaactcccctcctgactgacatatagctatgactttgttggtggtcatgaccaaacgatacctataaaaccaaatcaggctctatatcacacctcaatgtacacaattttatcaaaatcagccaacgccatggccactgtacgaaatttaaaaacttctattaagttatgaaccctaatttccaaaaaagaatctgaaattgaatactagatcacaattctgacatcagaaatgaggatcggaagggggaaacaaaccctactatcgaactgaaccaggttaaatctagggtcagaaagaagacattggagtaccgtttattacgccagcctgattgagaaagctcaagaattgggaatctcttcgatgggaaaatataaaattgccgagctttttttcttctgcagaccgagagagagagaggagatggtgagagtttgaaacttccacgtacggcctcagagagaaaagggtgatatcaaaacgatgcgtttagaaagaacctaagaattagagtagcattaaaccaaatcaatctaataaccaatggtccggtctgaccaatttaccgctccctaactaaccgtatacgcaccgttttaaagtctttccctaatcagaatcttgagattacacagagagacagggcagcaaacaaagaagaagaagaagaagaagaagaagaagaagaagaggatgagttgcgttacaccagcacttcctccttcactctttactaatgggtatctttcgtctcctcagaatatctccgtaagcgccacaaaagcaatttcttcttctctacttccttggaaatgccaagaaagttttgttggtgatgtaatctgaacttttgttttatttttgcagatgaccaacttgaacagttcggtaaaggttagtgattctggtgcttataaatggcgccttgtgatagcctacgatggcacccgttttgcaggttcgtcttctcacaaaacttgtgttcttaagtttttgatgcatctatcaaaatcttgtttccttatatccgcgcatttggtttctcaggttggcagtatcaggagtcaccaccaactatccaatcaatgttagaaaaagccttaattcagattacagagctcggtagaaaagagcttcagcttattggagctggcaggaccgatgcaggagttcacgcttggggtcaggtttgactaaagtcacaactctctctttctcaacttctcaacacaaactaaatcatccgttattcttcaggtagctcattttgtcactcctttcaactatactagtttggatagctttcacgctgctttgaacggtcttcttcctaaagatatccgtgtcagagagctgagtgcagcggttcctgagtttcatgctcggttttctgcctctagcaaggtttatcgctaccagatatacaacgacactttcatggacccgttccagcgtcattgggcttaccactgtgcttataaactgaatgcttctaaaatgcgggaagctgcaaatctttttgttggaaagcatgatttctctgcatttgctaacgctactcgggaagatggagtacctgatcctttgaaaactatatctcgcttcgatgtcattcaaatggtaaagaagaaagatcttagttctggagaagttagggtaaggatcagactttgaccttgttggtgttttggtgtttagggatctcttctacagcttgaagttgaaggttctggctttttgtacagacaagtcagaaacatggttagttctacactctcttttacatgcttgacatggcgatataatgtttttttagtctaaagttctttacatatgcaggtagctttgctgattcagattggaaaagaagcactggattcagacattgtcccaatgattctcgaaaccaaagacaggagggtgcttgcaaagtatactagtttgcctgcgtcgcctcatggtctttgtcttgtgtctgttaagtataaggaagatcatctaaagcttccattggattgtcctgttactagttctggtagacatcacactataacaaaatgtaaacttcccttctattgaaacattcttctgtttgacataagaaactgaacaattagaacattgtctatttagtatttacttctctgcaagactacaatcttcacaggatcaagcttgacattttgagtggaaaatcctgatactatgtctcaaagaaacgaagctcaaccatgaactcattctgttttggggagtacgaaacaacagccttggcagaaagaagcacttgaagagcatattcaatagcaaatactgtcttatctacagtcacagggttagctccgttcctcagatcgatctcaattccagactccactttgaaactaaacggtccaacaatctgcaaaacccgtagaagattgttatgaatcaagtagctgaaactatgaatttgagaatttctgtgtctggtagactgtttgctcatagtagaatatcgtttattttacctgttgctgtagagaaactaatacttcagggcagattttctgaaatgcttctaaactaggctgccgagaatttaaaagatcttgtgcgacgctagtggcaccggtaagaaacctcaaaccatgcggaaagtctaatctagcatggaaacgggtgagatcaaagaagaatttctggaagtttccatattgagctgtgagtgatgcccgccctaaggcatcagccatgaatccggaatttacagatggaaaatgaagagagaaccctccaacaccctcagaatcattttcaaattttgatctgattgaattttcaccaaatgctgcggtcatcacagagcctgtgggattaatgaaactcttagtaacagcaccaaaaagatcataaaaaagacccgtgcttccaaacctgaaggctcaaggctcactcatacataaaattttcaatcagaggaaaacaaattagctattcaatagtcgaaagaaaccaaaatatcccaaaaattcccatttccatcactagttctgtaacatcaaatattggaattggagaactcaaatgataagagttgaacaaaacttattagagaaatcacaaaactttcagtcttgacaataaaatgcttctgaaataagttgaagaaacttatcataccgataatcccagatactgcgacatgaggactactgaggaagacatcatagggcttgcaagtttcgagctttggagtggtacccctccagagatccatgtttgtcctataagagactgcagatttcagagacaaaccaggaagcagtgacggtggaggcacttccatagtatcagaatgtaacttcttgggtgatccgctgttatggtgtaaacataaatggtaacttggaccagattcagcaggaagagatgctagatcaatagccattgagagtggcacatcccaatattcaccatgtttatccacaaaaagtccaggccaaaccgcttctgctgtcagattgtgaagcggaaactgaaaccaacaaaaaatagagacgtgagtcagaacaaagtgtagcggacttcattacctcagcaaccaattggtatgatccaaatcaacaatgaatcacattgccaaccaaatagtgaaatattattaacagagtcaagaaattgaaaagagggtaacagagaaattgcctcgtgattgaagatagccttagctctaggattcttatcgagatcacctttgtaagcatcatagctaagaagcaaagtatcatctggtgataacaaaaactcagaacaaaaacccaatgcgtacaaagatttatccttcaaatgcttgccaattgtgtttaaacgagaagctactgtagacgaagaccctcgaccaaaagctttagtcttatctatctccgttacgaatctctgaacatcgaattggcccagaagagacacaagccttgggattcacaaaaacaaaataattatcgaactttcaccgaaagtatcagaaaaaaaaaaagttaggatttttgaatttggggaggtataccagttgttggagaaaggaagagtgaggactctttgaagagagaatccaccaccgcctccatctccggtgttgggacggataggggagaaggaagggatgagaggtgaggccatgaagcggtggaagaactcaacttgcttagggcgagatagacgagtgcctctagagagacctagaggaagaggatcgtcaggaacagctcgtgcggtgccctcgagcgtcaccggagttgacatatcgaggtcccagatgtctccctctccgacccatctcattctgttcatctccgtcgtctccgccgccgtcgctcgatttctacacccagctgacctggagatgaccaaacacactcttactctggatttgttcgataaacaccttgccgtttttggttttcataagaagaatgcttcccgtttaattaaaccggcttaaagaacaaagaaggcgtctaacggttaaaagaatcgatttattccggttatggattgaattattcggtttgaataaaagagtaggaacaaagaaactaggaactttagaaattcatatcaattcatttgcctcaaaagcttaaaattcaatgtttgctatggaattaccagtgtctatgtaatgattaaaataaccgcagctagcgacacataatatctcgatgcttttttaatctttattctttgtgaataatatacaaatgtttagaagagaaaagttcttttttaatggttggtagggggtgtttcgtgcatggttcctctaggattccaacttggtcaggcttatatataaaaggaccttgagttttgaaccctaaaccatcagacacaccttccttcacatgcttctgtatctttagatatatatacacacgcaaaatacatccctctctctaaaacatcataatgggaggttcgtggcgtttcttctttagcttcttcggcagtttcaaagcgtggtggcgacggagacagagatcgaaccaggcaggaacggacgatgagatgtatggtgaagatagtgaagccaacttctataattggtacctcgttgaaccagctattaaccggagatccactgatttcatcaaaaggttccacgagactcgtgactgattccatcaccttcttattcttctcttcagctcttggagtacgtagtagtttggaagaaaatttgtttgttttttccggtttcgtctctgtagtacgtgttttctatgtgatttcaataaatataatcctcattggtcaagtctatcgagttgaatattatgtgtgtttttctctacgtaccttattaatgcatacgacaatgataaatcaatcgttggtttgtgttatatatcaaagaaacacaaaaacagtggatatttcttgtaaaaagttaaataattatggttttacattacttcaccttattccaaaatgaatctcaaacaaagaaatgcataatcaatgagtctccacagaaaaaagggaagaagcttactccttaaaaaaaaatttagtaagtataattttcacatgggcttgcataaagttccttatgagaagattgattgtgatgcctgtataagtatcgtagaagaattagtccgcatatgattggtcaaatcttaaaccaaaagtgtgtatatatttagataaggataatcgttttcttcaaataaaagtgtcttggaaggcgagaagattgttctccaggttaaacccaaacatgggatatgatttttctgttgtctatatcaattactctcgttcatgttgttgttatgaactaattacatttactatgaatccttttggataatttattacttcactagagaaagttgaggaggtgtctaatcataagtttgccaaataatcagtcatgtacgttcttattattatagggcgatatgctccaaataatcgaaaccaaaactcactatctttatacaaagcttttggaaaagaaaaacgaatatatgttagaaagaagaagctttactaggcacgaatcgatacaaaagcaatgaaagaatcagtcagagctcgatatatatgcttataatcaagaagaaagaagatatttgtttcactaaaacatatgcctctctcttttttttttagtattttgtgtcccaaactttaagacagcttgaaagcactgcttggtggttaagtatcaacattctatatataggcttagtcactttgttacctttctaaattcttaccttctccgaagcttctcacctttgtttttttttttttaccttttcggaacatgtcctaactcataggccttttactttacattcctcttcgcttatatgatgagagaaaaaaaaaaaaaaaattgttcacgtccctgagggtaattttagcttcaaaattcatcttttaaattaattttaaaattttagtttacttacatacctaagttttcttataacttagcttaatttcaataaaaacaatttcaggtccgaattcttctgtccaaaaaaagatctatccatgttaggtctatatataagactataatcttagagatgaattaaatttcgtcagaatgttgcatcttttgtttacatgtcatgcatgtgtgcatccagtgcatgtaaccacaaaactatctaaaatcagatagttgaactagttcatgagataccataccaagttggtattaccaacccaagcacaagcatgatattggggtacgtaatagcagccattgtataaaattctcagcatgaaataatcatatgatctaattttagacaatacgtacagtgtagagtaatagataactttgatatattctactaatatagctactttcgattcctcgccaaatgtatgcgttggcttagattgatacctaagctggtcctagctcaagtcaaggaacaagaaccaaatcccaaagtacatcaacgtacaagaaactcctacttttaatgtgtgcccaggccatcattacttctctaaggaagggaaaccactcaactacctataaaaaatatatcatttttcttttcaataccaagagtttttgagccgaaactcgtaatccccgaaaccgtagcatataatattattttcatctcaaacgtcactcgaaccgacgatctctaagcttcgcgtaagatctttaccaattgaaaaaataaaattaaaaaatatatcatatatttgttaaatgaagagaactacattataattagttaactagcttccatatatattaatacggagcatatatatataacctctccagactccataatgctattaatttggcactaactatggtaaaagttggaaatataaagttttaaaagtagtttcgtgctaacagaaaaaataaaggtttgattgcaatataagtgtggtttgtttcgtgtctctcctcaccagtgtttacatgatcaacttcattttcttatggtgtatcttcatctacttcttcaaagaccctcttgtcttggtgtgtgacctcgattccacaatcaaactcttttgttacatcttcatcttgttttgtgccatgtttttgttcacacatgatctttacttcctgattctccacaactttctcgatgccactgatcttgttttgctagattgttaagaacacacaagtttaaagaataactctctttattagctttagaaaatcaacttaaaactaaaacaactgacctcttcatcgacatcttgcttgatactatcttcttggtcattgatcttttcttcttgatcccttgcatcttgcttgatgtcaccgtcttgtccaatgttctttccttttacattctttgccttttgttgatcaacatcactatctgattttgtaaccgcctcttcattgtcgtgatgtgcaacatccgcgatgagttcttgatcagtttcgctaatgctttcagtttgaaccgatgatcttggaggcgtagaaataatgacaggtcgtctgtttgtctgatgccaagcaaggtgggtcataaaatcactgcggttatggatctgcacaaataccatatccaattaaatttaaaagagttaactacaacatattaggaaaatcacaaaagaatatggaccataattaccaaccatttgtgtggggtaataataacatgggttgttgttatacatgtaaatatattgtccccaaacgtgattcctatatattatgaaaataaatatataagcaaagaaattagatgaaaacaatattcaaactttagtttaaaaacaaaattgaataaatattaccaggtgtgcggaggacaatatggaattacgtgttgaggagcttgctgatattgatgcggcggtataacataattgaatgatcctacaaatttaaagttatgaagaagaaaaagttgtttgagaaagttttgttacacaaaataaaatcataaaaccaagatttagaaagagaaataaggatatataaaccgtttaggttagggtgattcatgttttgttttgcaccagcactagccaaattgcaattggttgttcttccatcaatgatgggtttagaattttgaagagctctaactgtagagacatagtctctaaaagtaatctgaaaattcaatacaaatcaatcgtcttcattaaaccggtattaaatatggaatcaaaccatacagagtacaaacaaaacgtgtttctaggtcagaggaaatcttcatatttttaaatatacacaaaggtttactaatgaagttgaattaaggaaaagaaaggatacttacaaaaccatagccttttgatctgccaggataagtttcagaaacaacattagcatcaaccacttgtccgaattgttcaaagtatcttctcaaatcatctgcagttgttctccatgttaaattccccacaaaaatcttcgtaaccctagtatcatgattattagtttgagacatcataaccaataaataatctcttaaaaaccaatttagagaagaaacagaaagttgcagggtttaagggtttggaactaatatatatatatatatatatataatgagataagagttgttaaaaaatatatatctatatatatctatatataaggagataaggaaattagtttcccaatagaaaaagaaattaggatattattagatggaatgcaattttatttatttattatttgtttgttttttaatcttttaaattttatttattttttttttttgggtcatctcctctcttatctctatgatgactataccgtttattttcttttcccactctgcttaggaagagaagagagaagagagaagagaagatacttgaggagatgttggcgagagctccaccgccttattttaatttcccggcgaggaataatactatctgtaatcggaatgagattgtgcggttgtttcgtaacggcggaggagtggtagctagaggagctggtttcactcggcgaccactggaaacttcgagctcttacgacgattccaccgatgacggattcgttatcatcagtgcggcagataaggagaatgagttcgctcctccgccttcttccgatttactctcttcgattccgtcaggtaattttggttagttgctagcttttgtctccctcctcgaattgtagtacctgtagtggattttgtaaaattaggtattaggaactgtgttcgttattattattggttttaatgatttatttggtgttgtagaatctgcgagaagaaatggttcgcgttcgagaggtctgactgcgagttttggaaggttaaaggcccagaaagtgaaagctcttgttgggaaggtaacgcagaagaagcagcatatgagtcacaatgaggaagaagacgaggatgacgcctctgatgagaattattctgcggatgaagggtttggttcatcatcaattctggatttgatgaggaagaagctggctatgaaggctattcctagatcaggaaaatctgcagagaggaacgaggtaaaaagagctagcaaagtgcgggaatctagagagtcaagaagagatttagatagattggaaggagatgatgaagatgttgatgaggtttcaaatcctgacaggtttactgataatcagagagcagggtcgcggagttcatattcaaaaggtggttatgctgctaactccaggggtaagggtgataggctttcggttgcaagagatttagattcatttgagggacatggtagagctattgatgaggtttcaaaccctcgaaagtttaatgataacgagagagcagaatcaaggagttcatattcaagagactcttctgctaactccaggggtagagaagataggcgttttgttgccaaagagttagatacatttcagggacgtgataaagcttatgatgaggtttataatcctcgaaggttcactgataatgagagaggactcagaggaggatcacattcaaaaggctctgatactaactctcggggttggggtgataggcgttctgttgtatatacaagagatatggatgattggagagagaggaataaaaccaaggatactagggagactggcttttttagccggaaaacttttgcagaaattggatgtagtgaagatatgatgaaggccttaaaggaacagaattttgatcgcccggcacatattcaggttcagactttattttcacacttgataaatcatctaggtgcatgtgtatgtatacaaatcttcttactgttatcgtgctaccattcttgtttgtttgacgcaggctatggctttttcaccagttattgatggaaagagttgtatcatagctgaccaaagtggatcaggcaagacactggcatatcttgtccctgttattcagcgtctcagggaagaagagcttcaaggacacagcaaatcgtctcctgggtgtcctcgtgtcattgttctggtaccaactgcagagttggcttctcaggttcatttctttttatatgtgaatgatcttcctaggttgattcattggttattgatgtgaatgtatttagctgaagacaattgtttggtacatatgaaatacttggcaggttcttgctaactgtagatcaatatcaaagtctggggtcccgttccgttcgatggtagtgacgggtggcttcagacaacgaacccagctagaaaatttagagcaaggtgttgacgttttgattgcaacaccagggcgtttcacgtacctaatgaacgaaggaattttggggttgtcaaatttaagatggtactttaaatctttcaacaaagcaaactttccccattgatttgacgagatgaaagactttcaccaacttttgtgtgaaaattgattgggtacaatcttggttacgtgttttgcagtgccatcttggatgaggtggatatactctttggcgacgatgagtttgaggcagccctgcaaaatttgataaactcttctcctgttactgcacagtatctatttgttacagcaaccttgccacttgaaatatacaacaaacttgttgaagttttccctgattgtgaagttgtaatgggacctcgagtgcaccgtgttagtaatgctctcgaagaggttggtattaacataagtgattggaaatatgtaatgggatcaacaacagtagcagaatttttgttttgctaacttggttgctgaataatcttctttgactcgtccctgaccaatgttgagttgcactgtgcagtttcttgttgactgtagtggagatgataatgcagagaaaactcctgagactgcatttcagaacaagaaaactgctctccttcagataatggaggaaaaccctgtttccaaaactattatcttctgcaataaggtaccatggtcgccaacctactgcttttcgctactacttgaaacctttttggacatctcagtctcatatccacccttttatatgcagattgagacatgtaggaaagttgagaacatatttaagcgggttgatagaaaggaaagacagttgcacgtcctaccttttcatgctgcactctcacaagagtcaaggcttacaaacatgcaagaattcacatcatctcagcccgaagaaaattcactgtttctggtttgcactgataggtacctcaatttggttactgttatcgttttttatgatgctatattgcctgaacattgaagatgttaattttttgtttcttcctttttcgttccgaaacaattgcagagcctcccgtgggatagatttctctggtgttgatcatgtggtgctctttgacttcccacgtgaccccagtgaatacgtgagacgtgtaggaagaacagcaagaggggctaggggaaaaggaaaggctttcatctttgtggtggggaagcaagtagggttggcacggaggataattgagcgaaatgagaaaggtcacccagttcatgatgtcccaaacgcttacgagttcacaacctaagtaactcttcatcttgaccttctttttattactgcaatctgtgtgttgaaagtttcactctgttgttagttaaaagaaatacgtagagaagccaagtccaaattttgaccattagtctgttgtaatgttgttaatgacacttaacctccaagctcatggagtcttgcactgaattgatgccccaaatcaagatcataaccaattaggatataaagttatctaaaggatatggaagatttggacataagcttatcttcttcctatcatgcgtactgtagaggagaagcagctggttgcaagcaaacacagtctgggaatttattacttgtctcattttgttaaaaagattcacatggcgccaatttgccagtaggttgtgtatacgtacttgtcgcattgagaaatagacaaatgatcaaagattgggtgggaactggtgatgtatgtgaaagggaaataaatcgtcatgattttgatttgcaataaagattttgaaatggcagtttatcaatcaaaattaatacaattcagattttgaagttgcactatctgtaatctgtatataaatagaaaatatctttggattggcaaaaatacttaaatgtccaaatcaattaaattaattcacaacagattttgtttgtgtgacagaaaaatgaaaaatcccctataaaaagagctcataagaacataaattaaagcaaaacgaatagattagctacaacgaaaatgaattgcaagattgaattcatgagcttcctcgtgatgacttcaatagtcatcctatttctctttgtttcaggttagtctcttcgtgtcttaatagcaaactatgggaaaatattaataatgtgttactctatctcaagtctttttttttttttttgtatttggtgaaaagcagggaaagttgaagctgaaccccaatgcattggatcatgtgaaatgcttgctgactgtaacacggcttgtatcaggatgggatacttatttggccaatgcgttggctggaaaactcccgatatgtgttgttgcaaccattgaatgtttcgaatcttaaatgtacgtattgaaaatcatcaacaaaaactctttaatatcttgattaataatttattataatactactatataacaagcgtgtgagtttttaacaactttgcttaactcaaacactgagaaaaataaggaaaagaaaacatttgcatttcatgaacaattaattataacttatcatagtgtataaagtttatttgacgatttttaaaaaaaacattattactaccactaatcaacattattaagacattgatccgaagtatacggcgattgatttatgtgcgccttgatcatatttttgaaatgatagccgctagctgttcgttcatatataaaaataaaactataaaaaaacaatccagcttagactgagtgaaaaactcaaaaaaaagtagtaattaatgtttatggtggatcaattttataaatgccgacaaaaagaaaaaaaaaaggatcaattttataaattcaaaaaaatatatataatacgataaaaatggccttattgataattaatgttgcaatttgcacgatgctgagctggttttatgggtaaagtcaatgagtattgggtaatacaaaaataatgtatatgtcaggtcactggttacacaatttatgtatagctcaaagaaataagagttagcaaggatcccagactaccaatggatcaaccaaagcaaaaagtgaagattccctgcaatcatccgttagaatacatacaactgaagggtggaggatggcccggatcatatgactatgatataaatacttgcgcaggatgcgatgaagattatggcttctgctactactgcgcaagctgcagttttcgagcacattcggaatgcatcgagtggccagacaccatcgaccacccgagtcactccagacatcctctcaagaaagtctcccccgggacaattgactatacagatggcaaatgccatttttgtagagaagaacttgttgatcccatgtatcactgttccttgtgcaacttcagcgtagatgtgaattgttggaggcatccgccacagcgtactatttatcaaccaaagagccacgagcatacattcaccctcatgccgagaaagatcacattcacttgtaacgcatgtgggatgcttggtgattgcaatccttacttttgttttgaatgtggattcatgctgcaaaaaagactgcattgatttgccccgagtgatcaacatcaaccgtcatgaccaccgcatttctcgcacttatcatctcggccacggcgattgggatttatgtggactttgtcgcaaagagatagattggagttttggagctttcacttgcaagcgttgtcctagttatgctgttcattcaaagtgtgcggtaaggaaagatgtgtgggatggagaagaactcgaagatgtacctgaagaagaagaagaaattgaagatccatacaaggtaataaatgataaagaaatcattcattttagtcatgaagaacatagtctaagacttggcggtgatgataatgttaccggttatgaaaagatgttgtgcgacgcttgcatcactcccatcagttctgatccatttttcaaatgtgtgcaatgcgagttttttcttcataaagaatgtgctagtctccctcggaggaaacgaagtatcttgcacatcgacaagcttgatctaagggtaaaaaataaggctggcaaccattacaagtgtagaagttgtcaaaaattattcgatggcttcaggtacaagacaacgtttgataaatttgatgtgcggtgtggatccatttctgagccttttcaccatgaactgcatccccatcctttataccacatcttttcaccagaagagaagtctcatatttgtggagcatgtgatagacctacacagtatgtcttaagttgtactgtgtgtgagtttcatttaggcatggattgtggcactttaccaacaaaagtgaaacatacatgcgacggtcatgacttatcgttgcatcatggagctggaaacaccgacggtccattgtggtgtgatatttgtgaggaagagacagatccgagcgtatggttttatggttgtgatgattgtgtgtccactctccatatcaaatgtgtacttggagacatgtatcacttcaagccaggaaacaaatacggcaaagctgaactagttgccaacgatggtatgactagacctttttgcatagtttgtgaagagcgttgcatgttcccttcctttcttaaggctaccgtttcagattcaactcttgtatacgcttgttcaatgaactgtgcatacgatagctactggaagaagtggtattatgacgaatctggttaaacgttgagtatgtctgaaaggccaacgcaagccatagaaaagcgccaacacgggaaacccaacgttgagtatcttcttttatttttatctttctttcttttttcttgccttaatgtataatttcatttgttttcaatggtgattaatttgtattccaatcctatttggaactttgtgtgaggggttcataaattggatctatttgcttccatgtaatgcacgcacctcttgtatgataaataaaaaaaataaaaaaatgtgtgagttgttgacaattttaatcatcttgttttggtctccgaaacaaagaaaaccgtaccaaaagtaaatttgttaaacaaaaagtaaaactcgtcgacaaaagaaaagtcagaatcggttattgatatcataaatgggagagccaacgtttgatcacagcttcaacggagttctatttggttgtgaggaggcggcaaggcgtgacaaaatttagattgttttttcaaaaaaccatatatgtaatattactactaatattacatatatggtttaagtaaaaataagtggtctgcataaagagtgtactttgatgtcgtccaatgtttgaatacattttgcatgctataagatatatatatatatatatatatatatattatttttttgggatgaaaaacagggaaagttgaagctgaaccccaatgcattggatcatgtgaaatgcttgctgactgtcacacggctcacatcaagatgggatacatatttggccaatgcgttggctggaaaactcccaatatgtgtgttgttgcaaccattcaatgtttcgaatcttaaatgtacgtattgaaaatcatcaacaaaaactctttaatatcttgattaacaatttattatgatactacaataacaagcatgtgagttttgacaactttgctcaactcaaaacacttaaaaataagaaaacaaaacatttgcatttcattaacagataatatatttgacgaaaacttttttaaaacaatatattacgaccactaacacacggatccgaagtatacggctaatgccatgatcatattttgaaatgctgttcattcatatataaaaataaaactattaaaaaacaatccagctaatactgaatcaaaaactcaaaaaagtaatgttattggtagatcaattttataaagtcaataaaaatatatataacacgacaaaaatggccttattgataattaataaatatttaatgttgcaatttgcacgatgatgagctggttttgtcggtaaagtcaatgactattgggtaacactaaaatactgtatatgaccagctcaaagggatagaaagaaaaatgagttagcaaggaagtatatcacccacccacacatgacaaaaaagtacaaacttgtgccttctctctgatattcaatctttcgacttcttcacccatcaaaaatggagccgatcacggaccaaccaatggaccaaccaaagcaaaaagtgaagattccctgcaatcatatgttactctacatacatttgacgcaatcatatagttattgtgcagtatgcaatggagattatggcttatgctattactgctcaagatgcaactttcaagcgcattcagaatgcatcgagtggccagacaccatcgaccacccgagtcattccagacatcctctcaagaaagtctcccccgggacaattgactatacagatggcaaatgccatttttgtagagaagaacttgttgatcccatgtatcattgttctttatgtaacttcagcatagacgtgaattgttggaggcatccgccacaacgtactatatatcaaccaaagagccacgagcatacattcaccctcatgccgagaaagatcacattcacttgtaacgcatgcgggatgcttggtgactgcaatccttacttttgttttgaatgtggtttcatgctgcacaaagactgcatcgatttgccccgagtgatcaacatcaaccgtcatgaccaccgcatttctcgcacttatcatctcggccacggcgattggggttcatgtggtgtttgtcgtaaagaaatagattggagtcttggagcttactcttgcaagcgttgtcctaattatgctgttcattcaaagtgtgccataagggaagatgtgtggaatggagaagaactagaagatgtgcctgaagaagaagaagaaatcgaagatccatacaaggtagtaaatgataaggaaatcattcatttttgtcatgaagaacataatctaagacttggtggtgatgatgatgttaccggttatgaaaagatgctgtgcgacgcttgcatcactcccatcagttctgatccattcttcaaatgtgtgcaatgcgagttcttccttcataaagtatgtgctagtcttccacggaggaaacgaaatatcatgcacaccgagaagcttgatctacaagttacgaaggctggcgagtataataagtgtatatcttgtagaaaaatatttgatggcttccggtactgttcaaggtttgaaaagtttgatgtgcggtgcggctccatttccgagccttttcaccatgaactgcatccccatcccttataccacattttgtcagcagccgaaaaacttaagctttgtggagcctgtggtaaatatttacactatgtcttaagttgtactgtttgtgagtttaatttaggcatggattgtgccactttaccaagaaaagtgagacacatatgcgacgctcatgatttatcgctgcatcatgtccctgggaattcaaaaggtcaacaactatggtgtgatagttgtgagggaaagctagatccgagcgtatggttttatggatgtgatgattgtgggtcaactctacatatcaaatgtgtacttggagactttaatcacttaaagccagggaaaaaatacggggaagctgaactagtcgtcaacgatggtatgactagacctttttgcatatcgtgtaaaaaacgttgcagcttcccttccttccttaaggctacttgtccaaatactttgtgtgaacaacgttgggggttcccttccttccttaaggctgcttctccagattcatttgttctgttcgcttgttcaatggactgtgcatacgataaatacttcatgttgtggttttatgaagttgattattaaaccttgagtatgtcttaaaggccaccgcaaggcatctattttcgaaagcggaaagctataatgatgtaatttccttcatatcttcttttatctttatccccttcttctttttttaccttaatagtttcatgtgttttcaattcttctagattttgattaatttgtattccaatcctatttggaacttgtttcggttgttttggaattggatcattttctcaactttttaattgtctactaataatattacatatatggtttaagtaaaaataagaggtctgcataaagagtgtactttaatgtcgtccaatgtttgaatacgttttgcatgcaaaaggattaagagaatccaagtatttccttatattggcaataaaataactaaattatacagtcaacgacgactcaacgaaaacaaagttgatttttgtacgttttctgtattaaaccagtcaatggaaataaatcacattcgaaattcgtaatatcaatataaagaaaaacattagtattcaatcaaacattttaagtatgtatgttaaaatagcaaatcttatgttattcagttatggattttaaaaaatctaatgttattaaacttgtgattttaaaatatattaaaaaaatccctaagttatttgaaacattttaagaattggatttttactcaaaataactcaaatcactcaaaatataagattgaatacacctcctaaaatatccctcaattgatggtatcaaatcaaagtattttaaattccgcttgagtctgaatatccctataaatgagattttgaggcaaagcaaagtgatatattttgataatacaacgaaaatgaattataagattggaatcatgagcttgctcgtgattacttcaataatcttcctctttctggttccaggttagaccttctatgagctgcacatttcattttgtctatagtaatattatgagaaatatcaatatggtgttattgatatattagttgttttttctaattttgaatgaattgtagataaagtagaagcgcaaaaagaatgcattggaccatgtgatatgtttacggactgtcaagccgcttgcgtcgggattaggaaaggatacaattatggtcaatgtgttgcctggaagcccaaggatgacgatccctttacatgttgttgctacaaattaactccataactaaaacaacatatatgttttgaaatcatcaataccaattttgattagttcaaatcgggttgtaatggaagagaagcattgacatgatcgttggccaaacatcacatgactaaaaaggagacctttcttctgtaaagcacacttcctccatctttgcaatctcatgtgcttcttgtctctcctctgtttcctttttaagttccacacgtccccaccacattcacttcttttctcaatctattcactattgattgattccttttgaagcagcccaccaaagtacatttagtgctttaaggccagtaaagcgagataacgactaatgaaacaactttatatcaatagaggtgaaaagaattaatcatacaactttatattacagttgaagccgtttaaattaggcctccgcatccactaggaagcatatatcgcaagagaccccaagagtgaaaacaaaaaaaaaaaagtgaagaagaaaagacatagggcctgatacgggtaaacttgtcgactactgcacaaccaaaaaaaggttttttttcttctgattcttgatcaattaacatcgacgaccggctctgcagttaagagcacctgagtaagaggtcatggtgccgacgagtgaggatgatttggctgataaactcgaagctctggcatagttggctccagctccagctccagaacgtgtgaaaaatgctccgtttaagaaaagatctccttctgatctccaattccagtgcttccatttcgattctcctgtgtactctctcttagtcacctgccatacatattccacaatttcaccaatcattaatctcattgcaacaatgacatagaattaatgtcaaaacacaataaagatcgatcctttgaatcaagtggatagtcaaaagaaatatacctccttagcaaatgggttgactggagcaagaaatcgattgccctgactgttgatggttggaccagcactaccaccaattgcatacatttcccaatgagtgtagtcattgttaactacatggaaatatccatgcctacatctgcaaaaaccaaacgtttcttaagagtctacacaacttctctaatcacacaactaacagagcttgagattttcttcaagcaagtttggtaccttggcattctctggattaaaccttcaccaaaatggttgtaagcaattgtaacttgcatcaccttgtctcttgtgtatgaatcactatgccccaacaacataacctaataaacacattccctaattaacttactgctacaaaacccaaattctcaatcaatcatccaaatatgatttaggtcatacctcattgtggtgggtgaagaaattgtttgagacagtaatggcggtggagctcataacagcgtcaacaagtccatcagcacaattagaaagcgaattgtgatcaatccagatatgactcgatccaaaaatcgagatcgcgtcaccatcagccattgatctaaacccataatgggacggagagcttctaaccatagcgttacccgtaggcttacagtcatggacatgaatcccatggacaataatgttcgtaacgtattgaatcgtgagacaagctccattagcgatgtgaacattgacaccacgaccatcgatggttttgaagctgttcatgatcagctcttgcttcaaggttataaccatgtcgcgtttgaagatgatccagagtggttcgtcttgaatcacggcgtgacggagtgttcccggtatgggattaacgggatcgtcgtctccagggtcggttacgacgtagaaacgaccgtcgcggcctccgattgcgttgcggccaaatccgattgagcaatcggctaaacgtttgcgacggagctgccatttgcggtcgcaacgccagcaatcgtcgattgggttgccggtggcgcaggagaagtaacctaatcttctccgctctgtgctgtttcgaatgctcctgaatgattcatcaaaaaatcgaacatcaaattaatttaggggttatggaaattatattatgtgacttgtaattttgtttaattattaaaagttagttgcttgatttattatttttggcaaaattttagtaaatgattcaatttactgtatgagttgagttttattttagctaaatatatagcagtttctacctcttttttgttttgtttaccaattttatttttatttttttcatgttgagtttggtttgtaagtttgtttttaccgaaaataaaaacaagtaaataagatcttgtagaagatcaaactcaagacagagtgtgtgtgtatcgttatcataagaaaattatttatatggttaattggttatatctatcgactaatgaaaaatccaagtccaacgaattgttgttgattttcttataaaagaacaagagaaagaaaaaacatgtaatgaagagtatatgtcattgcatgtgacacgagcatgtgcatgggctggcaaatcattgtttcaaagattagtactgaaacattacacatgttctcaagactggaccaatgcctctcaataataccacacaacatttttcactatcaaattttattttaaaatagatattgtatgatcaaaatgcatgattgcctttggtgcagaagctaccgaagacttgcttacatgtgactatgtgagtagtaggagaataagcataaagtacctctcacacaccacaattgaacataaacatacatatagatcttgtaaaacttatattatgcaattatgactagaaccgttttttaaaagaaattcctttttaggtgttgaggaaagtgaaaaagggtaaaaagttgtgtcaagtccggatttattttcttttaggttaattcggaaatgaactttctgtaattatagtatgtcggtgtcattagaatctactactataaatcaataaccaacttatacaaatatctgttaaccgtttaactaaatgatctaaattttaaacccaaaaaagcctaattaattatctaaaatagtttcattgtgttaagcaatcagaggttatctttgatgaaaaactagtaattatctaagaaaaatcattattgaacttatttatgataatggaaaaggagaaagaaaagggaatagtcagaggaatgtggctttggggaggacccattttgactagaatatgaaagtgatgtgtcaaactttttcaagagaacttcatgtgagctctgttttgtcataaattctacttacctgttttttctcgattaaaagaaatatcaaacatgaatggattaattatttcattttcagaaaagtttcacgagatgatataccctggaagtaagagttttattttcttttttgttttattttatttatgcgagtaagacttgagtttttttcgatagactaaaaaggattattagctaatttatatacaagacatcacataagatagttgtaaatatattcgtggaatatcttttgttttatagagaaaactcacatgtccaccatggcagcgacttcatctgggttctcaactgcatgttcatgccatgtttcattggacctgaaaaacattaattatacgatctaacaattattgtctcatttataacctgattgatcaaaatttcgtttttagaaaacccaattatcgaaacccaaaaacacctcttaagtaggttatatgatgaactatttaagctcaatggcttggttgcatgaactagaaaacgtaaaattaagctacactgagcttaaaaacctgcaatggatgtctaatgtctaaaaccaatgtacaataacgatgatgataagtggttacctggatgcattaacgccgataaatagagctgttagaagtaatgcagaagcaaagagaataagttttgtgacagccattgttatggctgtatagttcttgctctgttctgtttagttatctctatatgaggcagaggcttttctcgatataaggaaagaaaaaggaagaggaatatgagaagaagagtagaagaaaggctacgggagagagaagttaatataagaagaagattgtgtgaccattcccattatcttattggcctaatttcatagaaaataaaatatataaagaataagaaaactatttaaagtatataaaatatatacaatttgtttattccgcagggtcatgaatctaggttgtgattgctaatctggacgatgaagaaatatcactatgtgctttatcatatattccctgaatttatagcaattatatagatatatagttgtgaaattacagaatttaattaacgtttatgttatttattccatatccgtttttctttttcatttttcatccgaagacctttatacggttatacctatacatatatatttttgaacaataagaaagtaggttacaggaactattaatttgactgttgtcataagtcatctttcatgcattatacccgaccgacagatttaatctacggagttaggtatatctccgaaccattctaagaaatattgttcttacgaaaaaaataagctgctaaaacttgttatatatgtacttctaaccaataagctttcaagccgaatttataacctttcaagtataagtgagggttaagatatctatctatagggattatatgttttttggtttctatagaaaatgaaaacacatgtgcatgtgtacttgtataaaagaatcgtacagtgataaacaataatgagtttggccaacaaacggtatcatgtcatgtgattggtattcctcatccctctcttctttctcgcaactcgccagtcattggataatgatttgtaaaagacaaatttaaaaggaaaaataaaactgaaatccctaatttaaaccatgtaaagttaagctaggacagctaactgaaacttgtaggcctcatagtgttccggatagttttatttccttaatgcggcactattgacttttgcccatgtgaccattataccttatgctcattacaaagttaatcattcaatttttttaaccgctaataatgctttaagtatgcaataatcaactaatcatcgtttgataagcggacaataattttgttgtaaagaaactaaagttaatgtaacctcccacttgttgattgtcggcaacaacgtttaatgaccaaacatgcactttcataggtaaggaacttacgagtataatgaaaaaaaaaacaataggaatgaaagaaaggaagagattaacaaacaaaaatagctcaccacattaggatattcatttatcggccgtatcaattatacaacaacaacaacaacaagaagcaatcaagcatgctcttacatggatcaattcatgaccaaaacaaaagaagcaacaaattaataaaaaaaaatagagatttgttgttgtttctgtacaacaccattccattgaagttgcagctcaagaaactgaaacaaaatatgtcataatattaaaactcgatacaacaatgttcactaatctgcacatcttcagaaattttttttttttttttttttgctgcttataacaattttataatatatgcatcccctagaacagcaaatttcccaagcacttcacaaatgttaaaacttttcctaagcaagttgttgtatagccaaaaccgaagaagaaaaacattacaagagacaacaatacaaaagagaaaagaggagattctggagggagagaagaaagttacgaacagccaaagcatttcctgaaagagagaaatccagaaggttctgggatcggatccgagatattctgttttgcacttggaagatgtttaaagaaggccttcacggctccagccacaccatcctcgtccttcatcgcctttgctagtgtctctgcactgctctttacctgctcacacttagatgctcagtttctttgttataaaacaatgccatgaccagccacacaagttgatggtcatataaaccaagctgaactgcttagactgcaatcaaaccaaaacttgttaaaacccgattggttagaaaatactatttaccttatcgtcgagcatgaaatttatggcatcttcaagcttatgaagtgagaattcatccactgggattggtgaaggaccaacacctctagcatgcactcgttctccccaaaaaggttggtctccaaagaaaggcacgattgtagttgggcactgtgttcaaggaaaaagcaaaacactttcatattttaccaacttaagtcctacatcaagaaacagactttcgctttcacacatattaaacttaccgaggctttaagacccgcagccgttgttccagcaccaccatgatgaacctaaaagcaggggaccaacaatttcaggtttaaagatgagactcataaactactaatccagacaagtaaaatgtgtgactaaaaatttccagaaccaaataaagaaacaagataatcaaggctaaactgtgagaatttccagattattagacataccacagctttgcatctcgggaatagccagtcatgtgggacattatccaacaagtaaacaaagtccttcggttctttcactatatgaaaaccacatcaatattatagtaacatataccaaacatgaaaacatccaaaaatggaaaggtaatacggattgaagaacttacagtttccaaggccaccccaacctttgttgatgattcctctctgtttagttctttgaagtgcttccacaatgatttctgtcattttctctggttcttgcacaggctttaccacagaatgggagatgtattattttcagtttctcataacataattacttacttagttataaatattgttttcaatttctcagagaatccagtagaaatacaattttgtaagaaaaaagactcacgagactaccaaagccgatatatatgggcttgtcaccagcttctagccattccacaagctctgcaggaggttcatagttggatgcaagatcaagatagcaaaatcccactacatcaatttgaggcccccagtctgagaaaaaaaaagagagaagagtaaagatctaaatataaaaacatcattattacatcagtaagctaatgcgtcatactaccttttggctttggtacaaggtgaggactccacatatatccatgtgggatattagatccagatccttgtgttccacttagatatgtaacaggccgtagtttcaatttctttttcctaaggtcatttaccatatctcttattccaagccagatcaatgaatcgacgatttgatatgaaagctgaaattgcatgatgtcagttatgaacaaaggagtcaggtttaaaagcaaacaacaatcagatgttctgtcaatataacaagtctcactctgtatcctgctggttgtttgacacgtgacaatgggtgtggaaattcacttgttggtctggatcattatttaatagcaaaaagatagagaatgattcagaacaaaaacaaattgaaaaaaatgtgtttaaagtaacactcatacagccataatctgttgccaatacaagacttacgtccatggcatggtgaaaaatacgtgaatcggtatcttcagtgcttctgccacatgggtatgtcctgaaatgacgatttccaagttagtctataataagttgggaagctagaaaaacaaagcatctcaaactatagcatcatcgcatgtatttgcaaacggttgtgtcctcaatggtgcacacaccaagatgtgataaaacagtagtcagtaatacaaagttgctgaaactaaccatacgctggagggttggcaataattgcatcagctttaaaggaaatcccagaatctggatcaggttctttacatgctggaagtagagaatatatgatgtccttcatttggtttcgttgaattggaatctctgaagggcctgatggcaaaaagcccttgttcttaaccatatctgtacacaacatagcaaggaaaccagtgaattgctgataactttcaaagatagaactgataatactaacaaggatgaagaaagaatgggaatgtttggtagatacatacaaccggcgagcacttttggatctccacctagaggataaaactctaatccagcagtcaaaacaaactctttaaaatttgcatgagttgcaagtctaactcgatggccatagtcctacataaccaaaacagtcaattactctctcccaaccaatttaggttcataatattgtgcaaatgaagataggagccaacctgaagccgtttggctattgcaacaaaaggttgaacatctccacgtgttccaacaattaacatcacaatttgcataggagggatatactgaaggtcaaccccatcaatagactcatcagcgcaaacaccgtttttcgattctccacgatcaacaacaataggttgagggatagcatctgctggaacttcaaactcaacagtcccatcatgtttcacagtagctatacggttcagcaatttaagctgcagatatataacatttccaaaaacgactagtgtcacggagagtaacgttgaccataaaagtaggaatcataaaaggaagtgcacacatgattcaaagtcaaagagatttcatatataacagataactaaaaatagaacaaggacaagatagaaaaaaaacaaaccaaaaatagaagtacagtaccttcttccctgcagagattttgtcatcgaaaatcttagcagcatcctcagcaagaatgtgagtaactttttgctgcctctcagtctttgatttatctaacctaggttggtttgttgatgatgattcagccttatcactgctcgatgaaccctccaatggcattgtccatactcgagaaaagcttttattgccagtacctgaaaatcatccaaacgagaatgaatccaaaccagacaaaggaatcaacaattaaccaaaactgttttttcaattgcaagaagaggataaaatgaaacctgaagattcagcgacagtttcatcagcaatggaggcaacaacagttttgggattggtctcaagttcttcagaaacaatgacgacgccactagcagcagcaccgccttcaatctcttcgattttcaccgacgctctgccggaacttgaggaagaagaagaagaagacgaggaagaaaccttggcgagctcagccggcgatatttccggcatcgtgattctctctctatctccaccagcagaaaacgatctggatcctttcttcgtgtatctcgaatttgcgtatgcgtgtttcgaatcccagaaagtgaaggagagaattaattatacgattcttttcttgtaattcttcgattattgaaatctttttttaaagaaattaagaagaaaaggttctattgtatgggcacgttcggacgaagtgggtcgaagacgcgtctggtggctacgtgatgggttcgctccggttcaggcgagggacttggtaattaactgtcggagtgatggattatttggtcaatttataatcaaaaaatatcaaactgtccgagaaaaaatattcgtaaaacgctgtcgtatgctgaacaaaaattaaaaaaagcgctgtcgtatgctttgacagcgaatcttctcttctgtctgtccattttttttttttttacgtacttttcgcctttgcccttccctgaatttgttattatcttattaaagaaactttacaattaagatacttgaaagtttttgacccaagaagaagaagagtaatcattgtttcaccattttttatgattttttcttcgtattttcacatgtcgacttttttgtaatataagattcaatgttttcaaatatcagaatataagtatctggtgctgtggtgtagtggttatcacgtttgccttacacgcaaaaggtctccagttcgatcctgggcagcaccattttttactctcagagatattaaagaaaactcatatgttcttcgtatcaccacatttcaaaacaattaattttgtgtttctgactaagaattaatcaaattttcttctattctgccaactcgtaagataaaagtcttccaaaattctagtgcacctaaacttattcaattattttcaaagaaaggataaaatagaattaagagtgattgaagatgcaatctaaagggagtgcagctaagtttggttgtctctttttgtttttttactccttccaatatctgcactaaatcttttctcccttagaaaaccatttattttgacacgttatagggagaaatttggacaaatactaaacacaaaagcaaaccataacccatagctaattacaagatgcaacaaaagattatttttgcacttagctaaatttgtgcagaagaaaggtaaagagaacaaaccaaaaaaggaaccccccttccttaaactcccttaggctttgatatggatattacccaaagggagttttacagaaccgtcctccgaagatcacataacttaaccataaccttttttaaaacatatcaaaccccttgggattgtgctaagaatttgaagggtctttaaggcaacggaaaaatatgcagcagctaacccatacagcttagaaaatgggatatgaaacagcttaggcttcgttttggttactagcaccatcccttgaacgaccaccattacccatccttccacgtccacgaccatatccgcctctacctccacggtatccgcctcggccacctccataaccatcacttttacccccaccatagccatcatatcggcctccaccatagccatcacgtcttcctccatcatacctatcaactcggccaccaccatagccatcacctctgcctccaccatacccgtcacctctgcctccaccatacccgtcacctctgcctccgccatacccatcaccttggccgccacttctacctccatatccacctcggccgccaccgtatccttcatctctgcctccaccacgaccgccacgaaatccgcctcttcttcccccatatccatcgtttctgcctccaccatatccgtcatctctccctccaccatacccgtcgtctcttcctccaccatacctgtcatttctcctttccccatacccgtcatttctcctttccccatacccgtcatctctcccaccaccatatccaccatctctcccaccaccatacccgcctctgccaccctgatatccagaatctaacacaaataaagtggagcaaattaaagccaaaacgtatttcaaacaaaacgtaaatattgaaaccaaaagatgataacacacttctgagtgttgatctagattatagtctcatcacccttacaccttataatatgctgagtttaactaattgacaatgttcagacttaccacgatagccatagcttcgtccaccacgtccacggcctctgcccgagtttgaatacccaccttcattgtctagttatcccaaaataaagctacaagtcagtaacaaactaaacaaacaataacatatatttaccattagacgaaatgatcgccttctatggcaaaacaataccttgataatcttcttgatagttcccttggtcttttccttcataactcccttggtagtttccatatccacctcttcccctgcttctccctctgccacgacctctccctctcccatacgaatctacattccaattaatcacaaggtgttataataaaacctaccaacattgacagatttaaatcgtcaagaaagtttaaggcattaccttcaccataagcattgtatggtaggcgggcttgtctcccttgttgtggctgatattgaggcttagactgatctgactgtgctggagcttgatacctgaacacaattataagcatttatattgtagctatatcttaagaagcgaggataccatgtgaagtaaaattccataaaaatatgattctgtgatgattcttttgagataaaattattcaaagcaaacgaactctatgaatcaagacttcccaagttccaacaaaaggatgaagaaaagtataactcacccaggagaatctttgtttagctcgctcaatgacaatgtgattgaaatcatggaaacatggcgcgtcaactccaccctgcatcatatggacaattcacttgaggttacagaaaaacaaaagaaaagaacagagtaatgcaagacacttacggaaacaaaccctcctcagtaggctcccagacatcagtaatgctaatagaactgattgcaatatcttgatgcaaacctgggattttattctgcagtatgaattacaaagtcagctacttgtataaatcccaattagatgataaatacttcacaaagttcataagaagaaaaacgctgacttttagtatctcagagatagccacagtcttgctgattgcctgccccattgccttcaacacaatgtctttaacacttttctcctgaaaccaaaagaaacggatcatcattatttcaagtacatcacatcgcaaatagagtcatttttaggatcagaaatgcaaaaaaaaaaaaaaaaaacgaaatcaaagtaaaatggtgcatgatgacacatttgaaaccaaaatgatcgaaaagagaaaggacccaaaaaaaccgtacaacagagtagccgaaacacaagtccaatgaaacattacacactccagtgagcatatacgacggtgaatcacgattttagcgaacgacttgaaacaaagtagaagagagagagagagtacctgaagaagactggtggcataactgatgtagtttcggataaggcctttactggtgatacggatctcattctcgttaatcggagactctggtttcggtttagcgactctctggtatctatccattttaccagaagatgaaaagatcgaaaaccctaggttttagagagagaacagtgaacgacgctctggagaagaagaaaggacagagatgagatttaaggatagagaaacccttagtaataaaccctagaaggagaagaaggaatcgcgagtttcaagatgaagaagaaagagcatcgggaaaggccgatagtaataccaagggacaccaaagagccttgagtttttaatttttactattgactaggcccaaaacggtctttcgtcaaaccgcttcaaaacgggtcagatattttcggatccggatccgattttcggggaggttagtatgtcttttacgtgcgttagttgcacgtggataacacgaatgaccagatatccatccatcaataataatctccgttttaaccgccgcggatcgttgataacaagattttttttactttcttcttttcaaaatttcaaaacttttccatcagttaaggagaaatttaaaatggaatgttttggagtagtattaagtatttagtccaactgtatctggttatttcgattagtgtaaaggtcctaacttttgggattgtgaatgagccactttcatttagaagactaacacggtagtggaatttcttggttgaagccgatactcaaataacaatgtcaacaatattaaggtcttaacaaagtaatgtttacacagaattacagaacaatcagctgaccatattaaatcttacttaaatgaatttcgaaaaaaaacagtggaaactgctgtgaagtgagctgtttagtcattagcactgactcatgagaccagcaaaaaaatgttgtctttgagtgaagagaagacctgattgttgactttcaaagacaacacatgacaatcaatctgtttggtaagctcatggcgtttagtagttatgtgaatatccatccctgattttcacagtacagtgtgcagtatcttgtatgatgaagcttgccttggccgcctaagatgagaggctcacatagaaagagccattatcagttctgaaataatgcttaatcgcaggaatgtgtttaacccttgaccggtccacactcccttctccgcgaatgcgttctactaactgattagaaacatgaatcaaatgcagttcttgaagatttataagattctcaattcctcttggtacgtactctaaccctctacaagccctgacataaagcttctgaagctcaaacattgcaccgtcttctataacaacttctgtcagatgtttcatctgaactatctctagaatcttcagattctgaaatccttgtgcaaaacgcaacctaggtcccatgtatgcattgtaaaatgaaagccataccaatctaggaagcgtttggatagagagaatggcgttttcctgtagctgagatccacgcaaacccaaataggtaaggttttgaagagtgttgaaccaacttggtactctctccagtttcccagcaagaaagagcttctcaatgcttgcagttgcgatcaggtcatctatctctaacggttcctcttcatcaatcgacgttaaagataagaatcgaattcttttaatcttattcagtgaatcgcacaagtctcttccatgttctctcctaaccatgacaagacttattcttgtgagctgagtcatacacccgagatttttgataagctcatcttctgcgttgaagcagtccatgacttgcaaatccttcaactgccagattttaggaacaacccttgtacctaaaacataattccaattggaatcatgtccttcattgcggcgaaaagtaatgagatatcgcaacttcttcaatttccacatccctagaggaagttcctcaatcttggagtgctttgtgttcaacgtctccaaattgacgagtttatggaagttttttggcagttctttcacctgtgtcttggacaaattcaagtactttaagttgaacatagttactaaacaatctggtaacttgctgatggaagagtcttcaaggtctaaggctctcagaaggttcagacttggaagtaattccatcttgtgtttagcagaagagcaaaccaaaagagagtgaaggtttgttgcacgtatactatcaggtgtcatctctttctgaatgcataaatggcgactaccgtaattctccattgtttctgcagcatcatcaccatcactgtcatcattatatacatcacagaacctctcaagtttggatacagatagagcaatctcccatatcacgtcatgcatcttgaacgccttgggtcgtccaaaaggattccacaagataacttgaagcatatttctgtaaacaagttcattgaggtaactatcagccacttcttctgctttcactcctctgatcggttccacaaacctttgtgccatccacatcctaatgagcctctttcttttcatccgatagttcacagggaaaagagaacaatataagaaacaacgtttaagcgggtatggcaaatcattgaagctaaggaacataatgcttcgaacaatcttgagttcatgattgttgttcagttcccagtttaaagtactgtagactttcttccattctgattcaaacttcttggttgacatcatgcttcccaaagaagcaatagctaatggcaaaccctgacatctctcgactaattttcgtgctatcggctccaaattctgcgttctgcattgctcaagacttgccggaaaagctttgttggagaaaagcacccaagcttcgtcttcttttaagagctcaatctcgtgctttgtgctcccaattccatatgggaaagaagccacgttcatgtcccgagtagtcatcataacacgacttccataaataccatctggtaaagcaatacttatctccctccatagaccagtggtccatacatcatcaagcacaacaatgtacctcttcgactgcaaatactccacaagtttttccaccaactctctgtagcctaaggagtataattcagctggaatctgtgtatctgcttctttgtaaaactccttgatcatggtcctaaacacatcttcaatcacataagatttcgagattgtaacccaagcgtaagactcaaaatgcctccgcacactttgagacttgaagatattcgctgagagtgtagttttccctgaaccgcccatcccaaccaccgcgacaacaatccgctgaggttcgggacttagaagccgtccgatgagctttcccttgggtgcatcaatccctacaagactattttcactaaagaaaagagatgactcactgatgttgttcacccactttgcatcgccatcatcaataggcggtaataatgctgcttggtagttttctgaatgatagtaccttttcatggaatcagaaatggattgaatcatgacattaaccattcctagcttttgagctatcgagtgcctcgcccacatatacctcgggaaatgaaacgcacgccaaattttggcgcagctacgataaccgtggatgtgatagccaaactcgtcgagaatgtcttcgatttggtaagccaaatctctcgtgtttgccacaaaagtttggaagagttgagttgttgttgttgtggatccatttccaccatgtttatgagtatcctcaagaaaggacttcatgatcagcaactccttcttcattttatcaatctcaccatggactcctgacaataacaaggtctcgttttccaggacactaagaatccgtccgatcccaaaatcaacagtagccgaagccatcttcctcagagtctcgcttgaaccttttttccttcactgatttagtttctcttggtgaacttgctgaatttgagcaaagccaagctttcggttcacaccttacatgcctgccacataacattttgatcaattatccttaaggacctcaacaaagtcaacgtcctttacttgcgttaaagtcaacacgggtttaaactgctttcacatttgcaacttggaattcaatttgacggatatggtcgagtttggaagttccaagagagagacagagaaatctgatgtactgaactcgggtgttgttttcgtcattcgttacctgaaactgaaagggtaaaagattattactttcttctgaagggcgaagaagtacacttacctcaatgatttttgaatgttcttaagatatttgttaagcaaagcagaattggaatagaagaaacgttaattaaagaaatcaaaatcgcttcagtattactactagttcatgaagcacatatatcagaaagtttaaccgaccgactcataaacgccaaatacaaaaaaaaaaaaaaaaaaaaacgttgtggtttccaatcactcattcttcaggcaaaagtccagccattgggattttagcatcaatctggaattcttcgtcttctccatctttgttcttcctataatccactttgaaatcataatctccgtccatcagatcctcctcatcagctcctgctttctttgctttcttcctcttcttcttctctgctttctgtttctttgtattcaacatgctttccgctgcgtatagcttcacgttctgcctccccgtctctgatttctccttcgtctttcctgcctcttcctcctcctcccctcccattgactcatcatcatcactctcatgctcagcctcctcttccgtctgcgtcttagactcatcctgttttttttttttgtgatacatcatcataaacaaagattaaatccagaccgagtcatttacaagcaaatggaatcacgagagaagttaccaacctcgatcatagtttcatcgaaattgagaggaccatttgaaggaataataacagggttgaattcgttaaccgtcttcaagctcccaatgaaagaggattcaccactgtaaacctcatcgatgttgaaatccttggccagctcagtcacaatctttgactctgcatgtccaccctggtccctctttggcggcattgtatagtatgggattttacctgcataaccattcatattagagacaatgatgagttaagaaactggttttcaaaaatgcttttacgcttcaagtttacgaggaacaaaaaaagatccgcaccttcattccagtcatgcaaaacaattctggcagcagcatcaatatccacaagaccaccctttttaagtttaccccttacagtggcgactttgtaaaggaaatcatcaactgcctcgaagctcgggattttgtagagagtcaccagcatatctttaggacaaagcttgagaatttccttcactatttttttcacaaagcagaagatttccaagttaggtcactcagattataacctttaaaagacaaagcacaaaaataagtgtgattctatcttgagcttatatccaattacctggactaactgggtcatccaacttctcgattcttttacaatttcggagagctatggaagcatcatttcctgatgatttcaacatcacaactccaggacaatccagcaacttcacgtttttgtccaagtgaacctcttgcagagatctagtcagtccaggagtggcaccaacattgacaacatgcgctctcttcagactgttaataagactactcttgccgacattaggcagtccaataataccaactgtgatagatttttttaactgccaaagaacaacaaaggaagatttaattgaaactgaatgatataacttgatgctaaggtaggatgattaaagtttaaactatggaaccaacctcatgacttcttgagtagttcttcaacaatttgataagagtgtctgctccaagacaatcactcgtctgcaacatattgcttggttttgatgccttagatgatttccaacccaagtttgatctctgttcctgggtgctacacttgaaggcaacagctggaaattcttccctaaggtacataagccatttctcagcagcctctcggggaacaagatctggagagagtgaatcagttacaaaaattaattacaccacccagagtaaacaaacaacttattacgtccacgagtaaagactgaatatatgaacttaccaatcttgttcagcagcaacacaagatgcttattgggaccggcttgcatcaccatcctctccatgtcagtacaacgagtgccaagaggatcacgggcatcaagaacctccaaaatgacatcagacaattcaatgactttaactagctccttgtagaaagccctctccgagttatctgtgaaacaaaagacattagtgcatgtaaaggcagagagaaagcacataaacgcgtgaagaaggtatccaaaacaactcacctcgaacattgacaactttaggtaagtcctctatggtctctccttctgtcttggtatcctcatcatcaaccaaaccaagtttcctctttttggcctgaatagatttattaggagagatcagaacacaagcaccactccaaaatacgagtaaatcaaacagcaagacatgaaaaatgcaatcttttatcaatcaatcaaaactcagaacacaaaggaaatagctttaagaatttcgacctgaacttaaagttatatgattactaaatatctgaacatgtatcatagctgtgagttacaatgttaaaagaatgagattaccctttctttgcgagcttctttcttctgttcaatctcctcaagagcacgggcacgtcgaacttcaagggctttaagctcttgttccttgaaaggccagtcattgggtatacctgggtctttctctactcttggcttacggtgaaggccaagctttttagcatcctttgccttcttcttgtggtgctccttcacctttttcaggaccttatgcttctgcttcaaggtcaccctcttactcttactctctgcaaaaaaccatcaaaccaatcaataaaaccccagtaggaatcctgaactgaatgatatgattcaaattcattcaataagacagatccagaatatcaatatgattgaaggatgtatcttacttttactccgtttcaccatctttctcgccctgggatgagagcgacgcaaacagaaaaactgagtaggttaaaagaaaagggtttatggagaaggaagatggacatatcggcgccaaattagggttttgctattagatgtacttggatcattacccgacccgttatagttgacccgaatcaacttaaaaatattgaaaaaataattggggtgagagaggctcgaactctcgacctcaggattactcagatagctatgagacctacgcgctagccaactgcgccaccaccccgatgttagtaatctttactgattatgtaattaacttcaattgacattcgttatccaaagtcataataaccttgacttggaccagtcacctgaaagtcttgagtttttttcccttaagatcccgccgggctccggtgctggcggttaaacccttccaaaacctgaaattcgtttagcttaggacaaacaagtgaagcccaccatacagaaatgtctaacagaagcctccatttgaagaaaatatcatggctttcttctcggattctctcaggtttccgaattttgatcgtcttcttcgattctagctttctgggttcccactgtttaagcgttcttaacgatcttttttggttgtcgttttgctcactagacaatgttcacggtcgatttcgccgatcaatcactactccagccacttgtttagctccttcactcgatggagacatgaacattggatccaagacattggtcgaacaacgtttctctcgcgggtaattcgatttataatcttaattacttggacaggtgttttcatggtctctttctaattcgtcctggacagtctctttcagatttgcatcagtacgacgagtatctcgagcttcttcttcttcttcttcttctccttcctctccacatgttgatttgctctcttttattaaagcttcacttgataaacttgaaggtaactgactgtatactgattcttacatctttttgtattggcttgaaacatctctttgtgttgtaaacaacgttttgaaaatgaactcttaggtccttcccatcattggttgaatcgagactttgggaataaacagcttttcaaggacaaaggaacttatgtagttctagctggacatttgctagacggaacaagtgatctgagtggtttctttgagaaactaaagttgcttcagcagaggtttaagaaagcttttatttttgttaaaccaaagaataatggtaacttaacggcaattacggctaagtatttgttttgacttttcaggtctccgggtgtctgtttcatgggcatccacttcagtgatcaagctcgaatcgctgatgatcgaactgctctagctgagttgattttgaaggaatacctcacttttcctgtgctactttccgaaaaagaatttcccaaggtatatattgttatgtccaagaaatgtcgctgtagattacttctttgtatatcattccctcatgttatgtgcatatacctcgatttcaattgaaggtgtgctgttttctacttgtatcagacaagtggggaagtacgttacatcgtgtttaaagattttaagaatcctctaatctacgaagagaaggatcttgatattgcttctgtagttaaaggtatgcctactttattatcatatattcactacaaatagtctctacaatgtcatacttattgttccatgttcaacttaagagaaaacagaaattcattatgctacttttagcttgtgaatattcgtcgcttcagccttctatctcgtgatttgtgtgcttaatacatattctggtttctttttcttgcgctttgctgcagctcttgacagcctcctcactcaagatactgagaaatccaagtctgtcagacttttcacgaacacttggtcaaaacaagcagaggctatcaaggaatcacatttcccttctttctttcaggatttgttactttactttccaggtatgtctctttaattttctttcttttttggtctttttgaaatttatcaggaattttcatttttgtctttcacgctactctctaatattttgctcacaaaaatttggaataaaattttgtttttttatttaacaattgacattctctgtgacaggttgtatctctgcagacgaagttggagaccgtctgtttctttctgataccaaccatcatcgtattattattttcgaaaacagtgggaagattgtagacagtgtaagtgaactgaatcacatttggggaattataatctttattgactttcttttctgaaatcccttagaagggcattcgtagagagaaaagtgcatttgaagctcattgtttaacaaccctaaagttcaaaacaatgtttttatttcagattggttgtttcccaggttttgaggatggagattttgaatctgcaaagatgttacgtcctacagggaccctttacgacgaagcggaggattgtctttacattgtagattctgaggtatgactcctagaagaagatacacaattatgattactggttgtgccattgaatgttttcatgttaagattgtttttcctctttgtttccttccttttccccattctttgggctaagaatcacgccattagaagagcaaatataaatagccgggtcctggaaacagtatatccaaaggttattaagaaaactggtggcttatggtcttggataatggagaaaatgggtcttggaaaagatgacgatacaacagttgatgctgataccaaatcagaagaatttgatgcacgctctcttttgtttccatggcatatactgaagcgtgacgatgagagtcttttagtcattaacaaaaggtaaaaaaactatttaaagggattgcttctttatagtagtgatagctcggtctctttttccttcttttgctgcccctttaagttcgtaaccaaataggtttctcatatctttcagcttttcgaagttatggataataaattttgcttcaggagagatcgaagaagttgtggaaggttacatatgaattgagatcttcttttaccgttttgtattatttcgtttgttgactcattgcatctaacagatatttatcaacattttaagggttttcgaagataattgagatctgcggtcaatcaatcacagagaagctatcagtgttggaacatatgccttctaactggttgcaacagcaaactgcggctatcgcctcatttaaggagcagccaagtgcttcccttttgtcttcttttactaaacttggagacgacattgtcatgacagatataggtaaacgacatctacgcaactttgtttacatctttttcatctctatgcatcaactaactcattttgcctttgtacgttaagcttgtcagagggtgttgaagctaaatagagattctggagcatgctctagcattcaattctcaaacagtgggatccttgggttgccctattggttgttcattccactggagagagtttttaatctgttagtgatttctcattcattatcttatccattaacaacacttctcttgttctgaaactttctaattgatgttgtgttactttggctaaattataacagagctaatggagttcaggaagcacatctcagtcatactcaggaactccggttattgccaggtgcgatttgctatacagaccctaattttttgctcatttactcatttgcttatgctagtcttgatgttagcagttcatcaccccagtcccaattagctgcatcatgaagatggtttaacattggttccagccggaattggtttgatttaattgctactttttcatttaacaggtaaaattagcatacggttgaacatagagattcctccatgcacggagcttgttgaaccgatacaagaaagctgcatatggcgacagacaagaggcgcaatcagtgaattctcgagtgctggaagtgcagttgaaccttcagaaaaggttatttaagagaattgcattcccgaattgtatggtttaaatccaggtagctcagaaattttgttttcataacttgcagattggagtttcacaacaatggtatgatgaattagacagcctcgccaaagaaatagccaaccctgaagcagctgaggaagaggaagaagaagatgttaacccctctgaggttgacagagaagaagatggacgtatccacattgattgtcctgtcaaaacaagtcctggctcaagtgaggtacgcctaaatctcctctcaagtctcttttatgtacagaagccaaactttactattagaaaaaagtataactttgtcgactccggtttgtgcagcttattgtttatgcagctttgtatttaagactagcgagaaacgaagagacagaaagtgcgacccaggaagaactggcgagaaaaatagcaaagattttaaagccagtacggaacattacaactatgaaggaagatttgtttgtgaatttgttgtccaagtcaaagagagaattgagagacattgtcttcataaagccgatgcatgtgcggataaggttagactcgaaggatcatccaaaagccgataactcaagagacgtaatcttgactgactcctctgttgaggttgatgtctctctctgacaacgaataacgatgcttttgcagtccattctttctcaaaggtaccaaatggctactctaattctttttgaggtggtaaaaatgagctcaataagacttgtataagtagtttatgacattatattaacgatggtccaagtttcatttggatttctatatttgagtgtttcttctatttttggttaaaaattagaaaatatcaatgaaattagcaaatttttgggtgccattagtaaataacaaaaaagagtgaaaataagaatatttggaaaaatgaagacacgatcactagaaaaaacagctgtcaagctctttaatttttcttttaaaaaccaaacagtttcaaactgaaatccaaactgatttttgaaatatgaggaacaacgaaattttgaacatatatagcatgttattgttatggtcctaataatgactgatttgcttgaagaacttatttgttactattccaacttattacatacatgtgtgttgatagatacatacatggataagaaaagtgtacatccatatgtttatctcaaatcttatttgcaagagcctcatgaagaagatatattgttgacttctttttgtaaacacaaggagacagagaaatagaaatgcctgccttttcttctgatttgttcgcattttttaaatagattttgggaataacaataatcttacaattattcgcatttgattttaaaaatatttagttcgtgcagccatcaacattacatcaaaccctttagttgcatttatcttatacacttcatggtctccatgttattctctctttttctgtttccagttttctctttcttctcattatttcccatttcttcaaactttacaatattaatcacttttataatctgttttaaatctataatacatatatgtgggggaaggttagagaaatgtgaggcacacaaacatgagaactatgagatatgtactccattttgcatatttaattattaacttaaagagtagtttaattgtctatattaagagaagaaattcagaaacctaaaacctgaaagaaaaaaaatccagttatctccttccatttttttaggagactcttccgcgcttcggatcccaacggttttggtgtagatttttcttgatctgggttttgttacatctttgacgaaaataaaacatatcaacgtgatgagataaagggaaaccctatgggtttcttgtgaaaggggcaaccattgtttatgaaggattctaaggtttgttcttcgttctgcattttttttaccaatccacatatgttttcctgatatttatctgaaaatgtgtttcttttgttcttgtcaacgcaggcattaattaattgaacaaaacgattcgaacaagacccattttttggtcttaatttgtggtcctcagactctgttttgtacaagtttcttcggactttgaatccaattcgccgtggtttgaaataagtttatgtctatataatcacaagaagaaggggaaaaaaaaaaggagagattcagacaacagctaccggagaaatgaattgcttttcatgtttttatttccatgaaaagaaaaaggttccaagagattcagacaacagctaccggagaaatggggaggtgaccggtagagacaacaacaaaacacaccctggtaagctcaaaacatctatattaatttttacagataagtcttatatatattagggtttataagactagattcagtaatctttgtgatgtttacagagaatccaaagactgtaaatgagcagaacaagaacaatgatgaagacaaagaagtgacaaacaacattgctgctcaaacattcagcttcagggagctagctactgcaactaagaatttcagacaagaatgtctgatcggtgaaggcggctttggaagggtttacaaaggcaaactcgagaaaaccggcatggttagtatatacttttgtacatcactttgaaacatgaatatggtatatgatttatagcattctatatctctctacaacaaatctctgaagatttttcgaatggttattttgggttcagattgtggcagtgaagcaattagatagaaatggattgcaagggaacaaagagttcatagtagaggtcttgatgttaagtcttttgcatcacaagcatctcgtgaatctcattgggtattgtgctgatggagatcagagacttctcgtctatgagtacatgtctcgcggttcactcgaagatcatctcctcggtaaattacaaaactaaggatccgtattgactaactttgaatcagtcctaatgtttaactgttttttgaaatgctaacagatctaacaccggaccaaataccgttggattgggacacaaggattagaatcgctctaggagccgcaatgggtcttgaatacttgcatgacaaggcaaatcctccagtgatctacagagatctcaaggcagctaatatccttctagacggtgaattcaatgccaagttatccgatttcggtctggcaaagctaggccctgtcggggacaaacaacatgtgtcttccagagttatgggaacttacggatattgtgctccagagtatcagagaaccggtcagttaactacaaaatccgatgtttatagcttcggagttgtgttgttggagttgataactggacgaagagttattgatactaccagacccaaagatgaacagaatctagtaacttgggtgagtttctctttttcagcttacatgaaaaccttttggcttcaattgtttaaaagatctaaacttttgtactttggtttaggctcaaccggtgttcaaagaaccgagtagattcccagagttagcggatccgagtctggagggagtgttcccggagaaagctctgaatcaagcggtggcagtggcagcaatgtgtttacaagaagaggcaacggtacggccactcatgagtgacgttgtaaccgctctcggtttcttaggaaccgctcctgacggctcaatctctgttccacactacgatgatcctcctcagccgtcggatgaaacgtccgtggaggattcagtggcagcggaagaacgggaaagagccgtggctgaggcaatggagtggggagttgcttcaagagcacattcccggaacccaagtgcttcttgatttttattttttacatctttttttgtcttgttgatttttatttttggtttggtcgttgtttactttttacgttttttggctttcaatttcagtttcagaaagatagtgatatagaatttgttaccgtttctctctttgttaattatgttctgttttgtttgaatgtgtatattccagctgagttttcatagctcgagaattcaatctgttcttattcttggtctcgagcttaacattataaattgatagttgttttgtacaattaattaattttgtgtttagtcaaaataattcataattttatctctggttgtacagagaggggctaaatagcaataccatagcttaccaacacataaatctatacatatcttcatgaattcattcaacaaacgtaggcttccaaccaacaaaaaaataatatatatatattcagtttgttcaatcacagaattagcaaaatcttccaagcacatttgcttccacaatatagtacatgaagccagattccgaaactctgaagccagtacaacgcaagaacaccgagcaatatctactccaggaattgactctagtatctttatctttagctctgttgactgttggtaataaattaatcaagtttcgtcgaactgggttccttgtatgtctagagcctgtcgaagactgttccaatcatttgccggatctatgttttgacgaggctgcatgatcaatattgaagagactagagagagttcgtgtctcttgagtcttgactaatactcagcaaaactacaagaagtctaaatagaagaacaagaaagtcctttaatacgacattcaggttatagggtttctttcgtcttgtgtattaaacaaaattgggctacaaatgtttttaacgatattgggccgataataaagcccatattcatactcacatccgccaatctctcttctctctcgctctctcattggcgctgtttatctgaattcgatacctttttgttttttctttggtaaataaatatctgatttcgcttttgaatcgccattggttgaacaatttgacgccgatctagatttctgtcgctgtgaaggtagtgtcctgtttttccgatcaattggtttgttccgatcgtttctcgtttacgctttttgttatccttgagaaattttacgttgcaagagagatctttgattcatgggtgttgaagcattcgtgttaaaatgtatgattgatcttaatcagtgagatcggtgagctcaagttctgtgttttgtaattgagattcgaagaggtatgtcaacaaagttatggagatgggtgttagggctgatatacctatttgccgttgccacgatttggattgcggctagttttgtagtccagtctgtggtggaagctggtgtttctccgttcttgatcactttcatttgtaattcattgttcgttgtttatcttcccctttttgagattggtcgatatctggaagatgcatatgggagtttattgttctggagaagcaaaaggtcgcatttaatggaactggtcgaatcagagaaggctgttttgcttggaaaagatgtttctggtgtgaaatcagatgctactgagagttcagggcttgttgtgagagagcaagagattagtgagggtggtaatgggattgaatctggattggaaaatatagagcttgagattgatgctagtgtcaatgttagtgatggagctagtggagtttctaataaaggattagatgagaagggtcgttggacaaggatgcgagttgctaaagttagccttgtgatttgtccgttttggtttttggcgcagcttacatttaatgtctctctcaagtacacaacagttacggtaagaacatattggacacccatcatcttgttgcttattctgaatctactaaatgttttgctgaagtttttttttcatttttgtgtgtttgcagtcaaataccatattaagcagtgcatcaagccttttcacctttcttgtttcactaatattcttgggtgagaagttcacatggttgaaactcttcagcgttcttctttgtatgtctgggactataattgtaagtatgggtgactcagagtccaagtcaaatgcagtagctaagaaccctcttttgggagatattctttcgctggtctcagcggcgctgtatgctgtctacatcactcttatacgcaaaaagcttccggatgatgatgaaagaaacggccgggtcagtatggctcagttcctcgggtttcttggtctcttcaatttcttcattttccttcctcctgctctaatactcaacttcacaaagcgagaacgcttcaacgcacttaccttgaaacaatttggcctagttgttggcaaaggtatgcaaacaccatcccttatttccgctattgtctccttgaagctattggtcaataaatcacattttctcatatcaatgggaattgatggcacaagtagtaaattaggattgatgtaggaatgccgatttgaaagactaatgtgtgtttcatcacaactgcaggtttgttagataatgtgcttagtgactatctgtgggcaaaggcagtactattgacaacaaccactgtagctacagctgggctaactattcaggtcccattggcagccattgtagacagcttatcagggaacaaaccaagcttcaccgactacattggtgctgcagctgttatggttggctttgcagggattaatattccctcagagatgttttgcaaatccaaagagactgctattgagttagaacctgggacttcgttcacagatcctcctccgattgtgccagatagcataagagtagattcttcactgactgtagtataagcctaaattgttccaaattcaaaagccacaattcttgtaaaatcttttttttttctcttgtttactgctcttttcctcttttatgataattaatttgtagatcgttgaacataatacacgaaatacagctgaaggcaatagtgtaatgaaatcgttcaagattctggacttagtttcaagacagtaaaaataaaatgtttcatctctctgttattgcactaagcgtttacattgagatgtccgtacttttgcatgactctttttgtcgccatagcagctgcttcacttgctcgtaatgtgccttgtgccattagagctgcaaattcgcttgtaatctcttcctgaatcttggccctagcatcacccaacgggtcgtccttgaccttctctttactagctgatggttgaataacaggtggcactttctcagttgcagttgaggtttctgctgcctcgagcttaggagctatcacaatttgtgggccatcatctttactaaaagctccaaaaggttgtggctgtggcctaaactgtggaacttgaggaacagcaccagcctttagagttgtttcgaggccttgcaacataggcactgcaaaatggggatatgaaattagaacaataatgtagccgagaaagaagaggttcaaggaaggtgtcgcaagttatcagcgacttacttataagaccacccatgggactgtttagaacatcattaggaagctggagaatgtagtcaggaatccctttacccaccaaaaactgagcgacctcgttgctgaagttgttgcagttgtgagtaagtaaattgtaggattcagcagtgtaacgaggactgatttcttccaagtacatctcgaatacatctttaggcacatgtgatagacccaactctatcgttcgaattggtgttccatatggagttcttccaactggtaaatgttgtatccctcctccaaaaaagtactcattcccatagacaactattcctgtatgcctggaaaaaggatacataactcacatgttatctacctggtttaacatcaaagtaatatcctaaaagagtaaaaagcaaaacacctaaacaataagcaggttaattcatatttctcaaggaaaaccacactcggttgatattaaaagcagaagcttagacacatttacatacaccaaccagtcatgccaatatcttttacattgggttaactgcaaccatgttcaacagctaaaacaataatatcaaaccctatgaatggcactacacaggacaaatgttcaaaacaaatttggcatatacaacacaacagatcaaatacgaacatgtgacagagatttgactcaccatacaccttcaataacctttcccaggagtgattgtgagagctggcgtgccaagccttggcttaaatcatagacattcaatgttaccttatgcgcttcctgccatatcacatatatcaccaatttcaatcaaactaacaacgaggcaacgcaattaactacgaaccagaaatgaaaaaaagagaatcatacctcagccattgtcaaagtccttgaaacacgttaactacctgaagaaaaaaaaaatcaaaatcaaaatttacaatcgcaatgatctaagacctgagcaacaagaatgattccgaacaaactatatcagacctacaaaagaatttccgcaaatcttaagaccaaatccataatcgattccgaacaaaaaagaactagtatccgcaaatagaaaatccaaatctagaaacaatcgggaacacataattgataaaattgatagcgagaaagcgagggagatttgatcacgtacaaacaaaatacgtaaactggccgctcggaaaattgtcgatatgcgcaaatctgaaagatttcttggatagcaatggttcagagaggtttgttataaaggcaagctattgggagattcgaagattcctctacgacgtcgtttaagctactttgacccctataccgacgaccgcttttattctgtaaccttctagaaagtaccatccaataagacattgccacgtctattttccccgtcccggttcaaccgaccagaatctttgaatcagaattacagcagttaaaaattgaaatcctaatttatctatttgtgattgcaggaacagttggtcttacagcgatcaatcaccgtattgtttatgtatgaactttaccgatgtataccaacgatgcgtttcatccaaatctaaggttttcacaacattatttattcataaaaatattttaaaattttaacagtagcatcttcttgttaataaccctaattaggacagattcatgaactgcaactcccaaaataaatctagaacagacgcacatcaacaaaaaatcgaatgaggacaaaaaaaaaaggcaacaaaagatttaaaaaacgactaatcttacggagataaccattctggttaggcaaataaaagcctaatcttgagaaaaaaggtctatatagaaaaacaaatgaagaaaaatcaaaaagtagcacttctttatccaaaacaacacattatggcccaaggaagaaggccgccatgatcctgcttaagtagaagatttttgagctcaagagttcttcaatggttacaaagaggtggcatcctagcacccgagttgtctgaaagtaaaaccgcttcataagatgcgtcgaacatgatgtggtactttaagcatgttattggaagtattatgatggttttttccttaccattgtgagctatcttagttttgttgaacttggcggtgaagttgtagaatccaatcgacataaccactcgaaccgcccatctggtcctcaatgagatttctgaggagaaggaagccttctcggggttgttctccttgtctcactagaaaacacatggggtgatatgaaggatcactctccctcagtttctttaccaacctcattagcttctttgacatcccattctcttgctcttgaaaggtaacctaagagacccaacacgaagaaagacaagggtttcacacatattatcatgtttcaaattcttgaaaaacactaatgatgcatatacatcatcgaatgtaccgcctgttcatatattcatatgtaaggatatatgtggataaaaatacatacccttgagaggtctgctgcaaagtcaaccccaagaagatttttagcaatgtcaggtgaaagcatccggccaaaccacaaaactaatcgaaaaccatcatcatatatgtaaaggcctctagaatccaaactctctgcagccagcggcaatctccttaatacgtctttaaagtcatcgtgggctgctgatggctgcaagcatgtgaattcacaaattatttactatttcttgaacactgatgtttgataatggacattgagataaaaatacacaaacctttaagagccattcgtcaacacggaataaattgggatacaaaagcttcaatagctttttgacaggcagagccatcatggtgaagcctgcagcacagcgctcatcaagagaagtatcagcaggtccacctagaagaggagtggacttagtaattgccaatccgtacaatggcaagaacttcagagactctgggtatactaatctggaccccaagcgatgctgcaccgcgtgaagattacgatattctttgagggctttaacaatcttttgctgtattgcattccgtgcatcatccaattttgcggacaaagatttctcaattgctgcagaatttaaattgtcattaaatagtatcaaaagtagcatatgaaaaaaatttgaatatagcttacctaatctagcatataaagacacaatggaaccagtgtctgcttgtctatacatctccccaagatctgtaaccactggtgcaacagatgtgtgtacccttatacgtctctctccacaagaggcggtatatcttagttctgttaaggattactaaaagctaaatgatgtgttgtatgtttaaactcaagtatgtttaaaatatcaactattcaaggatacagcaaagccacttggaaatacacagtctgggatgttagcaaagtctcctcaagagatagctgcattgcatacgctttgtcacagtcaacagcaggaagagcaagcaggtcagtagaccttagcatgaagttcccatggtaggacgagaaacgaattcctgcatgcaaaaatatataagatcacaagtagcacaccaatgcattagcaaatattgacatagcaggtagcaaaaacgaatatattatcataaactattaaaccttttccacatcttattcgcataaccgcctcccacgcagtttcccttgtaaggtctctagcaagctcgtgtcttaacttatctccatgaacagatgattggaaacctggataatagtacacctgtcctccagtgtattttgccagagtcccttcaagaaaccaaagaattgtaattacaggctgataaacttaactatcacccatgactccaaacagctgaaataaaaaacatcaactgataacctcaacgttcacatacctaatgaggcaatatcagtgtacttatcactgaatgcataaacattaattcctatctggaacttggtacaatcagcagccatttgtttatagaagggatcttcagctacccttaatgcatattctttgtcagttccatagacacgaggatcatctccccgcaactttaacctcccagcaccaagagaaggtaatgagttctggaaaattagtaacttgcccccaagttggttctgaaatagggagagaaacagagtcaacaaactgatccacatttcagatgaggatctaaataggacactcaacatcaaatgaattatatgatattatcttgatatgtcaggatggtaactaaccataaccataaacgccgctctgagggctgggccaaaagctgattccacattgaaattatcttgaaacatcaaaggtagactgtccaaaaaggcgtccaccacagttctagattcagatagatttacaagcagatcgtctggcaatgggacaaagatatcatctagatctgatacaaccatcatctgcggctggctcaaagatgactgcattgccaaagtccacaaaaaaaaaattatggaggctaaagaatttcaaaacaaaagttcctgtgagtttacaattctcttaccttcatgttgtaaaaatgtaacgtgctgtcataagtaataaatccaatttgagttcttggataaccaggcaggttatccaaacaagacttaatcgtttgagcaacaacctgcgaaggagcaaaaggtcagtgtaagatctatattatacgaaagcttccatatgaagagagagagccactaagctagacaaagaaacaagaacagtctagatgatccattaatacgtagtatattcagataaaatcacacaagaattagcacttactaattatggaacagtaaagcccatttccagcaaaattacaaagtgggatattcaaatcgatcatgcttacctcaagcattccacttttagtagccgaaatcgaaacatcaatgaggaagaagtagataggtggcatcggaggccgaaccatgtattcagttggagctatgatttcaacactgcctttagtcagctcaggtcgttgatccatatccattcttcggccagtagcatccaaatgtgagaagtattcaccaggcactgaacaagaaatttaaacccataactatgaatagtcatcttataaatatatgcctgaaagtattgaagttctagcatcatcgatcaaatgatttatggaaaaagaaatttttgacaaattaccatcattaagcatcgaacatatattacaccgccactttcttccagaatctgtaaaagtcacaaaaggattcacataggtacggcatcttctgcagcggatgatgccagttgagccaaaatcaataagtggtacctcctcctgaacagataaaatgacaatttgcaaagaaaggcaaagttatatgtggcactagaacatgaaagaatcgcaaagacattcttgttaataataacggaaactaaccccttcaggagtctcagcaagtggacaaaccacagctcctagaggtaaatgccaccttgaagccagagactgggaatttggtatagcactagtcgtcagtcgtagatatctagaatggcaattcattgggtacatttcagcaaatgaatttggctccacgtcaccatccaatggccttgggaatgatttatgatcaagtcctggttccagcgatccaggaatagatgaaagagatagcgagttaaaatcttcagtcaagccttgaacgttactgggaggaggtgcatagtttggatgcagattctgctgtgctgccatatttggtcgctgagcaaaacctcctgtgtgaggaggatatgatgagactggagggggtcctgggggaccttgagatgtctggaatggcgtcggagcctgtaagacctgcttgctaggataaccaggaaaagatggctgcgaaccgcccacgccaggataagacggagtaactggaggcattgactgttgaaaaccaggcctggcaggcatatgataatctgtagcagggggataagcatttgctccaggtagcccagaagtcgtactttgtggcggaggccccattgctacaggtgccatcggttgctgtgggcgaagagacataggaggagataagtgacctgcaagagtttgaggtggtggtgggccctgaggagggttttgtgtagtcgggaatggcggggatggaaaacgctgaaaaggggcaccaccaggaggaccatatgctggtgaaggaaacgaatttgatgatggcggtggaggtctactcccaggaatctgagaaacaaaaggagacggctggccaggcctcatcgtacccactggtggagccggaggaggaccagaggcagtgaaaggtcttgtaggttgggatgcagatggtgtaaaaggtctaaagccaaccgcctctgatccagtgggtggtccacctgattgaggaggaatccctggtggcggagcagatgcaaatggagaggaagcaggcctagctggaaaatttggatagccctgattctccgtacccattattgatcacaacttatcacttacaacagttgtcagagttatagccaaactggaagctaagggaccagatcaatacaatcccagattctcttcgatgagtaccttagaatcagattcgttcacggaagcttcatatcatctggaaaaaaccagtgtagttctctttcacagtgccgacctggacagatccgcctctcaaaatccgtagctatctctagtgatctttcaaaattggtaacttctgtgagatatttgaggacgatcttctacgatggtttagatcttttcaaaaaagtaagcctctccgattcacagttccttattcaattacttaaaaacttttcaattcttttcgagcaagacgatcttaccgggtgatagatatccagtgagaatcgtctacgaaaaagtccctctccgtaagtgaattctcttatgaagatctggatcaataaccattgaatatcagctaaaattcaacattaatatcaatctaacatgattagggtgtcgaagactacctgaagtgagaggaaactcgagaaactgcggagcacgaaactgattctacagcgatcggcttcagatcgtctgacccgaagaagattttcgatacggaattggagaaccaccaagtgcagcgaaagagacgatgtgatatattatgggccaggtagtggctaacagttttatatctctccagcccatttaacagtttcgtcctatcactgtttttttaataaaatatccttttcttttcctttttgataaagaataaatctgtaaatattactttcatagatttcatttctattattttataaaatagtaaaatgaaatttaatactaacagtttaaaactcttcctgattatgtttttcggaatttctaaatcaatttattttaaagatattataaataagaaagttatagttataaacaataattttataagaaattaataaagaattc

SEQ ID NO: 1278 - DNA, 99128 bp, Arabidopsis thaliana
aagcttttttagtttctttattacaagacgaccgttgagatttgttcagaattaagacaccaataaacagtcttgtactacttaacttacataaccttttcatcacataaatctcttcgtgccaactcgtttagagccccgacaatcacacttttaatactttttctaagaatcaacgtttatagtactacaatgaacagtcaacgagagtttcctgagaatctgtcaatattttgttccgttcattaacaacgagagttgaactaaaaaaatccatagagaacaattcttcatttatccacctacttcatttcccacgaagcataagggtccataaataatctcaacgacatgttaattattagaccatgaaaatttctttaattattaacctttgtagacaaaatgtgagaaatgtttttagcaatagtttatatcatttaagatttaaaattatatttaacaccaaaaacagaaagaatatttttcactaaaacataatttattttaaaacaacctttaagaattggctagaaacagagtttttcaattaatataaccattcagactaaccaaaaaaaaaaaaaagagaagacgtcgtagtaatcgtacacttaaaaaattgaatataactagtaaatacaaaagttagtaatacattgtatcttttgttgatttaatactcaaaaacaggcttttgtacaggaacacgtaacactagccattaaatatctccactcttctttcttcttaccaaattactcaatccatctccctctcttcttctccttctccaaacaacaaaccaaagcttctctcttttcttgcttcagagagacctagaagagttatcaacatgagtcttcttctacatctctttgctctgtctctgctcatctctgtttcaggtaagctcgaatcacctacattaatggcggcttactatttccttcaaaatgttaatcctctctgtgtttttttttccacaggagcaaagttctccggccggccaggaatcaactatggccagctcggaaacaacctcccgtcaccgtccgactcagtcaacctcatcaagtccctaaacgcgaaacgcgtcaaactctacgacgctaacccaaaaatcctcgccgcgttaaacggcaccgacattaccgtctccgtcatggtcccaaacgagctcctcgtcaacatctccaaatccgcatcactctccgacgactggatccgatccaacatcctcccgttttacccaaccaccaagatccgttacctcctcgtcggcaacgagatcctctctttaccagactctgagctcaaatcttcactcgttcccgcaatgcgcaagatccaacgctccttaaagtctctcggcgttaaaaaagtcaaagtcggtactacactcgccaccgacgttctccaatcttcgtttcctccgtctagcggcgagtttcgggaggatatctccggtttaattatgaaaccgatgctccaattcttaaaccggaccaaatctttcctattcgttgatgtttacccgtatttcgcgtgggcacaagatccgacccatgtggatctcgattacgcgattttcgaatctaccaacgtcaccgtcacggatccggtttcgaatctgacataccacaacctattcgatcagatgattgacgctttcgtcttcgccatgaaacgagtcgggtatccggatattcggatctgggtcgcggaaacgggttggcccaataacggtgactacgaccaaattggagcgaatatttacaacgccgctacttacaatcgcaatgttgtcaagaaactcgccgctgacccgcccgtaggtacgcccgcccgacccggaaaggttctaccggcgtttgtattcgcactttacaacgaaaatcagaaaacgggtccgggtacggagcggcatttcggacttttacatccgaatgggactcaggtttacgggattgatttgtcggggaagacggagtacaaggaatcattgccggcgccggagaataacgacctgtacaaagggaagatttggtgcgtggtggctaaaaggagcgaattggactcagctaggtgatgctctatcgtacgcttgctcacaggggaataatacctgtgacccgattcaacgcggaggcccatgtcagaaacctgatttgaccgttttgcacgccagttacgcctttagctcttattgggcccaatttcgtaagatcgggggaacttgctccttcaacggcttagctacacaaaccatcaaagatccaagtaagttaaattccaaaatccaaatcataattaaaccgattcgtaaattagttccggttcagtgatatcaggatgttaaaaccggtggtggattttgggtttgctaaatttttgtactctgttgtcgcttgaaaccaggttacggacgatgtgagtttccgagcgtgacattgtgaagacttacgagttacgaaaatgcatggtcgagaagagacgcacgagggaaaaccgcacgatgttacggctttcattaatggaaacagcacgtgactctctgtacgatgttacgtagcttgattatttagaaacggcacgtgattagtgtttaacttgctgtttatttattttatttttcttttcccgcgaataatgaaaactcatgaaataattaattcgttttcgggtaatgcaatcgccaatcggtctcttatgtgtgttaagctgaacaaaacaataaaattactaatgttctaatgggaaaaagtttgcaagtttcagactgtttccttgtttttattgctaaaattattagaggaacaaaaatatatgatcttcttttgttaacaaaaagaaacgtttgcaaaattgatcttacttttgaaaaagcacatgtaactattgagaatcggatgccatgattctcttctctgcatcgtgactcgtgagaataggatgtcgtcatagctttctttctcactttgcaaagaaaatgtttgaccttttgcagctaaaaagtacaaaccatgaagttgtctctactttactcttctgcatgtataaaggattcgtatgtggtcaatacattcacaactccatttcaacttcataagcggtaaaaacttgttacacaattctctcttggttgattgattgctcttctttcttgttaccaagtacaactttggatgtaattagtgatgagattgttatttatttgatcgttttgaccatgttttcaaatgtcgaaattttcattttaaccatgcgttcgtacaccttctactctctattgtatcatttcattcaatatctggtatatatatatggcgacatgtgttgtgctccatagtgccctcatatatatgttcgcttttgcttccctttttttcttctgctaattagctttaattacatctactaaaaaagtaaaaacacatttatgaaaaaaacatagtaataactagactatgacacgtaaattagtggtttaacttgtgtttgtaccattgttatatcaccatggagatttatcaaaatatatatatatttttaaaaaaagagtttagtttaacaactatatttaacaactatatcgaacatacacttagacttacatctatgccattgtctcatctattcacatttgaaatcttttagaacgatgggttaaaactctagattaggctgtggaccacccaagtgatagcaaacaatgtacacgccgctatgataggagcttccacttatcctaataattaaagtattcaataccacgattcagaagtcatccaaagtcaaaacctcgcacgagtcatgggctcatggcttacccgctccgcggttgtactttgtatatgtttcaaaagcaggaaaacattttttaaagcaattgtaaaataacaaaacaaacataaattatttgatagccggaaactatatatgtatttgttacggccagaagttgattataaccaaagtagttaaatcttgaatctgctttttcattctaacttttttttttaccacacatcaatccaaaatactgccgatgaaatttgtaattagtatcaacttctgtctaaaatacaaatttgaacttctaatttagatccaagcgatgacaactacatttcaagtatcattgtagtttgatagactagtgttacactaaacctaataaatataccaatcaacacacaatgaacccttgttcaggagtaataagggttcaaatttgcaactcttttgtcaagggaaggaaataaataatcaaattgttagccgatgcatgattgacgaaaagtaggggtgttttttacaaataagctaagatggctttagaggaccaccaatcggtccaatcctttaacactcagagcctgaggcagagaacacgatgggtcatcttatatttgtttataaaattgccaataattgagataaggtatcatgattcatcaatctagctagactgtgtgtaccatacataaactataacccatgtgtataaaatatacaaatatctgtgaacatcaaccacctaactataatgaatatgaaaatcatacgactaaactaatttacgtaaactatactactttgaaacaattattcatcaaattctcttatactattaattgtggtttactaaacttccaagttttatgttttactaatcctgtaaaattagactttagccgagtccgtttgaatctaggatttttgaaatttccaggtggctcaaagctaaagaaaatgtgaatgagaaatgatttcaacgaaaataagatttacataatagccaatgacatatatgcacttgtcaagttggagttaaacaataaccacacaccgaattgaggagcccattggaaaaaacagaagcaaatatatttttatgtaaaaatagaaacggaataatatagtaacaaaaagatactctcttcaaccttatccattcttcgccacttctcccactaatccgctaaatcattcttcttcatctctctctcattcacaattcccgaaattctctcaaatcacagatccttttagggtttttccactgtttctaggttttttttattgctcaaatctgatcaatggatagttgtctctctaatcaaacggcgcttcagtttctcccgtcgcgttccaggagacagagcggcgatggaggcggtggttttgttattccggcgaagaggaagatccagtatagttcgatggttgtggttgcggcggcgggacagagtcggtgtgagcctggaagcagtctaaacgcgccgcttgagccacgatcggcgcaggggaggtttctgagaagcgtgttgctaaacaaacggcagctatttcattacgccgccgctgatgagctaaagcaactggctgatgatagggaagctgctttagctcgtatgtctctcagctctggttccgatgaggcttctctccacaggtccgtgaaacctttccttatctaatctctcacaattcaaagatccgtaaacagctgtagaattataaacatacaaagaaatatgtgtaaatcattacttacatactcttatttaatcgaccacaaatcagtattttattagtatttatcacataagcttgtaaagtttgattataagttgtttgatggtgtttatcagtttatgatgatttgagaatcacactaatgatatggttgaattgaaacaagagaattctgtagttatgatcttcaggtgctttctcatactctgccttgtgaagcaagttttgttttagtgtttgataagggctggttttgcttttttacatttcattgttgcttagttcgttaaatagtttccgtatattttagtttcttgcctgtgttaaactctctgacttgctcaggccattttatgctctgtttgtgaacattttctcaactatcttctgctcttttacgaacactaacactctgattccatggttggcagaaggatagctgaactcaaggaacgctactgtaaaactgcagtccaagacataatgtacatgttaatcttttacaaatactccgagataagagtccctcttgttccaaagctatccagatgcatctataatggaagactcgagatctggccttcaaaagactgggagttagagtcaatttacagctgcgatacccttgagatcatcaaagaacacgttagcgcagtcatcggattacgggtcaactcatgtgtgactgacaattgggcaacaacgcagatacagaaactgcatctcaggaaagtatatgctgcctcgatcttgtacggttacttcttgaaatcagcttccctaaggcaccagcttgagtgttccttatcagatattcatggaagcggatatctgaaaagtcccatctttggatgctcattcacaacgggcactgcacagatctccaacaagcagcagctgagacattacatctcagactttgatcccgagacattgcagagatgcgcaaaaccaaggacagaggaggcaaggaatctgatagagaagcaaagtttggctctttttggcacggaagagagtgatgagaccatagtgacatcgttttcgagtctgaagcggttggttctcgaggctgtggcgtttgggacattcctgtgggacacggaattgtatgtagatggtgcatataagctgaaggagaatgggaatgcagaagaacaagaaggaaagaaaagcatatgatgaacaagtctggttagaagaaaagcttcatgatcttctggtagtgtatatatagagaaatgtttctgccgaatctctcaggcagttgttcagttcaatgtatagatcttgcttagaaatattttgatttctgaataagaatgtggtgtggttataaggaataagagatactgtagttgggttcaattttatgttatgtgttaagtttccttgttcaatttgatctttctccttttgtcaaaagactcaaaacctcaaaaacaaaactaaaatttgggtcccaaagaagctatgcaaagggaaggagatactttgataatgcttgtatttttgggcttattttaggcccaaatagcaccttatttcggcccaaaagttagacctaccaaaaaaccttcaattgtcactagagcgaatgaatgtaaaaatctggtctcctattatcaattccgtttctctctcgccggaagatttttgctacttcatctccttatcgccccaccaccgtcacatattcactggtaagcatatccattttgcttcctcatcttccacattaggcttctcccattttcttcttcctcccgccgcgaatcgcgcgtgattagggtttatgaaatctaacgcctcaggtttcgcattttctcaagtttctcgttaatttcggttaaagaagatgccagacgttcaatcaacggtggtggaatttgttaacaagctcagaaagcggtaaattctttctttctggcttaatttcgtaaaaccctttgtgaatatagttgctgattggatcattatctcatacagtaagattgagggctcacaggctacagccaaatacaccgtagagctacttaggtcagtaatttcgcatcagcgggtgcctcacgctaaccaagctgccgctcttatcgatgctgtgaaagctgttggtgagcaattgatcgctgctaatcctgttggtatgtcttcttaaactctctttttgcttcttctctcttagtctgtgaaaggaattgatatatacggatatgatttttgtagagcttgcggtgggaaatgtagttagacgggttttgcatattataagggaggaagatctttctctaactacagcagctatgggtggtttggacttgttggatgcaagtgatgatgatgatgtagacaattgcaaaggaattgggtttcctgcaatgtctgcagcagttgttgcagctgcagctaggagtacattacgccctccatctttgcaaacgcttctcgagggcactcctgaatctgcaactgttccatacacatcttcatctggtgctgattccgaaagcaaaagtaaatgtacctttttcatgcctttggctctcctttgcacatactgtttttttttcagtaggtccttatgccgtctgttttactgatgtctttgataaaccattgaagataagtgttatcgctggaatttaataatgttggctcatattctcttttacaagctgatatataaggttttctttttagctatcgtagacagatttaggtctcagtggttttggttttgctttagggcatttaggcttgggagagtttaagcaaaccctattttactggttcctgtagttttgttgctggaattacctgtgagtttgtgttgtgttgctgagttatagagataaatgagaatcatatatgttcttatcagtctacttttttaggtggttcgtctcactttattgggattatatcataaatgaaccatagatcaaaattttatatggcagcaagaatattttactgtttttggttgatattaatggtctaatatacccttttgtttagctgccgataaaagttcgttaactcggaagctgaagcatgatgttatcgaaggagtgaatcaacttattcaagagattgctggttgtcatgagcagatcgctgaacaagctatagagcatatacatcaaaagtacttttcttttctatagcattatttatctttaacatgttatacatggagaactaaaatggtcgtttctcagtgtcttttcgtgatgatcacttttgtattgcctaaattctattttttcagtgaggtgatcctaaccctgggtagctcaagaacagtgcttgagtttctgtgtgctgcaaaggagaaaaaaagatcttttcgtgtatttgttgccgaaggtgctccaaggtttggtttctccctttactatatgtttcatcattaccattgttagtgttttctctcaacatttttatattctctctgatttgtccatctaactcagctgtatcaaattttcttccatttctattctattatattagatatcagggccatctattagcaaaagaattggtagctagaggtttgcagacaactgtgatcaccgactctgcagtgtttgctatgatatctcgagtgaatatggtacaattcattcctacccaactttatgttttcttgtccttgtcttctaaataatttgcaatgatgtgaaaatgcacaggttataattggagctcatgcagtgatggctaatggtggagttatagggccagttggtgtcaacatggctgctcttgcagcacaaaagcacgcagtcccattcgtggttcttgctggtagtcacaaggttggtttcgagttgtatttaatttctcaaactgttttttgctctcaaaacttgacttagggtttccaatgtaataacagttgtgtcccctctatcctcacaatccggaagtattactaaatgagctgagatctccatctgaactgttggattttggtgaattctctgattgcctggattttggagcaggttccgggtctcttcaagttgtcaacccaacattcgattatgtcccaccaaaccttgttagtctctttataacagacacgtaagtctcctatatataatctttgctatattcttaggttggtccattttcatggcattacttttttggataaagggttggtgatagcgttacctttttggttacaggggaggacacaatccatcctacatgtaccgtcttattgcggactactactctgctgatgatttggtgatgtagcgataaaggactagttttcggtcacttggtgggaactatacaacattcagtcggatagtcggtcattcacaattgaagaatatatgtacattgcacaaaaacagttgctcaaggattgtgaatgaaaaagagaaacatcttagtgtctgaaattgtcaggccaagtttatttttgccgtgtcttgggtaattcctttagctcagtctcaatggtgtctattgttacttgatagtatacttctctttcaacacaacgtttttctttggttggcttttgtatttgctaatacgagaattaccactggaggtggacaggacatcttattttaactaattaaagttttgggtgcaattttacttgataagtgtgaggcgatgcattggttcggtacggttcaatttcaattacctcataaccggatcactatatcttcgccgtgaaaatattcagacagacgacaacacctgcataaacaccattgttcaaaatagccagagagataaaagtaaaaccctaaaccccactagttaaagttaacatttttattgtttctctccggctcctttcaatctgtgtactgtgtatgctgctgatacatatcagaagtactcgaaagatcttagctttggggcgtcatgtttttccttctaatgccttcttctccgtctcttctcgaccttctctgtcttcctcggacgaagtggcggctcatgatgtcgcatctttgctaaaaacccccaattgggagaagaacagttctcttaaatctctagtctctcacatgaatccaaatgtcgcttcacaggtcatttcgcttcaacgcagtgacaacgatatttgcgttcgctttttcatgtgggtctgcaagcattcgtcgtattgtttcgacccaactcagaaaaatcagcttttgaaactgattgtttcttccggattgtatcgagttgcgcatgctgttattgttgcgttgatcaaggaatgtagtagatgcgagaaagagatgttgaaactaatgtattgttttgatgagctgagagaagtttttgggttccggttaaattacccttgttacagctctcttttgatgtccttagctaaacttgatttaggatttttggcttacgtgacttatagaagaatggaagctgacggatttgttgttggtatgattgattacagaaccattgtcaatgctctgtgtaagaatggatacacggaagccgctgagatgttcatgtctaagattcttaaaattgggtttgtgttagattcccatataggcacttctttgttactgggtttttgccgtggattgaatctcagagatgcactcaaggtgtttgatgtaatgtctaaggaggtaacttgtgcaccgaactctgttagttactccattttgattcacgggttgtgtgaagtagggagacttgaagaagcatttggcctaaaagatcaaatgggtgagaaaggttgccaaccaagcacacgtacatatactgtgcttattaaagccttgtgcgatagaggtttgattgataaagcttttaacttgtttgatgagatgattcctagagggtgtaaaccaaacgtccacacttacactgttttgattgatgggttgtgtagagacggaaagattgaagaggctaatggggtttgtcgaaagatggttaaagacaggatatttcctagtgtaataacttacaatgcgttgataaatggctactgcaaagatggacgggttgttcccgcttttgagcttcttactgtaatggagaagagggcttgcaaaccaaatgtaagaacttttaacgagcttatggaagggttgtgtagagtcgggaaaccgtacaaggctgtgcaccttttgaagagaatgctggacaatggcctgtcacctgacattgtgagctataatgttttgatcgatgggctttgtagagaaggccatatgaatacggcttacaagctacttagctcgatgaactgctttgacattgagcctgattgtcttacattcaccgctataataaatgctttctgcaaacaagggaaggctgacgttgctagcgcgtttttaggtttgatgcttagaaaaggaataagcctagatgaagtaacaggtacaactcttatcgatggtgtctgtaaagtcggtaaaacccgtgacgcattgtttatcctggagacattggttaaaatgagaattttgacaactcctcactccctgaatgtgattcttgatatgctcagtaaaggttgtaaagtgaaggaggaattagcaatgcttgggaaaatcaataagcttggtttagttccttctgtggtgacatacacaacattggttgatgggttgattcgatcaggtgatattactggttccttcaggatcctagaactgatgaagttaagtgggtgtttgccgaatgtctatccatacacaatcatcataaatggtctttgtcaatttggaagagtcgaggaagcagagaagcttctttctgctatgcaagattcaggagtttcaccaaaccatgtcacttataccgttatggtgaaaggatatgtcaacaatggaaaactagaccgtgctcttgaaacagtaagagcaatggttgaaagaggatatgaactaaatgaccgtatctattcttcattgttacagggatttgtcttatctcaaaagggtattgataattcagaagagagtacagtttccgatattgctcttagagaaaccgatcctgaatgtatcaacgaactcatatctgtggttgaacaacttggtgggtgtatcagcgggttatgtattttcttggtcacacggttatgcaaagagggaagaacggatgagtccaacgatctagtccaaaatgtactcgagagaggtgtttttcttgagaaggccatggacatcattatggaatcttattgcagcaagaagaaacacaccaagtgtatggagctgataacacttgttctcaaatccggatttgtcccgagtttcaaatccttctgcctagtgattcaaggtttgaagaaggaaggagatgcagagcgggcgcgggagcttgtaatggagcttcttacctcaaatggagttgtagagaaaagtggagtgttgacttatgttgagtgtctcatggaaggagatgaaactggtgattgcagtgaagtcatagatttggttgatcaattgcactgcagagaaagacccaccttctaaaattattattacacatgattttgtgtagcttttttgtttgtttgtagtagcaagaagagaatccttttgaagtacagcgtgtggagatcataccttgagtaataccaaggatcctagttgggctgggcctggaagatattaaaataaatctacgaatgggcttttagcccaaatgttaaattgtggcattaaaagccctttctctttcgtctctcaaatataaattccacttttgcgaaattgagaccaaagtttcagtttcattggctggggttttgagagagagagagagagagattcttcttcgtctcgtaaaagagtaatagttgtaataaaaaaaagaaaagaaaaagacacagaagaaacattacagttatatacagaaagagaaggtatatatatatatataaacacgcacccatatgccaacacatggagattgatagagagagagagaagagaagatatttctcagtttcttcgtttgtatatcttcttcttctctctctcttttgagatcttccaatctctctctctctctcttatatatgattttttcaaataaaataaaataacggaagctggtttaaagaacaccgttgaattctattttcccataagctgaaaaaaaaactaaatttttgtgttgcccaccaaaaggtttgaaattttgatccgacgatacttgagctgatttacgttattagtgctatttcgatttcctcaaagatttcgttttttttttcttctaaatttcttagttaacctcttgcgtgtgcaattggtgcacttagcaattcctcttctgggctggtgatttggtttgcgattgttttttttttttagggtttgattggatcgtggccctgatttagaacctaattgcggtcaaaagagtctgtgggaggattgaattggaataaagtgttatctttttttgattggcggaattcacattcaatcggaaagaggccaacttgttggcggcttccgatataaaggtgcttttgagctctgctcatatatcttatttaactccaacgaaattgagagacgaatggttccgattttgattttctctgctcatcatgggtttggcaggttagctacaaatcttgaggtccccaggtgcaaaattactaattttatagtgtatacttaaggataattgaagtgaaatttgggagatcataaagaaatgtttggagcttctaagtgatattattggatatggtggactggatcatagattctgatctggtcaggtgctgggacttaggagcgacaaagtaactagagagtggtttaaagtataccacttttaacggataagtggtcatgtctcgttgcttcccatttccacctccaggatatgagaagaagattagaaccgaggcatcagactctttgataaaggttctacattctttgataatcatgttcttttctggtgtttctaagattgattttgttggagaatgactagagaactttggtaacacgttttgcctctaggctcttagcatagtctaaaggttttgataaatggacggatttgtgggtgcctttgtgttgagtaagggtcatagagactgtttcaggataagtttcttgtataaatgtagcattactgttaagagttggtcgagtctgagatattgtcacccaaacagttaagtagtgatagaggaattgatacctgtaatgatgctgatggacttaaactacctcatatgagagaaccataagtaccccaatattagcttctgccccaattgtccttccacttgtttttcttagtacacagcaagcattgcaggatccttgactaacttagaatgctgagatgctgacatattgaagtgtatgggtttctgtagctggtggttttggatgttagataattgtattccattgatgccaaacttagtaatatcactagtgtgatcctttatccttgaatgaatgtagacgcatactcattgaatttgatgattaacctggtttcttctctgaaaacttatataagttgacccaagaattgacaagtaaaggtaacccaagagttgacaagtaaaggtaactaaatctttgtatgcctttcttctaatcatcacttatatacgtgtggtctttttctcgtgggatttaaactgcaggaaaagcacaaggagaagaagcacaagaaggataaagaaaagaaagaaggaaaagagaaaagggaaaaagaaaaaagcaaagacaaacataaggaacggaaggagagaaaagagaaacataaagataggaaagacaaagatcgagataaagaaaaaagcagaacttcagaggacagaaaagctgctggtgttttgtcaaacaccggggacagagaaaaacttgtaacaaataccttgcagagtaatggtaacggagagtctaagtttatacaggacctggcaagaaggttcggaaatgaagaagctacagaaagtcaaagtccacgaaagattgattttccttgtggagttacagagaataacaattcctgctcaatacctcaaaccaaccgtacaaaagttgacgagaagagaaacagtacccatagaaactctgctatgtcaaaaaagtctgaaagtgcggttctccgagtatcaccttgcatggatcagaaaggagctgaggttaaagttaaaccagtggagaaaaatgataaggcaaagaaacgggaactacaagagaagaatcaccgcagggacagtgtgacaaagagtgataagccattgggtaatgaagggataaagaaaagtgaaccaaaaaacataacaaatggaagtagtaaagagaagaaagaggagaaaactgaggtgataaagaaaaatggtcaggagaaaccaaagtttgtagagggaggacccagattagagagagaacaagacgttgtgggtactagggattttagagtgcaagacttttcaacagcaggcgtcaagaaccttactgctgagagaattcttggcaaacggaaggatcttgagacaaatggattgctgtatggtgagtccttccctgaccgaactcttttttcagttgaaatagataatatatatgtcttgtcgtccaaaaaaagaaaaaagttatatgtgatgtaccttatgtcttactcttgataactcattgatgtctttatatattattagtatattcattttcactaagtgttattaatggattagattttggttttcgtgctaaatgtgaaatgggaatgtgttttacttgtgttattactgtttgtctcttagcatgagtttctttaattgtcatgcagagaatggatctacgaaaaacaagatacataagccagttgtttctcctatatcatccgtggaaaacggaagaaagtttggagcatgccaaacacatccaaagcttgtttctgagttgcacgaaacagtgtctaatccagaggttaaggagcacaagattaacggattcatttattctcaagaacccaaaagccatccaccggtttcttcagtgaaagttaaagaaaacgatgaagcatctgcaaagaagcggcctcattcagacttgaaatatttggataagattttgaatgtaccaaaaagggaggtattgcatgaggttgatgatgttgaacaagaatggctatttggtcagtcaggtaaattattaaaaaagcaaagagcagattctgctgaatctacttcattggttgagaatccgcaagtttggaaccaagctcttaggatagaatctgctgatattatagctcttccatacgttgtcccattctagttttgattggagatgttcattgatttcaacacgagaaaggtcctccctcacatctccattgttgtgactctttactcggttaaacaacatcccaatgacgttgttgatacactgatagcccgtcaccattggaatgggagatgttgcggtatgactggttggcttcataatgagaaaggcttccctagtagaacaattcaagtcagtaaggtatgtgtaggttagagtaaaatcttttcgagagtgtgattgttggaaatgagatttgcggtaagcatctgatagacttttggttcagttttgattcggctgtgtcatcatcagaagatgggtttagcattaagttgtatattagagaggatatagagagaataggggagagatcttataaattacccactaatacattacaattgtatctactttgtttccccttttctgggtcaaagttattcttggaatccatacaaaatcttgatcgtctcttgtgtacagataactttgtcttcatcctttttctcttagtaccatttttggaaagagagatgtttacactcaagctctggaaacataacaggattgagtaatgctttataaactttcaaatttcaatatctcttttcattctaaacaaagtccaatgtagtaatagtatggctaacaaaatctatctatattaagagaatgtcacacctaacataaagataaatattcattttccatgtagaaacaaacaaacccatgaagaagaatcaaaaccaagaaatcattggtttgcttccgaagtttagcaacttccgaagtatttatcatataacaaaaaaaagagaagacaagcagaagcataaaaaaaagacaacaaacagacatgaaaccatctcaaaatggagagcttgactctgtcttcaaggcattagttgtatggatcttgtctagaaacatcgctcttgcggaattgtcactcgaaaaccgacccaaaactgcgattgtcgcggtgctgcttccaaacttctcaattcctctagagatcatacaagtatgcccagcttccgccacaacaatcacatccccgccaacaagaggcgatagcgtttcagcgatctgtcgagtcatcctctcttgcacttgaagcttgaacccataaaagtgtacaatcgctttcatgagtgaacttccaacagggttggggttggatccttcagcacaaaagtagccaatatgaacaactccatagaaaggaagcaaatgatgttcacacattgaccagaagggcatgttcagctcacagtgcagccttttctctttgacctcgccattgactttggcagggttaaagctgtttagcttcatttcgaggttggttctttggaagttcaacatccatttgaggaatcgagttggtgtagcaatgagttctttcctcaacggatcttctcccagtgatttcaggatggaaacaacagcagaaaccatttccgggtcaacttcaggtgataatttagacgagcttttaacgcttgggcaccactctttcacagagctgccatttctgcacaaagcttgcgtttttacacctttgaacatcaagaaactctgaaattcaccccaaagattcgagctttcatcctcgaaaactcctgaccccgaggaaaccagtagcttcacaaatccacggtggctagacaagttcagagagtccaagtccaaactggggaagtgaatgtgagagcattcaagaacaacagcgactccagctggtttgacccaatgttggagagctgaacaaatatcatcagccaaacgctgagggtcttggagccgcttggcgaaaacatcagtgactctagagaacttgctcagtcctaacactctctggcccgatgggacataacctatgtgacacttgacatgaaaaggaagcaagcaagattcacagtaagagtaatgatcgaggtctctgacaacaacaagtcctccgactcctcctgcttgcccaactccttcatccaaccctgcttctggaaacagagcactctgtacatagtccttcaccttttgcttataacctgagaaaaaaagccaccaagattgatactttccacattctaacttatttcaccaatggaaacaaaaaaaaagggagatcctaatagatcataacaacaaataagccaagtaacaagctactacacgggacataaactaaccagggtcaatagctcaagaacagagttacttataagatgaagaaaagagcaagagattcatagttacctctggtcccttcacgaagggccttggcgacacggaaaggagtctttttgatgccttcccgattgacatcttcatgaagaccttgcaagagaagtttgacagcgtcttggattgctaaagtctcaggttggtgctcgaaagcaagctcaatgcagccatttttcattccaatgtcgagctccagattcaaacatccctcatctaatgcgcccatttgacaaagccaccaaccagatccgaatccacaaagggaaagtacccaaaaacaacaaaatcacaaatcagcaatactcgatccccaaaacgagaatccgtacaagttggtgactctttttcaaatccggaaatctaacgaatcgagtggttgatgtaataataaatcaccaaatcaggtaagagacaaggaaaataaaaaaaaaatcgaaaatttgaaggtgcccactaaaattcacaacacaacgaatcttcccaggaaaaaaaaaaagtgaattttcccggaaagatgagaaatttgagaaacgggataacacgcgggtgggaaagaaacgaagggttcccgttgatccaggaatatgtggattcgtaaaatcgttcattttataatttaacctttcgtgttatccgaaagcgtaatgcgattaaaactaatgactttttttcttttctttttctatagactatagtctttttagtgatgtttaaaacaaaaattatttaaaaaggcaaggcggcgaagacttttcgaatgcaccaaacctttcaacatgttctgtcccaaaataataatgttaccgaccaacctagctagtaacccacttgattcttttccttcttttttttcacctatttgtggaaataaaaaatctacattaccagagatggcagaaaaaactatagatgataatctccaaatcaactttttaaaatcatattctctatctcttggtttaatggttgaatacgtcaccggaacttttcttataatatgctctgatagggaatatcaattgcaagattatatttaaagactctacctaaccaatctagtagactaattttattagatcggtcgctctttattagtatatactctaactgaaactaactatattatatgtatctaaaatatatataatctaaacaaaagcaaaacaaaattccagattcagcattcgtaaagcagaatcaatgaaattacaaagtcatttttaaaaagtaatcaaagaaacgaactatttgtatcatgataagtttctactgttatacgtaatacgtttacgagtgaaaggataagaaaacattagagatttttttataagttttagtttcagaaagagaacaaaaaaagctttctcttgttagcttgagatgaatatcttattagatcaagtggaaagcgttgccttcctcaagccgactgagaaaacatgatgtatgaagaaaaaaaaaacagattttcagacattaatagagatgatcctctcaatgcaacatggtttggactttggagaagaaagactaccaaatcgatagtggaagagcattgataactgatttacatatacaaatgtatgttaatttgtagatatcaaatgtaaaataagggctgtgtaatataattgaagaaagataggacaaggaaagtaccttttgtatccatggcagaagaatggtttattgtacattcttgttctttgtgtttaatttgatatatatagccaaagtatacaaagttcataaggaatgtgttgagaaaaaaaaagagttttggtggaatcattcatatataaggagacatatagacataaataaaaattttaaaataaccatatatgtacagacataaaaatagtatttaatctttgaatatatctacatcattatccaccaatatataccatttaatcattagatatcatttacataaaaataagtttaatggtgattacttatttttgttttagtgtttataataagtacattatctttgacaaataagaaaataaattatttttaataatatttacatgttattttatgataagtttccattttacatcctaagcaaatataagagtaattaattattgagctaattagatagataacaaaaatatgtgacaaaatcataactaaagtgcataatgaatatgttaaaataatgtgctatatttaaaataaattttttttttaaaatgtaatacagtatcattagaaataacattaaatgtaaaaaataaaagtgcatagttttaaactattgagggtatgttgcaaaaaaaaacaaaaaaacaaaaaaatcttccatattcacttttggtaatttgtataaaaaagttagtcatctagtaataattattttaattatttcagttttccattaattataaggtccattaaaaattaagttgttgcccccaaaaatgttataaaaaattaagtagttattatttattattttaaaataaattagatagcccatagtatccagtggtgattaagaaatttggggaagtgagtgaggctagtaggagttaaatgggcttattctatgcctcaaattgttttttttttaatcatataacggagaaaaggggaaaatatacgatttcaacccaaactatatctatcgtacatatttatacgctaattaaacttaccatgaacacaatttttaacgccaaataaggactatttaaatgtgtttcacgatatatcttgtagatcatgttgtatttcgtaataaattcattgttcaatgttcaggtaataattgttgtcgtaaggtagttagagagtacttcaccaaaaaaagaaagtagttagagagtataattatattagttcggactgaaatatgtttttactcgtatatacgtataataatcgaccattttcaaatacttttcgttttgaaacaacttgcaatataacataagaggatgacatagccatatcattagcacataccacaattattaacacatagatatctctaaagtaggtagttccgtaattagtatttaaacaagatcatctccaatattccattttttttacggaccatctccaatgttcatttttatattattttttatttaagaaatttttttttatataaaaaattttagtccattatatatatctaaaatagaattttctctaaaataaaataaaggcacattgaattattctctatattttaaaatctcctttaaaataaaataaaatatgcattagaaatgttttaaatcatattttcacttatccgcctaggcttttaacatatgtttactattttaattaatgctgtaattttgaaaatccaaataacttcttgaaaaagacaaaaaagtaaaatagtgtctgtaaccaatcacttttatagatttaaatttggtcggattaagattttgaatttagaaaatagccttgtatctgtatctaaaaaaaaaacaacgttgcatgccacaagcacgttttcctattgtttcttatatcctttttaatcaaacaaaattggaaatttcgaggtgataagaaaaccaaatacaagaatcttatcaaaacctaggttaaatacttactaattaattttgatgctaatctaattttgtagcaagggtaatgactaatgagcctggaaacaaacttcagctttacaatcactgtgagtttgtgactgcagcagaagattaaaaaagaaaagaaaagaagaaaaaaacttcactcaatgattgaaaaaaaaaaaaaaaaaacttcactcaatatatatatatatatatatatatatatatatattaatattagcaactctaagcaccaacttcactcacgttatcatatgcatcagtttttttttctaagaattttgtcatgcatcagtctttttctattgtttttgtaagtaaaaaaaaaatcgaagaatcttaccaaaacctacgtaaaatactaaatagtaattaatttatctcacaaaaaaaacttaaaactatcactcaataacttagggagatttctctgtatattgttttaacttttaagtaataatttgtagacaaataaacatgtaagcaagtgcaagttgtacggcagcaatatataaaacgaaagttggtactaaagacgaaattattggaaaaaaaaataataaatgttattgcgaacagcctagatcttgaccaccgataaaacaagagaagaaagttgatttttgggtttgaataaagtggtttcaattttcattaggccaaaaagtaaaaacttaataggctcaagtttgtaaaataaacttctaatttgtgatgatcactcttgtgatgtgttatgtgttaaactccaaacgtttttgaatgattgtatgtgttgacttttaacagtgtatgcgttgactaagtgatgtacagtaatgagacggggaaaatcatactaatatttccttccgacaactttatctgtactatgcatagtacttttgagacaactttatctgaattttgtatagtatacttttgggttgtgatatattttctcgtttgatttttcttttcaactaaataatatgcaaaccaaatccgctttcgccataagaaaacaactaaaaggttaaatttacccgagagtgtattaatgttgaatagccatataggctatagtatgtatatggctgaaaatagcttatgcgatttcttgaagagagagaaaaggttaaatccgagagtgttttactcatcaatgtcattgtcattctacatatacaacgtaacaaagaaaagcgagaaaaacttaatccgacgagtcaccaaggtcaaaacacctaacacccacttatacactcattacgtggaaacataaaagatatactaccaatcatcctgctcctgcactaacaatcatctcgatgattatgagagtagggtaacgagggaaacgaattcaagggtaactcttccctttgatctcgtgttgatgacgaaatgctccgggtattttctcagcagcatcagcaaaccgtaccatggtttaccttttgcttcagggatagcccagtcttcttgtgataggtatcttcttactcgactgtgatgccatacgtttccatactcctttaatatctgtcacagaccaaccactaccatgcattagctgcaaaaattgttgatcatcagcttcacgatctgcctttgatcttccctctctcttcttctctgcacaaatgaagcagatacaatgtcgtggtgtcactatcattcaatctaagtctaacaaggttcaatcatcaaccaccacagtaaaacttatactcaaagtctagaacaagcctgaaatctatttagtgacacaatgaagttaagctatcatgagcaatttggttttacctccagaggcatatactccttcatgtccatctctccatgttttctttccactgcctctgatatcctcctcttcatcgtcgtcttcatcatcgtactcatacaactctctactccggacgccattcttacccgacccggaacctggacccgaatgataattatggtacggaacaacagtagccttccctaagacgtggtgcctgggtcccaatggaccgcctaggatactccaaaccggaagcaggaagtagaactccttgtcaccaatctgcaaaaggtcctgtgaatcgagcttgacgttggggttcccagggagatggaggacaccttcaacgaagcagccatttttgccaagtacctcgagagagaagcgtcgtctagtgaagtcatagaagatccgagcgtggttgcgagaaatgttcatcccaccgccgagagatgagaggtcgacgtcgacggtcgatttcttagaattccggccgagaataatggagtaagactgcatatagtactcgaaatcctcaccttggagcttcgcaaatccaacctctacatcgctcccgcttccaacggctgtagccatgccgtgaaatttctccgattttgaagtcggagatcaaatttggggttacatagtaatagaatgtgtttggaaaccggtttagatatgttgtggttaaaccgtacaatgaaaaatataaaggcttctcaagtaaatgactattatacccatcatgttttcagcctctccactgtcaatgttacgggccttacggcgatcaaatcaaaacgggcagtttgtttccacggctaacaaaagaaacagctttagttgggccttatctaaaaagcatcagcccattaacgtgaaccggatcttatgtacataaacccagtagtatgtaatattcggggataagcatgacattgacatgaatatggatcatgtgataaccgtaaggcttgaaattatgatgataaaatatgatgaaaagttcataagaatatcgtcacatttttgtcaaagaaatagcaaagtcaagaatggttttctttttctagaatctttgctttacattttgttaaacatttaatcaaccgaaaaaatcacaacgagaaaagaacatttgctatattccacagtgtattcgcagaatcttcctttgtttttcttgtcaacaattcaaatagtctcaatcctctttccactttccaggtgcaattcatgcaagagtaaggctggaacttgtgatagccaagctataataaagcaacttcaacaagctattccactattcgaataaagacacgagtcatctatctactcaacataattctttacagccatttgtcatctagcacgtgcccatgaagccagccaaacatgaaccacgtcgacacacatcagatgagaataaccgttacggcgtcatttgctgacctggactgtctaacctattgcactgtctctcgaagatggtcgccacatgtcaatcccggggtcgtgtttatgctcgagattcgcggagtcagatacgaacacaagaattcaaaacacccaacgtgtcctcgtcaaagccagcaggatctcagtgtacacgtgttaactgtttccatgcacgtgttacacgtggcgtctcggtacttttcgtcaaaattttacttgatttttacaaccaatggaaatagaaaccaacaaaataaatggaaagcgtttatcgataatccgaaattgtagcgctaataaagtttcttaacctttctcttagtgaattttgaaaccgcccatgtccactatccttatcggacatgtgtcatgttccgaagcctttaccattctctttttaattatctccgccccttataatattcctttctcatacaacaaagttggcgaagcttcaaaacccttcaagaggaaaattttgcggaagacaagagaccatctttttgacattatatgtttgttgaatctttatcaatggcagaaaagtttgtagaagatgagaatgtggaggtcgagctcgagctcgagctatgtctttccctgggaggtcctttcaagaaaacggagaaatctaaaacatttggacaatctaacgccgtcggattcgagaaggataacggcgttaatcttgacggcagaacgacgaatgtgacgaggataaaggaaacacggaagaagcgggaggcgaagcagcagcagagaagcggagaagaaggagagtgcaagaggatcagaacagaatataacggagttagtaacggcgatgatatggatttgagctctatcaacatgtgtaacggttacgggtcgggtcgactcaaggaaagcagtaaagacgttacgattgggtcacccatttgcacctcctcctccgtatccgatcctagcagctcttctcgccaagaaggtatataacaaccttcttttaaaaataaactaaaattggttggtatatgtatatagtttttttttagtatataattcgatgtgttgattctgttaaagaatcacgaaaattatgctatttgcatgtagatgattttgaattatggttaatgttcaggtggaagtggcgacattggggcacaatctggccaaaccaaacaggttagatctccggttaacaacattctgaccggtacagagcaaaccgtgcataacacagacggttcaaaagacgcggagacccaagaatggtccaactcttctgtaaccaaagagagtgggaagccgccaaaaccgcataccaacagtaacggtaacggcagtttgcttccgtttgctcagatgccttgcgtgactagcaccggtaacggtcccgagggcaaaaccgtaaatggttttctataccgttactcaaaatcagagatcagtataatctgcgtctgccatggaacgtctttctcgccggctgagttcatcgttcacgccggtgggactaatgtgtcgcatccgttgaggcatataaccgttgttccctcaactttgtgaactacaaatttacatattttgttactctttttgtctcgtttttgtgtatataagtttcaccgatggacgttttgagttcgaagggactctccatccatgattttcttagagttttgtttttccttgacatttttcaactaattttacacttaatttgttgcattgtctctcttattaacgtatcagtaaaagtgaagaattcgtgtagttgtatatatatttgtttatttatgcaatttcatatggtttgaattcgtcaacaaatattctctagtaataaagcagttaaaaagtaacagattttactaacaaacaaacgaaaacgctcaacgattagtggcaacaaatgtaaatataaacattttatgaaattgcataaataggacgaaaaatccaaataaaaagaaattctcagcaccttctttctctcgcgctcttcgtctcttcctctgttcttccttctggtgaataaccgtaggaaccgccattggagtgggtgtggaagaactcggagctactcaatactcatattcaatcttcttcactacttcgctgtaatttcaggtgagtcttctttcagcgattccggtttatcgttggttcgaggattagatcagcgatgcatcttttgcttttgatttagtgaaacgtgaagacaatctctatacttctttcgtcatttcttaacaaataagtcatttcttttgtgttagccgctgcttctcaccatttcttttatgattatgttcgcaagatctaacgattttgcgtttggaacttgatttgagatacagggcattgcatattctctgtatcgatggatcctcgtccaaatactgcaaaggtggtatataggatccaacaactgtatgctctgttcttcggatttcattgtcctgtgattgtaactctctgtataaacgtaggtgggggatgagtttgcaaggcagtactataacaccttgcaaaacgccccggagaatctctataagctttataaagataagagtacgatttcacggcctggactagatggaacgatgcgtgtcttcactttatcggtaaagatacttttcctgattgacttagtaactttggtgaaatctttgttctcttgaatgattcctaatcttggaacagaaagatcttaaatggcgatctcctggtagttttgattcggttaagataaccagcgtcacgtcccaagactctcttaagcagggtatcctcgtcgttgtttatggctacctcactttcaacgagagacctgcaaggcacttcacacaagttttctttcttgttccccaagaaaaaggctacattgtttgcaccgacatgttcaggtttgttgatatacccgaggccaatgcagccattcctcctgctaatgatggtgagtaacagttcaattataagcagcctccatattttgctttgcgaggaagtaagtgtctaagatcttggtttaatgcgaatggttcagtcatagaggagaaagttccagaaacggagggagctgctctgagagtttctgaaccaaatcatggttttgataatgttcccaagctatcttgtgcttctgagggtgcagccatttgcgctaaaaaacttcctctagatgcaaccattgcctttgttgagaatgcatttaagcagtttggagaaattagaagaggtggagttgaagttagaatcaactgggtaaaatgttattccactaacaaccttttttattttttgaacactttcttcttcatggaaacactaatttgtctacttgtataaaactggtagcactgtactgggaaatatgcttatgtggagtttgaagaagcagaggccgctaacagggcaataatggtcggcgctttggaccttgatgacccttgtttaattatttgatcggtgttttgataatgctggcatgaatcttattcaggcgtctcctataagtattgatgggtacagaacttacgtggagaagaagtacgcttacaataaaagtgagtattagttagtcactgtaactgtcaaggaattgtgttaaaggctttagttttgtttggtttagtcttgtgatcactcaacagatataaaagctgatgcaggtgctgatactggaaatgggaacagtcaggactctcaaggtaaaaagtttgtcttttctccttcccgtttatgtatacagtgaggagtctcaatttccgtaaccttttgtgtgtttatttaccagctataactgaagatgcacacattcgtgtaaaagaccttcctccaaatgcaaccgttgccttggttgagagtgtatttaagcagtttggaccaattaaaaagggacgaattcgagttataaaccctgctaattcggtaagtgttgagtgatctactaacaagcatttttcttattaatggaaaggctaatttggttacatttgtgtgaaactggtagaactattggtatgcttttgtggagtttgaggaagcagatgctgccaagagagcaatacaggtacttgctttggacctggacctggaccttttttatacatttgttctgaatcttggttaggattcactttgatctcttgaagccttaagtgttagattgactttgacaatgctggcatgatcttattcaggcgtctcctctaaatgttgatggccacacaacttacgtggagcagaagcaaccatactatgaaggtgagtatgtgggagttattagttagtcaatgtaacgatcaaagaaattcctgaagggtctagttttgtttggttttggaatcaggttactatgaaagtccatccgatggaccaggaaacataaagagaggcgagggagtgagaggatcactaggtaatcccatttgtaactggcagaagatggaggaagtgagaggaacagatgtttatgacttgcaaaactggcaaaagattatgaatcaatcggaggagcagatgaagtttcaggaggaagaagggcgacaatacaatcaaaacagatatacaagcgaggaagtgagaggaacagaaggagttggtctggaggaagaagaagaagaagaagagaaccaaaactgggaggaacagaggaagattcaggaggaagaaggaacagaatctcacgaaggtaataatggtgggtaacaatggtatcaactctgtttttatcaactctacttttgacatatctctttgtttatctatcagcgtccgttttccttaaacgtcttcctctagatgtaacctttgccttgattgaggatgcattgaagaagtttggaccaattaatgccatttcaattataaaatctggtccggtaagtgttcaagtaatatattaacaagcatttttctgaacccttcttcttattcttcatggaaacactaatttgtctacttgtatgatgaaactgttagctctataaatttgcttttgtggacttcgagaaagcagatgtcgccaacagggcaataatggtacactacacgctttgaaactggactattcttaaatgttttgtgggattcgatttgatctcttgataatgctggcatgaatctcttattcaggcgtctcctgtgaggatttgtgagaaaaacgttaacgtgcagaagaagctaagtgcaggtgcagggaagcgttacacaagaccaacctgcagagacacctcggtgccgctaggtgcaggtaactttcattggctaaactcaaaaacgtgcaaagaagggtgctgaataggcttcttttggtttgacttttcagaatcaggtcacagggaacagggaagtcaaaacagatatggaagcgagcaagtgagaggaacagaagcttttgacttttgggactggcagtggcagaagtcaaaggaggaacagagtaagcttcaggaggaagagggagaaatacaagttgatcattcttgggaggaggaacatagcaaggttctggaggaagagagtaagcttcaggaggaagcggtagaaacacaagttgatcattcttgggactatgagcagataatggaggagcaagaagaggaagaatcaaaacagaaccagactagttatattgaagatattgcggcttttttttcgggtgttttatgattttgactagctcccatgtaattgtaatgatagaatcattgatttgtgataaaagaacacgcagagagccagagatattggttcttaaagtgtggcatcaatgcccaaacaagttctgaaaatctggatgtgtgacatttaaaggagataaattcatgtgagcataaatatactatcacataaatatataaccaaccaacaacgtaactattccttgaaaataaaacggtcaacggttagacgtagacccgttttagcgcgctactcagtggcaacaaatgtaaatatgtaaagcttacgaaattgcataaataggactctctgcgagtgtcagcacttttctctcacgctcttcgtctctgacctgcttcttccttgtcgcgaataaaccctcaaaaccaccattgaaggtggtgtcgcagacctcggagatattcatattcaatagggttttcttccctaccacaaacctctctctctcgctacgatttcaggtgagtcttctttccacggttttggtttatctttggtttggggattagatcagcaatggggtttttcgagttaaacgtaaaggcaaaatctttgcttcttccatgatattcttaacacgtagcccatttattttgttcaagactgcattctttggttatatgcttatgtacttggctagatttaaggatcttgagtttggaattttgatctttagattcagggcattgcttagctctctgaaccaatgcatcctcctgcacgaccttctgctaaagcggtatatacaatccaaacaattgtatgctctgttccatcggatttcatttttcagtgattgtaaatttgcaactctctccataaaacgtatagattggggacggatttgcagagcactactataacaacttgcaaaactccccggagattctccctggctactataaagatgtcagtaagattacacggcctggacttgatggaacgatgcgttcctctaccctaccggttagacaattttcttgactgagtcgttcattaagtaacattggtctgttactgattcctaatcttggagcaggatataatcgaggatcttgatatgctatctcctggtggttttgattcggttgaggtaaccagtgtcatgtcccaagactctcatgacaagggtattcgcgttgctgttgatggctacttcactttcaacgagaggcctgcaaggaacttcacacaaaacttcacttttgctccccaagaaaaaggcctctttgtttcgactgacatgttcaagtttgttggcatacccgaggctaatgcaaccattcctcctgctaataatggtgagtaatagtggagcctccatattttgctcgcaaggaaatgtgtcgttcactatcccatttgtttatttatacattgctctataactttctgtgtagccgcaatttgcgttaaaaatcttcctctaaatgcaaccattgccttggttgagaatgcattcaagcagtttggagaaatcagaagaggtggagttgaagttagaaacaaaagggtaaatgttaactaatctagatactaacaagcttcgttaacaaaaacactaaattgtgttcatgaaactggtagagcttttcttatggcttcgtggagtttaaggaagaaaatgccgcccagagagcaataaaggtaaacgctagcatttggtcggactgactacttgggggttcaatttcagaactgtctgattggttttgataatgttggcatgaatcttatgcaggcttctcctgtaacgattgatttgcgtagcgtttacgtggagaagaagcgacctgactatatacgtgagtttgtgggagtattagtaaataatagtctctgttaatttgtcaaagaattgtgctcaaggctccggttttgtttggttgagaatcaggatactgggatactccatccactggaccaggaatcatatacagaagcgagggaatgagcgtaacaaaagattatggtaataagggtggaaatgagaataatcaagagcctcgaggtaaaagaaatacttatgatttgtttttgtgagctgcagatagatgaatcactgtatttaacatttttgttgttgtttgtatcagcgttatatgctgcagttcacgttaaaaaccttcctccaaatgtaaccactgactgggtagagaacgcatttaagcagtttggaccaatcaaaagaggaggagttcaagtttctaaccgtggtgtggtaagtgtaattaagtaatctaataaaacaagcaatttttcttattaatggaaacactgatttgtgtacttgtatgaaactggtagggcaattggtttggtaatgtgaagtttgtgcatgcagctgctgccgagagagcagtaaatgtacgtgctttggacctggaccttatttatacttattgctctgtctcttagttgggattcactttgatctcttgaagccacaagtgttattgataatgctgcctggcatgaatcttattcaggcgtctcctctgttgattggtcggcgaaaacttaaagtgaagaagaagcttgatcagcgagtgcagaatcagaactgaacatgaccagttttgtagatgtagcctgcaatttacatagacaaattatgggttttaccaactgactgttcagttttggttattggtagtgacaacagcgttgagagatatttggattcattgtgaagcttttctttaaggtgttttggatttcggcaatcagacactcgttatgatcaatagaagaacttacgaaaggaatcaatgaatgggatgtttgttaagatttttatgcgaattttgggattttttgactctggccaccaatctcagaagataaataacccaaagccaattggcaaatgacaattccataggaaagaaacttaattcattaaaatgatccttacaactgaaataggtaaagagaaattacaagaagatgtaatctgttctcattcattcataacaggtttgttgtcgctggctttgggcttctgttctcttggcttatcttccattttcctgattaaacataaaaagatgatgagaattaagaagatgagaagaatgacacatcaatagatagatctgggaacaacatcgagataatctcatatttggatcagacaagacaagattttgtaccttttgtcggacgagctacccttctggctcaggaaggatctgaatagaccagagttcacatcatagatcatcttcactcaactatctcgtaagcttcgattaccggaagaaggggaagatctggacaaaatcgatgaaacggaagcagttttttttttttatatagctttttcgatctcagaattttgctttagtggctgctacaagatacgagtataaccctaagtttgcacattccaacctttttatattgtctggatacgtacttgagccactttggatcattctctgtttcggccttttctctttttatggcccaaatccaccgaacataacgatttctgaattggcacgaattttttgccctttgatgaaagaaaaatctcgatgggtttatcaaaaataagaatcaagaaaaagaaaatcaaaatctctcaactgcaaggaccaagaagttggcgtttttgggtgcagaaaaacgacacagcgtgttactaatcaatgccaaaatattttacatatgaaacaaagaaaagagagaaaagcttcttaaatcttaatccgagtcactaaggtaaagttctcatgagagtagggtaacgagggaaacgaattcaagggtaactcttccctttgatctcgtgttgatgacgaaatgctccgggtattttctcagcagcatcagcaaaccgtaccatggtttaccttttgcttcagggatagcccagtcttcttgtgataggtatcttcttactcgactgtgatgccatacgtttccatactcctttaatatctgtcacagaccaaccactaccatgcattagccatcatattgaatcacaaagaagttcatagtcagactacactagtcattcaaaatctatggagtaactgacatactttctagacttagacacatataagtagcgtagcgcgtttccattggaaaactaattaaggacctagcttcacactaattatcaccttgacattatacaagtcttgtttcaattgattactcgtactacattctgtattagaaaaaggcaaggaactttctcataaaaactaaccaccgaatgaagtttttccataggcatccactctcccggaccacacaaatcggaaagcacagtggcaacagacgatacaacatctttttcctccagctgcaaaaattgttgatcatcagcttcacgatctacctttgatcttccctctctcttcttctctgcacaaatgaagcagatacaatgtcgtggtgtcactagcattcaaattcaatccaagtctaacaaggttcaatcagcaaccaccacaatcaaagtctaaagaaacaagcctgatgtgatcaagtaagcatcataatctgaaacatatctagttgcacaatgaaaactcaaacaatcatgagcaatctggttttacctccggaagcatatactacttcatgtccatctctccttgttttctttccacttcctctcatatcgtcctcctcatcgtcgtcgtcatcatcatcttcatcatcgtactcatacaactctctactcctgacgcccttcttacccgacccagaacctggacccgactgataattatggtatggaacaacacttgtttgcccagagacgtggtgcctaggtcccaacggcccgcctaagatgctccgaaccggtaggagaaagtagaactctttgtctccgatctgcaaaaggtcttgtgaatcgagcttgacgttaggattcccagggagatgaagaacaccttcaacgaggcagccatttttgccaaggacctcgagagagaagcgtcgtctagtgaagtcatagaagatccgagcgtggttgcgcgagatgttcatcccaccgccgagggatgagagatcaacgtcgacggtggctttcttagaattccggccgagtataatggagtaagactgcatatagtactcgaaatcctcaccttgaagcttcgcaaatccaacctccacatcgcttccgccaccaacagccgtagccatgccgtgaaattctccgatttgatcgaaagaggaaccgggacttccaaattagggattgcaatcgtaataatttgtgaatcgaagcaagatttgtttggaaactggtttagcttatccaggacaaaggcttattttgtgaaattgacgattatacccatgattttaagacctgaataaaaaccctaatgacacaactatttaaaacagccgaagaaacattgagaatggcggcgagatctgtgagcttaaaggttccatctctcccgcaaatagtggagcatcttattgattgtttgaattttttgatttcgtttgctttagaacataggcttggttagttttatgtaaccttttgtttattttcgttgttggtttgattgaataagttgccaaatgatgattgaaaattttgcgcaagggttttgagtttcggatgattggagtttactctggtctgaaggaaccgtgacaaaattattttctaataattcattctgatggcagctcaatcattgttagatatatcaaatttcaattcgagttttgggtgcatggtttgattcggatggttaattgtagtttgttttgttagtagaagcttggttttggggcagcttaatgaattttaggattcaagttttcaaatcatttagcctataatgttctgaaatgtgttgtgtaatggctttgatttcctgaggatctgactatagaatgtttaaaatcctgaggaacggtgggaaatcatgtatttgtgtttctttttttttttaagattcaggttctacaaattatgcttaaagggctttgagctcctgaccgcttgtattatgagatccaagaaaatgtgaaaagtcgtttttttttcctttcccattttgatggtttgggttgcattttactgttcttttagttatcatgactatgctagattctggtctggacataagttgcttaagatgtgtggaaattatgcgtaatggatttagaattggcaatttgttatttgaaggaattcacttctatagatatcctttaatggcacccgttcatggtcagctccaaatatgcaagaaatcggaaaatgcattagtgtagtcctcttttctggtatattgtcaatactcaaatcttacataaactttgtttcaaggacaatgaagcatgtggtcaagattttgagcctgctggtagctgtctctgccttttagtttgctctcttgcaggctgcaattatggctcgtagccaaacatagttggttagtaatgagtctgttgtgctcatttttgcttattgctattctcagttagtcaatattaataatgtatatctttgcaccagctacctatatacgttgtagtgtcctttgctattaattgttggaatcggtttagtgcagttccctacctctcctaaagaagcagtttttctgcagcgggtactttcagtactcttttctttctttgttaactcgaattgttaattaaggttaaattaagttcttgactagtgcttttgctcctagctgttgttaatgttgattatgtactagtttgttttggtgctattgttatattgcaggatattgcagatgcaaaaagacttcttaagcgctaacggaattgatgttggatcggatttgacacattatggtttacttcttttcaactccctaaccagtgtaatagaatacttggagtcttcgatggttcatagaaagagttcccattttcattatgtacagtcgtttactatgtttttttgagagatgtacattgagaaaccggtgtttgcaattggattttgttttggggttttaaacatgatgaagaacaatgttattctgataagttcactttaattgacttttttttttggaatatcgtttgttacattttttctcgtgtatacaataagttgtgaatccaactctttcaagtttaaactacttgagattaacttaaatgctccaataaaattgattgaattggattttctagttttgtttgttttgaagtaaaaagttggacttgaatgctgataagtgataataaattgacttgcaaccataactgaaccaatctaacaacatgtaactattccaagtttattataagctagatttctgaaatggaaatgtcgttttaattttacatttttgccgagatggttaaaactggtaatcatatacattacaatttggttaaatgaccaaatctatttgataacaaagagagatataagttaatgaaaccatgattagacaaatcgacaagcaaagaaaacgttaagcaaaaaacactaatcataataagcaaaaagtccatccatgttcatcacatgtacaaagatcctctctgtcactctagacttttcctctgtttgcttcttcttacaaaatgacacacttaaaccaaataaagaaaacatttcccccaatctttatacattttcttttgaattaaagaaaaaaataaaagtgataaaagaagaagaagaagtccccagctagctccttaaagaagcacatctctttactcatttcacgattcccctgtctcttgtttctctctcacttacctcttctcgagttttctcccattcttgggtcttcatcgagaccaaatccggagaaagttgatgtttttacagcacaaacagacacagacacatacatgtgttgtgtctccctaatcccattattactaactcgcatccaattcacacttctctcctaaattcccatccttttcagatccaaaacactctcctccaaaacccagattgccaaattagggaatttgacacaaaacccatctgagagcataatcaagagatagagagacaatgggagtgatattggactcatggtgcttttgtaaaggagttggcaaaagcgagaagatgaaaggttccatttttaccggcaaagctccggcgatggctcgaatctctgtctccggaccaaatggtgttacttctggaactggattcctcattcaccggaatcttcttctgaccactcacctcaatcttccttccatctccgccaccgaaaccgccgaggtccgccttcagaacggtgtcgctgctgctctcttccctcacaggtcccacctctctctttactctctcttgagtttgattcaaaatttgatttttcattttcctgtgttgtcggttgcacgatcctggtaaattttgatgcaatgccatcaaaaaaattggctcttgttcaaattttcaaaaatgaatccatatcttttcgtcaaaccaaaagaacttaaaagaaaagagctttatactgtacttatgttatatggtaatgattctggatctgtagctgaatttggtaagttttcattttaatttcataaactttaaaccaaaacattgatatatcattttgtgattattggaacatgaaaattcatttgttcagatatttcccaaaatggaaacgtcttgattgcatcaaacataataagaaccaatctgaattgtggatttgtttggtcaatgatggtgttttctgttctttagctatcagaaaatgagtgttatctttatatggtgtcatttgcaggtttttcattacgagttcagttattgatctcactattgttggcttagaccttgttgatggagactcaagttcccagagccaacttcaacaacaaccacattacctgaagacatgttccaaaccaaacctggatctagggagtgtggtgtacctcttaggctatgccaatcagaatgaactcaagatcggcgagggaaagttagttgtagctaccgacaatctcatcaaactctcaactgatgaaatgatttggagtcctggatctgctggatttgatgttcaagggaatcttgcattcatgatttgtgatccgaggaaactatcgacatcaccaacctcaacctcgtcatcttcctcttcttctttgaagaaagataacaacaagacactgatgatgcagtttggtataccaataccagtaatatgtgactggctgaatcagcattgggaaggtagtttggatgaacatacgacgaaacctaagttgcctctcattcgattaatgtcttctggtcagaagagtgagcgttcttgtacttcattcaccatgcgccgtgttttcaagccaaacgactctgctgatgttggaacaccatcttcatctaacactagagatcaaactcatccgagctcttctatcgctgctgaggaagaaaaagaagaagaaacctcaaaaaccaatccacaagtctgcggaactactactcatgcgcagggtatccctacccctgagatatatgaatcgccaaagttgacttctggtcctctaagaaatgagacagctcaagtacaccttttggacatcaactttcctccacggatacctaaagctataacctttcatcctgagctcaactctctacagagtaaccatatagtggaagaggctgagattgtctctgaaggatcagatgcgcagattgcttcgacaggttcagtaaatggtgctctcagtgaggtcatctcaagttcaccgccagcagcagctcactatgtatataacaatcatggatacagcagcgaggaagagacaatgtattctgcagaaacagcagaaagccgaaactacccaactcctccaagaaaaagcgagtttcatcatgagagagttggaaggagtcaaagctgtgtgagctccagcagatggggaactcctcagaagagtttgaatggtagaagagaaatgctggagaaacagagaagcttcgtccatgggaagaagatgcattcacaaggagcaatgtcacagaggagtaatgactattacagcccaacggtctcatctatcatgaagaaaaggattaatagttcagagcaacagattatcaaaccggtacctagacctagagctgttagttcttcaccaagatgggcgttctaaggtcgatacagaccggagaaagagccaccttcatagaaagagagacatctttgtttagatttcgatatctctcattcttgtataaccaattttattttaactcttgtgcagacatattgaagaaaacaacaaataggaaacatagaatcttgaatcgatcgggtttaagcccttaaagcaatcattgattttgagttcctggaagtaaaaaagtattttcgtttttgctatcagaacatagattgggccatgactgttggatgtgttctttgatctgcacagcaatgatttcatgggaatgataccaaaagaataatcttttcataagaggtaactgtggaccaacagaaaaatgtgcagatgccattactgccttctagtgaacttgagagagaacatgcatacagaggcttatgagttatgatgtagaatgctttttcttaagattcaacaatatctcctaaaatatctcaacaatcactaagcaataaggaactactcaaataatgaagatcaccaatgaacgatatccattagaaaatcaggtcttccataattcctagatatttctcttacaaaacagaacaatattgacataacaaactacaactaatgaacaacatttcttcatcgttggaggtagaatcgctagaccactatccctgcaagagaagagaaagaaaaggatctgaacggcgcaatttttagaattcagcagaaaaaaacaaatctcattagctagacttacatggctactagtgatgtttctgtatcattcatctggtggttggaaggaagacccggataaggtccttaacagtgatttttttcctacatgtcgggcatttagcttggagggataacgcattctttatgcactttttgcagaaaatatgaccacatttcgttgaaacctcctgagtaaatggacacagacagattggacagctaaattttggttcctctacaggaggagccacagccttggactttctctgaacaagaaaatgaaacttggtgagccaaactccaaacagcaaaactttaagaaaagaaaagaaaaccccacccacatctcttaccggcttgttaagctcaactgagtcaacactagtttgatcagagcgacgccttgtggatctattagcaccagctgtacacataccatcacagtaacaacagtgaacaaagaaacacgtaactgtataatcccaactatataagacatgatattgcaccacaagtgcatcattcagattctggtagctatgcaaaaaaggaacagtaaaagatgttaattcacctgactccacatcaactacttgtgatcctctgcgtgcacttctcgatttgtttttagcctggaataagaatgaaaacagatctataaacttgtacataaaaaccatgacttaaattaaaaaaggggaaaacaaaggaaaagaagagagcagacctgagcaaaagcagaagcagttgattcaacaacatcatcatcatcttcaatagcaaccacattgatcctaggaggagtagccacaatctgaggcaccgttggagcttggtcagccacttgttgatctccctggtgttcgttttgagtcacaccatccctccttcgaagtctcatactagtcctcaccacccgagaagccatctttcaacagagttaagctaaccttacagtcacaaagtcactactgaattagagtactctcaagtttaggtcatcttcggaaaaaaagaaggacaaagattaacttctcaacaaaaaaatcaaagattttgtcacatttcagaagacatccccatgaattacaagaactcaggcaaaaaaattcaagatttttgtcaaaattagcctaacggaactaaaaataataataattcaaacttggaaaaatccagtaaggcggtaaagtttacttctttgtggaagatctagcaccagtaacagtggaagtggaaacccaggtagaaataacaaataggagagaaaaaaatagagaactttaatcgacagatccagacatagagagccaacaagggcagagattcaaagtttgtacctttgaaatgcgcaagaagatgtcgacgatgaagtagattgcagagtggagtgagagaaacgaaaggacacgaaaggattattacaatccaaaggctttctgatgaaacctggttacaatggattacactactttggatatgagagatttttttactccgttacactttttgagtggttgaatccactatcaagtatcaatcccacgattagtccattacacttgtactttccatactcatttacatgccacatggtacagtcgtcgtttcgtcaaaagactcttgttttcttcgttggttactttgaccaaggtcacacgactcaaactagtttagttactactcctcccaaatatgaccaaggcccatgggctttgtcttaagatgaacacatttattttcatacgcaaaatgttttgtcggtagcagaaataaacaatttttcattacaaaattcaaatacacaacacaaataaactacaccatccatacttgagaaacaaattaaaataatttaaaaaaaaattgtagaagctccaacgttgtcagcaaaaacttcactcctttttgttacaaaagaaaaagatatatcgaaatagggataaatatgtacattgtcttcaatatttacttcccctgcggcaccatgagaagcagcagccctgcacatcccaattcacatcaaaacacaaattctaacgatggacaaagtagttgtgtttgtaattaaacatttgtatattaataaataaactaccttggaagaggtttggttggtagattgatcatgttgactgttgatggggcgggaaggagtgttgccggctgttcctccgttgggtctgatgacaccttcgtttctctcttctttgactttctcgaaaatttgtgtgtaactcatgtccccccctgcaccaactgatcctgggaatggcggtatcgttgtccctccctacagatcatataatgactataagcaaactttttcattcatatcatatatatatcttagattataatgtgactcttcaatcacataataacatgttaatgcaaatcgcaaacaaagatccaagttcatttatatattgtgtctttcatacccttccgttgttgccgcctctgagattttgtctaggctgcgtaggacgaggagctggtggctgccgttggttcccgactgatccgcctccataacctccataaagaccacctgcgcttccacttccactcctgcctccgcctccactgcccccgcctccgtagagttgatctgccggtggagctttgactctgtttttttcggttggtggaggtgctctcggcgtgtcttgcttaaccggttttggtgcttccggtttttgaattctacgagcaggctgaggaggaggaggagctagctcttgaggtttggtctctggtttctctatagattcatacaagtcttgtcgtttgttcgtccttgcgttgtcaaagacgaccgtgaatggttggtcttggttgttccagtccccaaacttcggaacgtgtggacggttctgcaatcaatcattcaacaataaaaaatgtttttgagaaaatggtcaaaagtgatttgagctttaatgacttcaatatcaaacttgagatgcaagaaagcgatatgtatatgaaccctaatcagacctatgagaactatctttagcttctcaacacatactggaacagattgaattcagaagaagaatatatacgaaagtcaactgatatgaaacaaagactcagatctctgttctaatatgatcaaacaaacaatttaaacaatcattgggaaatgaacagacaaattcggatcaacaagctaaaattccaacactctgatggtttcgtcataaaacatggtttgataacaagatttaagatgataacaaacgagagggggatataacacaattttgttagatagaaaagagttttcgaacttactgccatatttcttgatctaaatggagaaatgaggaaaggcttcaacaatggcttaggtctgattctgaaacacagagatacacataaaatgtgtgtgtaatatataaaggcgttgacgattcgtgttactctctgtaaagtttgaatgtctccgtttcttctctcatagtctacattgactccttcaacaccttacggctcgtgacgtggtttggccgcgtctcaaagccacgcgcttccacttgtgccagaaacgcatacgaacaagatcgagagatttcagatgaaccacatgtttaactacctttcatgtagatattctacctacaaatatgttattatggatgaagttacaataattcgttttctgaatattcatttcgatcagagagagcagcatatatgattgatagtaaagaagacaagtgatatgaaggagggtcattttttaaaaaaactggcagatgaatcaattagtcatattttttattgtactaattgcaatttgcaagtaaatatttttttagtggcaggtgaattaacttgcacttcatatcacctttttcttttgtatgatgaactagacactttaggttaaacttgcaaatgacgtctctcgggacatagtttgatatgaaagaactccacgcagttccaaattcctttatacacattgataagtacgattatcggaggcattctaaaatataaactagtattttgttagcatgtagaccgtagagaaataagaaaaaacaaactagtatcgtattaattaattttggcgtctctaaggttagctggtgaatgccaacatgattacaactgtaaattttattttgttatattagtatccaattaactaccaaatgatattagcagatcgtggatgtatgagaagagaaattgacttcttaaggggacgacgacttcaacgactgtctatatattatctctaaaggcaggctataaatccaacttgtagaaaagcaccaaatttaatatgttttgagtctttgactttagcaattggtccatcacattaaaaccacttgttttcggatattgaaaaatagtgtaattaattaggtatttaaaaaacgcaggttgctcgtagaagaaattgggatggcgcggtcgctcttggttacacgcatagtctaaacctcgatttctattagtacgtaacatcgtcgaaatatgcaaaatcattgattaaacaagttttacatagtaccctcaaaaacccaaactataatatccactcaagttccataaaaagcggttatgaacttgtgaagaattataattatcaataaacttatgtagaattataagcttaaatgaatggtcccacaattagtgttttcttttctactcaaccaacaacatgtacaattccactttttgactggtgacagacccacaattatctcagttttgacctctctgaagattaagcaaaataacacttcgttcgttcgtactctatgaactcgctgctgacctcctccacatccttagccctgccgtgtgcgataccgatcgtcttcgtcaatttcttaagttctttttgttctccaattcatggtggtaccaacgatttagctactgaagtttagaaagcccccaatttttgttttcgttttagcgtttcccgatctgtgaattgggtatcagctccaaaggtttaatgcccagtaaagttatcgaggacgagagtttaggggtcttacagtgcgagtgaatttagattaaaaggtacaaactttaccttttggtcggaactgggaagagggggaatcggacatgattcagttactattcctggttctgttcgtagaaggtgcgattgcgttcttactactggtaaagattggtcctttaagggagcttgtaatgaagagcttagaccagcttaaattggggaaacgtcctgctactctgaaaaccatcgctggaaccatgtctgtgatcctcctgtcgaatctcatgaatatcattaagatccagaacaagggtgccaaacttgggacaatgtctccaatggatcaagtcctctggagaacacacttgctcgaggcttctcttatgggtcagtttctcttttcctttgtttgaactttgaatcatttctcagtgttgatatgttttagattgaaatttggggcaaatttagttatcttcctcccctgtacttcagctcttgctcctatcttagttgttattagcaatggcttgtgaaagagccatctttcatgttttcttgtctgctgatttggcttgaatttcaaggctgattcaacatctactgggttatataactgaaggatgatatctatataagcaaaacaaaagctttcactgctgtgattttagtgagtgggaaaactaagaacactttataggtatctttcctacatcagtatttaactgatttgtgatatagatatctttggcaaggaggatctctatgtttgtttccactccgttgcttccatagttgtgcttggtactgcttatgttcactaaatttgggaggatttgaaggagtggtgaaatttgttgtgatgattggaatcacgttttgagctcatatgttcttgcaggtgttgtgctcttttttggcttcattattgaccggacacatcattacctcgaaaagctaatcactttaagaagcaatgtcgggtcatcgaaaggagaactagaagaacttaggaaggagagaatcgaactgaaggagaaagaagagaagacatccaaggaaattaagcagctgaaagaaaaactgtcgtgtgtttcagagaatctcaagaaactagagaaggaatccaaagagaaagaaacgaagctcgaaacagctgaagcccatgtcacagctctccaaaagcagtcttcagagctattgttggagtatgacagattgctagaagacaaccaaaatctccaaagccagattttggttggaaccaagaaaacctgaagtgatttaagattcttaagagctctttgatagagttttagagtgttttgtgaacgaatgcggaaatggtaagtggcaaccaaggaattcttgtactcgttttttttttgcgctcttggttcctacccattgatgctgtcttccaaatattataatgttacgtaaattaacaacatcagtaagaagccatctaaacaatgaacctttcagagtacatagtagtaaccaaggaagaagctttgttaatatgaccatagctgtataaagaaccatcagaggacccaaaaaacttaaaagagtttttacgccgtctgtggggatcgaacccacggccacgtggttaaaagccacgcgctctaccgctgagctaagacggctattgaacatcagttcctacttaatataaaagactctttattttacatcgtaggaactgacaaaatcgacgcaagagagagctgagcaagtgtacttgtggcatcttcaactctcggaaagcaccgatggaagaaatctccgatcgtctgaatccgggaatcacgccggagtttgatccgaagactatgcgttccaccaaacctggattgaagcgtctcttcatcaccagctctgtactcttttcattccttttaggtattattctttggtcttcttaattccttgagctccgaattttcgatttcgcttcctttgctttatccctttccggtatcggaggtttcaggtgtgccatttctgtggaagtcagtggaaatatatcgctctccgttaccgttccacgacatcgattctctctccgatcaacttgagtcgacccctttgcgtttcccttgcaatttccacgctgttttcgtcggttttcgatcgacggatccggataacttacgatctcagatacaagatggtataaatcagttaactcatcaaagttcacaatgtggttcttgtgatttttccctctctgtcaccgttcaaaaccgagaagaccagtgctctgatacacttgcgcatagttctaccacgtgctcttaccgttgtggagtgatcaaaagaaatggttttagtgttggattggatgatacagtggatgagtcactgaatgatgtgtttagtggctgttctgagaacagtgggaaaatgtacagtgttgtcgtggtgaataaagagaatgccaatggtggagatgaggtaaaagctgtggtggggaagcgaaggcatgcgtggattgtgggcaatggattagaagagaggtatggtgacattgtggctagagtttctgagattttcgttcaggtgtttatgaatggtggaagagaagaagactcaattcagggagagtttatgcctgtgggatcagatgggaagattgttctttcgttcagtcttttaaattccaatccacgtgattgggtctacgattggtaatgatccaagtgttatgctttctcaccatttttttttgtatatgtatacacctgaagcatttttcgaaaatatgtgtttacttttcttttaagttgtttgtgctctacgttgacagggactttcagaggatagatgaggcattgttggctccggtgactaaggccttagcacctatagctaatataactgttgaaagtcaggtagcattcaccacgggatccaaatctttggcatctctgctattctctcgagctactgatttatgttttctctgtcattaggttttgtatcatacaccgaagtcttcgttttcatcttgggataaaaaacttcagagctacatctttaggaccagtgatcttccgttttttgtacgtaccgttttctcacaatctccaagactaatttggatagaactgattatttaaaagatcatcttaaatggttcttccaggtgaattcgaacgaatggcacttggatacttctgctggagccagtggacggtccaaaatactgcaatttgtggtgtatattattttactctgcccatccttgcttattatgctacttgatgctgtgactattataccgtttcctaataaactgagcagaaatgtttgcacagaaatatctcaattctatgatctttcctcatcttgtcagatatattccatccggaaaagaatgccctcttcttttgcagttgccaaatgtggagatatctaaaacaaatggcttcatatctccggttagtttccttgcgtcaatatgtccttccgttttcctaatatgttggtcagtgacatcttgtcattttgttctatagatgtggggtggtgtgattgtgtggaacccgggaaattgtgacaaggactctgaaagcccaagtaggaacacgatatcgcttcaggtcggttcacttttcatagtcatattatgcttcacaccaattatatataggttgatattttcacactcacttttcatttttcatagtcacttttgactttttcattgagtatctgcagaaccttggaagatcactgaagtatcatcattgattttgcactttctgaaacaggatctcgagcaaatagtcgaaattttcttgggacaattccgacaactatttggctttaagtctgaagccaaatataccactggattgggcacttacaagattttaactagtgaaagaggctttacagagtggtaagaatgtgataaaacctaaaatagatgtgagcttatggatcaataaggtttcaaagcaaagcaagggatgctaatgaggaatggatattgatgggtgttgtctttactggtgtatcatttgcagggaattggatgtcttgtcacggaagcacacttgcttcaatctccattcttgttcaacaaccctcggttctctctctagattggtgtgtcattaactccacatgtatagttatagcatgctctgctgcatcagcaattccaattttcatcacttggcacttgcaggttcggtcactccccaggatgattatcaaggatgaaattggagaacaagtatgtttctcaactagaatccatttctgggaacctttttactgttctgatcattccattgtgttcccccaaaccaggtgaaatattctctgaaagcagcaaagttggctcagtctaatgcttctttgggaggatacagttcttcagccagtatgttaagcttgacctatactcaatatactctgttctaccttagggttggtgaatctaacaagaaattgcggttttgtgtaccataataggttcatcaagagaagcaaggtctttagccgagaatgccttcttccatccatccatcatgtccgtcagctacttctcttatgaacattgctttgcagtgtactcagtaagattcattctctgctactgttattattattagcatcttcttctttctctgagtctcatgtgagtttgctttcctggatagccgtttttcctgccggtggtaggtcacgttgtccttgcagcagtacgagaatggaagagatacaaacaagagaaggcaaagtacttgacatggctaaccagaaagaagacgacctaggactctttagcatactacagattctctgtaactttaaaagtttgtggttgattgaattcaaaattatgacaaacaatattacattgagaagggaactctaggtatcaggcgcatttgatgtacttttcgttgttgtgtttatcttaaggcttctctcacatcaaaagtggtgcaatcaaacagtgtatgtttcaccatgtttacgattacagatgtctaaccaaattctaagctcttaaaatgggcaaaatacaatcaagagaaaaagagccaattcatttctgacaattcttaatgtaacaactccagagaccattcacctgagcttccaaccatcaggtagatggcactaagctcttagggtttagatcccaaagcaagaagtatcttcttcctcggaccctgcaacgaaaacatagcttgtgaaaagagagcgtaataatgttgaacgaagagagtggatgtagtttttcgcgttacaacagatcaaacaaaactgagaaattgaaattcattcaaaatctgcaagatatgataagagtgatactagatgttgtgtggcaactcaacatgaagcttaccatcggtatgagcatagccttgaggtcatcatctgtcatatgcatgagagcatccatatcaacctgtgaatgaccgaaaaggataggaacgttatatatgcatcatccataacataacataaatttcaacctaatagaagatattacatacttcttccacttgaaacgctgttgaatatttctcgagacccaatgattcaagaaagctatcaaccgatgaatcagcctgaaccagaagatgacaagcaaagaaacattagtggatggcctgtatacaagggaagagacatcgtaagctatgtgtctaactacattttcgcaccggtcagaagaatggtttctcccaagcaataaagtactgatggaaaaatatagttgaagaaaagtgaatcatattgcctgctgtgatttcttcctggtagcttgactggaagtttttctagtctctgtttcagtcgctacgctcttcatacttggcctagcagcctccgctttggattttggtgggtcactgttttttggttgctgattcattgtcccagagagctgatcccgtaaatcccgcacgcctgaaccagcttctcgcccactttgagacccatgatgtctcttttggagcttcaaacgaagatctctaggatcaaccctgcgatctaaataagccatccgatagagaatcaacaaccaaacagaaatacttttgtcatacttaattttctactgaaagaatagatgagggggaaaaacatacttgaaagttgaggtttgtcactactgaaaagatcatgctcccatttgtcgtcctgcctttgcctgaaagcatgaggaaggagaaacttgagataaactgatatgtaattaacaatgaagactacataacgagaggaatataaaccattccccaacgcaaaagcaaaaaaagttcatcacccaaaagattcaattaaattgccttaaaaccctaatcaaatcaccaaccatcaacaaaaacatcatcagatagatcacatctccagatttaactatgcaggtaggcactcaaactagagaagctcataaagctgatctaattgacaatgcagtgaagttgattgaaattaccaattcaaaatgggcaaatcagagagtcctagtaagctaacaaaaagagcggattccatactctaattcatagagcgaagcaagaatcaaacttggggatgctacaaggaagattatacacaagaggaaaagactctaacaccaagtaccagctaacatactgaagaattttcgaggaaagcaagatatatctcaatagaattatgacggagagagggagatagataagaacctcttcccagtcacttgtcgcacgcgagtagagatgtctccagaaccgccattgatacgatccttaacgaccttcctgcttccagactcagcctccaatttatcagcatacatctttatccccttggatgaaaaatacagaaatttgtcctaaccctaaattaggaaaactcacaaactaaaaagttgtgtggactattagcagctctcaggttagagatgcaaatagaaatcctagaatctacccagaaatcacagagacggaagagaagctctagaacagaaacaatccattaatgtagaaaactgcggattttgctcacgatgcctttggcttcaccaggatctacgttgcgagagagtattcgggaaattaacatccaatcaaagtaacgggtcgggtcgggtcgagaatcaggattatgcgttcagaacaaaaaaaacgataaccggtttgactgttaaccagagttaatccggcgattcaaaagacgtttcggttcgatttttctttgacaacgcggctaagcttttcatttctttttttttgttttgtcaacacgcggttaaatttttgtttgtcagattcattttttttcttgataaaaaacatccagattcctttctttgtaatgttttagattaaaataaacaaaaaatccctaaaaaacgaaaaagttttgaaacttagaaagacggacataagcgagctagcttctaagctttcttcgctaaattcttggctaattctcttctatgactgatccaattctgcttcgactccatatctgaggtttctgacgtctgattaggtaactcccgcttttgttttttttggggggttttatccatttttaatgtctttgttgtctacttgtttcaatcgtatgaacttgagacgcgagaagctcagattcaggatccctaaatttttctctatttttttttttagttttgtttcgttgattacaactagtcctaggttaaagaacaacgtttacaacttattttgcttttttcagttgtgcctaggtcacttgtccgaatctgtataattcacgtgtatcttcctggatttgattacatttcatttacttagtgttgggttttacgttagtttaagctgctgagtactttgatgttttttgtttgtagaaaatgtctcgagctgagtcatcttgggagaggctggtgaatgctgctttacggagagatagaacaggaggagttgctggtggtaatcaaagcagtattgttggttatgtcccttcctcactatccaacaatagggacatcgatgcaattcttagagctgccgatgagattcaggatgaggatcccaacattgcaagaatctgtaagctcttcttacttgggttttgttccttagcgggtttagcttttcttttctctgtgcaatgacactgttgtgatcttcttgacaattgttttactgcagtatgtgagcatggttactcacttgcacaaaatctcgatcctaatagtgaaggcagaggtgttttacagttcaaaactggattgatgtctgttattaaggtatttttctcttatgtatgttagatacagtcatccatatgtttgttaccgaccacttcattgaatatgttatttatgccattggaagctgcatgaatcctgtgatgtcgttgatatatataatagatgatcaatgtgtggcagatacttttgaattccgaatctgtttttcggaaactgaaatgcgttgcttgtaaattatacgatcagcttcattgaattttatttatgtgatttttgcccatggttttgcattcaaatgctttgttatcacttgttaattgtagcaaaaattagcaaaaagagaggttgggaccatagacagaagtcaggatattcttcgactacaagaattttacaggctatacagagaaaagaacaatgttgacacgttgaaggaggaagagaaacagctccgtgagtcgggggctttcactgacgagtatgtatataaactatgcgcttattacttttccctttgcacttaatctgtgaattttatgttcttgaacgccaaacataactcagatagcttaattgttgtccatacggtttgatattggcttccaggctggaacggaaaacagtaaaaaggaaaagagtttttgccaccctgaaagttctgggaagtgtgttggagcagttggcaaaagagattcctgaagaggttgtgtagatttcttttagcacatcttgtttcattcttacattttttgaacttaagaaagggaatcatgaggatgaaaagttactccaaaaaagttgatgcaattaaactcctattcagctaataattgcttgttttgtacctctacagcttaagcatgttattgattcagacgctgcaatgagtgaagacacaattgcttataacattattcctcttgatgctcctgtcacgacaaatgccactacaactttccctgaggtgaggaattttctattttacacattcgtgcatgctatgtggcttgtcttgctttatgacaaaaaaatgtgaacaggttcaagcggcagttgcagcattgaagtattttccaggcttgcctaaattgcctcctgatttccccattcccgctacaaggactgctgatatgcttgattttctccactatatttttgggtttcaggtttgtatatctgagaagcgtttatccaccttcatatctcacatgaaagcttttcttttttgtttttcattttctaatatatcaatttttatgacctcagaaagacagtgtctcgaatcagcgtgaacatatagttcttcttctggctaatgagcaatcccgtcttaatattccagaagaaacagaacctgtaagtaccaacgttatttcactttcatatgattattttctgaataaagcttctggatacgaagtaatcaatcatcatattgggtttgtttatattactaaagcaaaaactttggtaatataaaccatccgtcaattattcttgtgttaattcgaaaaacttatgcgtggtaattgtgcactgcgcatgtccttagcttgtctggctctttatttagaaggcaatcagttgaattttaagatctgatgaataattttgttttcttatgctcagaaactggatgacgctgcagtgcgtaaggtgttcttgaagtccctggaaaactacatcaagtggtgtgattacctttgtattcaacctgcgtggagcaagtaaattatcccctctcccttctctatttttcctgctaccactcttgcatactcactccgacatttcgtaagatgcagtttagaagccatcaatggagataagaaactgctattcctctctttgtacttcctgatttggggagaagctgccaacatacggtttcttccagaatgtttgtgctacatattccaccatgtaagtttatgctgactgtttatttttctccatattctaacaggtgttaagatgaatgaaatctcctaagtacttaccgctctgacttgctactggttcattttcatcataatatgccgtttgtttggtcttttgcgctgatactgattattttgtacagatggttagagaaatggatgagatcttacgccagcaggttgctcgcccagctgagagttgtatgccagtcgatagtcgtggctctgatgatggtgtatcattccttgatcatgtcattgctccgctgtatggagtggtttcagcggtatgtcctctgtaatattctttcaccctagattttgggatttttccttccctgctcgcttcatgttatataaaaagtttcttccgtgatcatacaatgctgcttcttaatagaccaacgtacaccattgaatgtggcaagaaaatgttggcttttcttagatggaaaaactttttcttatcatctccgttattagtatgtagactaatgattgaataagtgatctacttttgtttttagttggataggcatggatatctttgttgttgatactaacgagtaattttttgtttaatatttcttgatgggttccattacattcacactcattcaaaatgttgacatatgtttcatagcatgtatatttgttgagataatctttgttagttggttttcgattcaaatattgtgtttcaaaacagaatgcagtttttatcatcctttcttatgtacgaatattcatgcatagacatttactgttatctaatggggtatgtgcaggaagcttttaacaatgacaatggccgagcacctcattcagcttggagaaactatgatgatttcaatgaatatttttggtaacatttaatatattttcctgttaagtgaatttcattacctctgctggcttacattttatattttcaaggtctcttcactcctttgagcttggttggccgtggcgtaccagttcatctttttttcagaaacctataccgagaaaaaaggtctgcaatgccccttaaatatatgttttaataggaattttgtattcatattggttttgttacttctattatgcatgtagccatttgttaccttcgagatggctatatgcattaaagaagcaacaaatggctacgtgcattaaacaaatggctgtaaatcagctcctagaccatgtttcagaagttgtattgaagttatttgacgtacggtctcgctgttgtactcattttctttcctttctgctaagtaggttcttgaatttttatttgattttatttagagaagctgaggttagatccttttgtgtttagtataaaatcttgatacagacttcaattctcataggtgtatctgatgttgaatatactggtttttcgttgcagtatgagctcaaaaccggcagggcaaaacatcgaggaaaaacttcctttgttgagcaccggacatttttgcatctgtaccacagtttccatcggttatggatatttcttgctatgatgtttcaggtttgtaatcccgtctcaggattccatttatttgtaatgctctttctcgataatcctcagaagatacttatagtcaacgcttatccttggtggcctgctgctttctgggactgtgttgttttattatagttgcgttatctattgatgatttttggtttaacctgttctttaactttttttggtagtttgattatatcgtatcaagcaagaattcacctgctactactctaacaaacttctttacaggcattagccataattgcgttcaataaagatgaccttacttccagaaagactttacttcaaattctcagcctgggtccgacttttgtagtgatgaagttttctgagagtcagtcttaagcctcatactctttactttatcttcatttattgttatgaattagtgaagaataagcaaatgtttaatgttaataggtgttttggaagttatcatgatgtacggtgcctattctacaacaagacgtctggctgtttctcgcatttttcttcgtttcatttggtttggccttgcttccgtcttcatctctttcctctatgtgtatgttaatattcttttcttgtaccttcttcagctttcattttgcatttgctattttccttaatcttggcatagcttttggcattactttgtttgatagtttttttgtgtgtgcaggaaatcacttaaagcaccaaattctgattcacctatagttcagctttatttgatcgtcatagccatctatggaggtgttcagttcttttttagtatcctgatgcgtatcccaacttgtcacaacattgctaataaatgtgatcggtggcctgtgattcgattctttaagtggatgcgccaggttttaagcctatgtttctctttcttttttaatgcttgaaacttgaataatttcttttaatctctgatgcttacttgtttcattttttcaggagagacactatgttggccgtggcatgtatgaaaggacatctgattttataaagtagcctcttcacctattttcaattacttattttagttctgttttctggagatttcaaaagttgatctagaaatatgtgctagtggaaagacttgggcaagcttacttccgataaactttaatgattattacactgttgtttttttacttgtgtgggagaagcagcagacatacttgtatacttgataccaacatactgaaccctgtatgtttttaatgttcgaagaatttactgacccaattttacaacacaggtacttgctattttggcttgtcgttctgtctgcaaagttttcgtttgcgtactttcttcaggttggtgttttttggtggaagcataattgtaatatgttacatgcataaaatactacatatgtaacaaatgtgtttcttctctctgttatcctagaataagcttttgtattcagtatagattctagctcgaatccagtgaattcttagagttggaagtaaatttatgaatgcaggcgttgaatttttattacagaaagaaaaatattcatctaagaattgacggatatttctctttattgtgatctcttgtagtcacatgttgaagtaattattcgataaacatggcaagatgctttgttgggcagttaaagtgcgactcgaattacttatttttcttatgctgataaatttgcagattaagccgctcgttggccccacaaggatgatagtgaaacagaacaatattccgtactcctggcatgattttgtgtcgagaagtaagtatggaatttgtagattttgtttcgtgagtagagttgaccatagacattgctttttcattacgatgcttaatatttagtaagcctagttgctagaaggattgtggtgtagtctgttagttctctctggaattgtacacctatgcttgttcgcggtataggacatcaaagccgaactctaaaaatattcagtaaggtccttctagggatgttattaactctactattgggttttgtgttaagggctgttctgataatctagagtaatatatcgttctccgtgaaatttttttggtgtactaagtttcgcatgctctaatatttttttttacctcgttgcagaaaactacaatgctctgactgttgccagtttatgggctcctgtggtagctgtaagttcaatggtcgttttatgagggttggcacttgtgttgttctaggttttgtcagcaatcactgaatcaagtagttgtctctggagaattacttcagttataggaggatcttaaaactatttcactaattttggtgaagtttattctgattaggatgaatgttgctgttggggtttcccagttaagttttccctcatggtgttgtaactttgtttttcatctaacgcagatatacctgttagacatccatatattctacaccattttctctgcttttttggggttcttgcttggtgcaagagatcgtttgggggaggtaagtgtggttacactcctctctgtcttacgaatgtcaaaattcagatatttaaaactgttacaacactattcataagagattaggtccttacgtttccgatgctttccttgcaatttgcacagataagatctttggaagcgattcataaactctttgaggagtttccaggggcttttatgagggctcttcatgttcctcttaccaatcggttaggttcctttccatctcctatccacgaacatcatttttcctgtattcctccatttatctttgttaaatattaacattttctcgttttcatttcttttgcctatgattcaatatcatgtgcaggacgtctgatacttctcatcaggtagtgatgtttttttcatcttctcttttatgtagctgttggcttgttttacattatataaatcactaatttcctaaataatgtacgtgaaaatgttgtccccgctgagtcaaggggactggcatgttatttcttctcactattgttgttcatatttgcatgtgattatcaactcaaagactgtggataagaagaacaaagtagatgcagcacactttgctccattttggaaccaaataataaaaagtttacgagaggaagactacatcactgatttgtaagtgctttatgctctacagtaactatactgtgtgcataattctctaagcttctgctattatatatttttgtttttacttatttttctcatctggaatcatttttgtagtgagatggaattgctcctgatgcccaagaattctggtaggctcgaattggttcagtggccactttttcttctttccagcaaggtgagtttgttactttacctgcgtttgtattaaattcaacgttttattgtgatatctcgctagcctcattgctttccataaaatttacatatgaggttacgtatgagtgacaattattatttgataatctactgtagatattattggccaaagagattgcagctgagagtaattcgcaagaggagattctggagaggattgaaagggatgactatatgaagtatgctgttgaggaagtctatcacactctcaaacttgtcctaacagaaactctggaagccgaaggaaggctgtggtatggattttcggccctaaaatcacttacaacgttgttgctggataaaaagatgatatttatcgttaatttttttagggtggagagaatctatgaagatatccaaaccagcttaaaggagagaaatatacatcatgattttcagttgaacaagctctcccttgttatcacgagagtgactgcactcttgggaatcctggtattcgcattgccactgctaattattgtcagaaatgcctttatttaacggctcttaatgataatagtagtaattttgatgatactggaagttagattattgtgaatttaaggcgtccttacctattagtgggagaagggtgccatattttcttcaccctctatcaattggacggagttttattttgttattttcttagcatgatactttatatttgattttaaatttgcatggacagaaagaaaatgaaacaccggagcatgcaaaaggggctatcaaagcacttcaggatctctacgatgttatgcggcttgacatattgacttttaatatgaggtgcatacaaagttgatgatttgttttttaatgcaagaatccaatcgctcttttcttttccttgtttgatatgttttaaaattatgttgctctgtgtaggggtcattatgaaacgtggaacctgttaactcaagcctggaatgaaggtcggctttttacaaagttgaaatggcctaaagaccctgagctggtataatgatgattcttgttgtcaagcatattagtgcactcattctttttcgtcagtctgataattgtctttgatttgcagaaagcactcgtcaaaagattgtactctctatttactatcaaagattctgcagcgcatgttcctagaaatcttgaggccagacgtagacttcaattcttcaccaattctcttttcatggatgtgccaccacctaagtctgtccgcaagatgttatccttcaggtatttctttctccatactttcgtcatattatctaagcaagctcttcacaagttactatcttcttttggattatttttcagtgtcttcactccatactattccgaggttgtgctatacagcatggctgaactcaccaagagaaatgaggatggaatatcaatactgttttatcttcagaaaatatatccaggtatacaattccttttaaagattagcgactcttgcctagttttttatgtttcttacttacgcttcgttatgttttctgtacttaattgtattaccgttatagtagatcctaaatgtttcttattgatatttgatgtgttgcagatgagtggaaaaattttcttgcacgcataggacgagacgaaaatgcgttagaaggcgatctagataatgaaagagacatacttgaacttcgattttgggcctcttaccgtggacaaacgttagctagaacaggtacaataaacgcatatctacacctcttttcttggggatcactgttcacttcatgatctcacattgcaagtaataatgatatctctatcaataaagagaccttacttttctgctattccctcgcatatattttcagtgtttttctttacgtgttatctggcattctatctgcagttcgtgggatgatgtattataggaaagccctcatgcttcagtcttatctggaaagaaaagctggcaatgacgctacagacgctgaaggatttgagttatctccagaagcaagggcccaagcagatctcaagttcacatatgttgtcacatgccagatatatggaagacaaaaagaagatcaaaaacctgaagctgttgacattgcattgctaatgcaaaggtaagaaaagacttttctggattccactgttggttaaggagatggacttttctatctcaggtctagtgcgtctgttatcattctgttattgtattattaagctaatctttttcattctattgtcagaaatgaagcccttcgcattgcttatattgatgttgttgatagtccaaaagagggtaaatctcatacggaatattattcaaaacttgtgaaggccgacatcagtggaaaggataaggtaaactgttattatctgtgaacccagacgtaaactagtgttcttgtttcactaatgtttgaaacacttgatcatactttaattgatcgataaactgtgcttacgctgtaaatggaattttgcgtttcctcccccttttcctctttggtccttctattttgttatatggaatgaccactttgttctttatttatgcaggaaatttactccataaagttgcctggggacccgaaacttggcgaaggcaaacctgagaatcaaaaccacgccattgtgtttactcgcggaaatgctatccaaactattgatatgaatcaggttagtatgcaattcttctttcgtctcttggcatctctttgtttcaaatgtcgtctttcgcgatcttgtgtgggtttgtaatgattaagtttctggggaagttcaatcaagtaaatttgaaatgcataggctttataaaaaatagtaagaataatagtttcaaatttagatcttaagaattaaaaatagggcgtgagaaaaacagtgcttcatagcttatgcacatgtctagtggagacatgtggctgtagattgatttggttagccgagtttcatccaataccttgtccaatctatgtaatttggattaattgactagaattcctcttggtactagaaaaccttaggtgccactatgtagacttttacttgagcataatttgagctcatgcgacattcaaattagatttaacaaatttcgctttccaaaagaataaagtgaaaattttgccaaatctagatacataattttaccaagtacattcaatatgggtttcactgaggaagagtggttcctagctttgtttctatgtttgaagctcaaaattaaacacatgtggagtaggaatggttcttaactgaaaagcacttactgattacatttgagtttggagtgggacatctcattacatgaatgattgtacctgaatcttctgtcatgtgtacatgtgtgctttacatcctttacgtttgagacaagagctaaatgcatccccaacctctagcatcatgttctaatttttttcatttcgttatttgttaggataattattttgaagaagccttaaagatgagaaatcttttggaggaatttgaccgggaccatggaattcgaccacctactattcttggagttagggaacatgtctttactggaaggtctgaaccagacatgcgtatatctatttacttattttctatcattaccttacatacttgttctgcgataatatgcagtgtctcctccttggcatctttcatgtccaatcaagaaaccagctttgtaactctaggtcaacgagtattggcaaaacccttaaagtaagttactaccaataatttttatcttccgtgaacaacttgaactcagatggaatccttattctattatttctgaattctaggatccgcatgcattatggtcatccagatgtctttgacagagtatttcatattacacgtggtggtatcagcaaggcctctcgggtcatcaatattagtgaagatatatttgctggtaaatttgattttttaattgacagttaccttcaaaactgttcgatgttttaagaatataaaaacacatgaataatgaaaagtgcaattctgagccattttttaataccaatttcttccacacatgatggacgttgattatatgcctctacggtttccaggtttcaacacaactctacgtcaagggaatgttactcatcatgagtatattcaggtccgtactttttaactctttacaattaaaataataaaaatatatatatgcattaattctgtttacaggtgggcaaagggcgagatgttgggctcaatcaaatagctctgtttgaagggaaggttgctggtgggaatggtgaacaggttcttagtcgagatgtatacagacttggccagctccttgatttcttccgtatgatgtcattcttctttacaaccgttggcttctatctatgtacaatggtatgtggaccctctttcgaatcacagtgattttatttgcctcttaccattgtattcaagttgatacctgcatccaattcctgaatgtttaccttcatatcaatacttagcagttagcaggcgatattagaaaagaagtttacaacaagtcttgcattactagtttctgtcggtcactttattttttaccttttatctggagctataactgatatgttctaagtttctccaagtatattttccaggaaatcatgctgatttattgacatttacatggccttttgcagttgacggtgcttactgtgtatattttcttatatgggagggcatatctggtaagcctggtgaactaatgttggttgtgacgcatgtgctatcttcatcagtgattattgtacgattaattcttgcatattagtactggattaaggtctttataaccctgcttgtgtttggtttatgctaggcactttctggagttggagctactattcgagaaagagctattcttctggacgatactgcacttagcgccgccttgaatgctcagtttctgtttcagattggtgtcttcactgctgtgccaatggttttgggatttattttggaacagggttttctccaggtactggttcctcaccattttagtcatatcatattgtaatgccatattttctgatatgattgacagggagactgacacgtatactgagttagctctttcatttacttgattatctacagtatacttttattggattataagtcgacttatggtcacccatttacatgttttctttctgatgttttgttgttagttagaaatttgtctctgtttaggccatctttcgtggcgcattgtcacttacagctatgcactgtattctggagatgaacttttgtaatctgaatgatcatatttgtttgttcgattatctgaaggatatccttacatttggtcaaaacgaataatttactttttgtgttttgcttgttaatagaacttaatcttctccatcttccattgtgtaggccatcgtcagtttcataacaatgcaatttcagctatgtactgtcttcttcacattttcccttggtacaagaacccattattttggacggacaattctccatggtggtgcaagggtatattctcattctcggttctaaaaaatctctgtaaattttttggaatgtgataaccattgtttgttaacagtaccaagccactggaagaggcttcgtcgtgaagcatatcaaattttctgaaaactaccgtctttattccagaagtcattttgtcaaagcgtaatctcctcttctttagttcttatgtatatacatttctgatgtatacctgtttagccatagtaaaggattgaaaattcattgatatgctacttctttttcgtttctctagaatggaagttattcttttattggttgtgtaccttgcgtatggcaatgatgaagctggtgcggtttcctacatcctgctgacagttagcagctggtttttggctgtttcttggctgtttgctccgtacctattcaaccctgccggatttgagtggcagaagtaagtggtgctatcttatttatatcatgttgagtgttgagtaacgtgtttctcattgaacaacaataaaattatgctttcagagtcgtggaggacttcaaagaatggacaaattggctcttttacagaggtggaattggtgtgaaaggagctgaaagctgggaagcatggtgggaagaagaactggtaagaactattctcagaaagttttcttgcttgtctgagaactaatttttctaacttagaaaataattattatatctgtgtgtcgacagtctcacattcggaccttgagcgggaggataatggagactattttaagtctacgattctttatcttccagtatggtattgtctacaaactgaagctacaaggatcagatacatcatttgcggtagagcgctccccttcattgactacttgtatctacgcctttgcatatcttagtctgctagtatttgtgcttaataatatcactcatctatctgcaggtgtacggttggtcatgggttgcatttgcaatgattatagttcttttcaaggttagtttattccatcagcatgcttcattttccgataacctttgatcctctgactaaatttgattacatgatctgagatatctcccatgtgaactttgaaataggtctttaccttcagccagaagatttctgtcaatttccagcttttactgaggtttatacaaggtctatccttattgatggctctagctggcataatcgtagcagttgtgctcacacccttgtcagtgacagacatatttgcatgcgtattggcttttataccgacaggatggggaattctttctgtaagttgttcttcttgctcacctcagataccttgatttctttctcatctctgcagattcctcctaattttgacaaacaaatcttctcccgttgtagattgcgtgtgcttggaagccagtcctaaagcgaatggggatgtggaaatcgattcgttccctagcaaggctatatgatgcgttaatgggaatgctcatatttcttcccgttgctctctgctcctggttcccttttgtgtcgaccttccagacacgtatgatgtttaaccaagccttcagccgcggtctcgagatctctcttattcttgcaggagacaatcccaattctggtctttaaacttttggaagctgttatgtttatgtttttcatacatttatttgtgtttagttttccgagtgtagcagtagtaaatgatgggagcctctctgtagctttaggcattttaagacttctgtaacatttgtccccaaaaaagaaaagacttttgtaaaacataacctagaatctttaagatattacgtagaaatgcctttggaaagaaagcgattcaaggaacaaagattaatttattcattaacggtaaaagaataaacctaattactggatccagtcattaacgcgcatgttatgtttgtcgttgttgacgaatccgtgatttggatcctttgaatgtttttggaagtattagtggttagggatcaaataaagcccaattattcgacaggcccatctaacaaaattggggacctaattccaggcgctgaaaggaatcgctggcacaagtagaaggttctagtcggaaggtctcagaagtctgtctacagaggtaccgttggggcagagagcaacatattactagaaaactccagagttcgttattggagcttctaagcagagagagatggcgggagactcaggtcggaggaagatcaaacttttctgtccctcggtatcgaagattgtggagtgggttgcttggaacgacgagaaactagactttagagccatagccgcagcgtttgggctcgaaccatcaacggtgaagctcaatggtcacttcataagcagaggttttgatctagttgccacttgtgtgacgtggcagtctttgctcactttcttctctgctagaggcttgtctactggaaaacacgaagccgatgctctgctagttcacggcaagctctctaaactcggtactaaaagtgagtctcttccttgtttagttttctccagaaagaataagaaaaattcaattttaaacttttctgataattattttatctcatgtttccaggagcacgctcggatcctctggaggacttcgcctgcaatgatcttggtctaatcaaaacgaagaagttgaaagataagtgctcaggtatgagaatattttgtcacaccaattggttttataaatttgtgtcttgagtttgaatctgacttttcaatttcatcagttggagaatcactgatctctggatgcaacaagagaaagctgttgtctgaagattcacacccactcaagaaactaaaactcaacatggatgatagtttcggagggagcggatctaaaacgccattgaaatgcagtttcatgagtgataatggtctgaagaggacaagagaagatgatatgattgcttctgcatcttgtaagaagataagatgacaaggggccaatgtagaaaatagatcaggctgtaatagtttttgtctctaaatatttgactaaacgagaatgcaaaattttgaaactatataagagcaaatcttacacggtcccaaaaaaattaccttgttgatacatatggtacaactggtatttcttcaaaagttttaagcctactcgtccgtggaaaaatattgccacgctgcagcagctcctgcaactaatatgatttttaagataagtttactagacaagaccgaagattcagcttctgatgatgatggtgcttcaattggtctccctctaatcttggctgtgattctcgataataactgcttaagcccacctgttttctttcctgctggagaaaacagaaacaatcataaattttgacattagaatcagtgttgtgacagccaaattaagcctcaagtgatcttggccgcagaaaatttggtgactaaccttggcttttgagaaacctttcttcttcaccaattcgtctacgtagaacatttagcaatgatccaaaatacaatgcgaagatggtgcatgtgatcgtgattacgttgtaaggcatgctaaaatcaggggttgtcaaaggtacgagcaatacttctgtgtaagagcgtactaaggatttttcctgcaatagaccagaagacaaatgaagttattgtagttgaattaggtgaaaaaggcagataagctttaacccttttgagtgttatatcggttctctacctttaaacttgataataagggcgagttgctgagctcttcttggaaatctaaactagcatgatgatcggggaagcttatcaaagccgatggaatgtcgaatccttgattagcatcaggaggatattcatctatatgcagaaaaccctgttgagaaaatttcagacacagaattagtaccacaaacagtattcatatactcatgacaatcagattatgctaggtgaattggaaactatggagaacgaaagatcaccttatcatattcaattgatatggctacagatttcacttcacatggtagttccaacatcatctccatcatgccagatgacaccttatccgtagatggtgagacattgatcttctttaagacctcactgtctgtcttctgttgttgatccacaaagatttgtagagtatgataataaaccttaatataccatgggaaaatctggaagatatttgcttttattgtacattggccattagtgagatctctgcctgataacttctcctgagattctgtcgcttttaacaagatggctattgcacctctttcgttcccgcttcccatcaaaaaccgactcgagtgtaatggagcttgttgacatgaccactttgagggacgcttccaagtaaggccaagatcaaatggctcgctgtcacttgatttgtcaatatcaaaaataaaaagaaagctgcagctttctcgaataaccctctctggcttaagagacaattcaaactctgcattcttccatagttggtgtgcttctatttctgtatccacgttttttgattcgtaaccaagaagaccttccaattgaagatacacattacttgactttgcaagaacacatctcccaacaacttgtctcccaaagagggagctgagggaccaacttggctgcatatttgattcaacagaagtagtctcaggctgaagaacaacagtaagcgtctgctccagcactataccagaacccaatccctcttgaccagattcaaccgtggataaatgcaatctctgagaatgataaaaccctctgtaaacagatggcctattcattaacgcagaaataccatccttatctctacaaggaagtaactttagccatggggtcaagttctcagtacaaacagcttcacgtggcagtgaaccatacctcagcttgtcagaattgggtccaaatccccatgtaggagcagcatatgaagtggaagattctagaaaattgatggaagcacagaaaagccctgacagtgcatgagttaagttcttccaagaagtatcaacctgagactgaggaacatcaaacacagcccacagctccacaccaacaggcttcgcattcatacttgatagagggtcaaatcctccccaatgttcatggttccatcgaccctgagtaaaagataactccatctccttgacccgaaacttctgaacctgtttaagaattgaatcgtacaaattattcaatgtgaatcttcctaagatctcaaacctccgtttttcaaactgcaaaaagatcaaagctaaggagagagctaattaccaactgagaaatagctttcgggaagagatggtgatggcggccatgggagtttgacggaggagctcggttctcgaagtggaagtgagctaaaacttttcgatcaggtaaaggcttcaagagcaatgcctcgctgaattcttcaacttctttcgacccgaaagcgatcgcaaccaaaaatgattgcacgattagcaaaaggattaaggatcgaagaagactagccataatcggattcagtgataaacgccggagtaggtcactgacttgcgttaccgcggatctggcattacagagtataaacgctgagctccggcgaagaaacgataacgaatcaagtgatgaccaaaatcggagtctggtttactctcggtttgggatctgtgagtttgtgattttcggtttgttctggtttactctcggtttgagatttaaggggaataagggattgtatgcaagtgggctccgaaaggtttgggcttcgtcaagtttgacaaacacaatcattaaaaggcaatatgacacgtttaggcacttttagataattttatgagaatattacacgtagaggtactattttgaaactttagccacaaataggcactttgaaaggagaaggcactttaccaaatcaaaattcccaaattgccctctgaaccacaacgctttctcctcattttctctctcaactcttttctctatcgtctttatttctctctctttccaaaatcaaaaccaattttttacgggaatctcaatattccaaatcaaaactaaaaacccaatttcatatgatttatcatcatcttccctgtctctcaacaattatttgatttggttccatttatttctctccttgattaaggaatctctgtcatcgattacaatgaaaagtgaggatgttaaccatgatcagttaccttctaagcaatctgggcttgaaacggttcgtgatgttgagaacgcgagtagcagcaaaaaggccattgtcgatgtaacttcatctgaggcatagttgtccattgatgagtgtccaagcattcaagtccaaatggtcatctaataactcacatttgaagcatagttgtccattgataagtgtccaagcactctagtccaagtggtcatctagtaactcacatctgaagcatagttgtccattgatgagtgtccaagtactcaagtttaagtatataaagcgtgtaagaagatcaattgtagcagcaatgttctgttgttgattcttaatatattcttcgtttttaagttatgatagagaattttgagataatctcagaatttctatgatttgtaagaattatagagaaccaccatgattgatgattttgaaaaagaaaataaaaatgatgaaaaaaaaaacatggaagacagagaagataaaaaatgatgctagtttgtctccatgataacttgtccacgtaaacgtaaccatgtggaaataagtgattctcataagcaaaagaatatgcttttaaggttagacgttcaatgaaacatcaatttatcaagaaagaattaaattgtaccaaacaaggcgatcaaatggatatgaaatttaatactggaatttgccaacttgggttttccataaactctcaaatgtttgattttgataaactcttaaatgtttgattttgcaaggaaagaaaaaaaagtaataatgagaagagagagagagaagagagagagaagagagagagagagagagagagagagagagagagagagagaggaagaagaaggaaaaaaaaggaacgtggagagatgaaactttttttttaattataattttttaattttcaggggcaaatttgtcaaaagtttaatgaaaaagttggaaaagtgcctcatccctgacaagtgcctcaaaaggaataaaattctctaaaagtgcctaaacgagtccatttaaatatatccactcggaaacctttttactgatccatatctaatctatataccatgtccataataacaggagattcaattaaccgtggttcgtatagaaaccaaagttccatgtccataaggtcttgaatgtggaggtctctgcaaactgaaagaaaaatcaacaaataattttttggtatccataataacgagtccatttaaatatatccattcagaaacctttctactgatccgtatctattctatatatcatgtcaataataacagaagattcgattaatcgtgttttgtaaagaaaccaaagttccatgtccataaggtcttgaaggtggaggtctctgcaaactgaaagaaaaatcaacaaacaattttttggtatccataataacgaatccatttaaatatatccattcagaaacctttttactgatctatatctattctatatagcatgtccatgataacaggagattcgattaactgaaatctcgatgctacgtagatgaaacgagtttgacacatgagagaaagcaaaaatcaaatcaagccgctgttgttgaagaagaagaagtttcttttcattttttacaaagatgaagagagagagagagggagagagagggagagagagagagggagagagagagagagagaggagagagaaagaaaaaaaacgtggattaagagaatattttagttagaagttattttagtaaaaaaacataaagaaagtgtctagtcttttgaaagtgcctaaacatggaaatagtttttaaaaaatgtctaaaagtgtaatattctctcattaaaatcatctttttgactcttcctattcagtcaaaagaatttaactggatatgaaagaattcaaattcctatacatatctgtttgtatttttaaaaatttattgctattgaattgattgactgttattttatttatgatggttttgataataatatcactttttatgctcccgttagataagaatttatttattactttaatttctaattgtttttttgttcagttcaattattccaaattctattgcttgatatccactgggtaatcatttgaaaaaatcgttaaagatcgacaaatgagtgtatatcatgctctggtatatattaaactcctatccaatagaaaatagtattgtgaagagagaatataatctgctaaagtattcccactatccagaaaaatacaaagtagaaaatgcacaaaacattatggttagatttctatccactatcgaagattggaatactagtttataaaaccaaaaacgtcacggtgtaactcctcgactgcacgtaatgcatcgaataacgaaatagtgatatatacacagaaaactatatagtatcatataaaattctttagtaataattattaggtcttaagaaatacagtagttgcgagtttaattgactagagagagtcatgattagtttaacgataatgactatttaatcgggcacattcttttccaaagatacccctacgacaacattaaaaaatacaaaaagccgaaacccgcccactacaatgaaaagctccgccaccaccaccaccctctggaacgatgacgtttctactacttctactcttctgctttctctcgccggcaatctcctccgcccactctattccgtcaactttagatggaccgttcgttccggtgacggtgccattggacacctctctccgggggcaagccatcgatttgcccgacaccgatccccgcgtccgccggcgtgtcattggttttgagccggagcaaatctctctctccctctcctccgatcatgattccatctgggtctcttggatcacaggttcattttactaccttcctttaatccactttttcatttacagaagtgatttttggctaattacgtaatttgtaatcttcttcagtttaattctatatatatctttctttaacttcttcctcttaaagaactgtattataaacttataattatgtaataaatgctaactctggaagaatcttatccaactctttttagttacttcagccagacgttaggatcttgtgactctgatgaaagctgttaataataacttaatgcatgttgtgtttgaaaggtgagttccaaatcggaaagaaggtgaagccattagatccgacaagtatcaacagtgttgttcaattcggaaccttgaggcactcactgagtcatgaagctaaaggacattcacttgtttatagtcaactttatcctttcgacggtctccttaactacacttctggaatcatacaccatgttcgcattacaggttcatcttttattcttttcttcattttagctatatgtatgcctcgatattcttggttatggattggtttttgaaacgcagggctgaaaccaagtactatctattactatcgatgtggagatccttcaagacgggctatgagtaagatacaccatttcaggacaatgcctgtttctagtccctcgagttatcctggtcgaatagcggttgttggtgatcttggtctcacttataacactactgatacaattagtcacttgattcataactctccggatctcattttattgatcggcgacgtgagttatgcaaacttgtatctaacaaacgggactagctctgattgttattcttgctctttccctgagacacctatacatgagacgtatcagccacgttgggactactggggtaggtttatggagaatctgacttccaaagttcctttgatggtgattgaagggaaccatgagatcgaattgcaagcagagaacaagacatttgaagcttatagttcaagattcgctttcccttttaatgaaagcggctcgtcttctacgctatattattcctttaacgctggtgggattcactttgttatgcttggtgcctacattgcgtatgacaaatcaggttttataatattctcaaactatgtcctcttaatttactgtttgcactctgttttaacaattttgtcttgtgttttgcagcggaacaatatgaatggttaaagaaggatttggctaaagtcgatagatcggtaactccatggttagtagcttcttggcatccaccttggtatagttcttatacagcgcattacagagaagcagaatgtatgaaagaagctatggaggaattactttattcttatggtaccgacattgtctttaacggacatgtaagacccgacccaaaaagctgtcacttatctttctttgcctttcgatttgatatgatggaccgttatgttttttcttttgtgaaaacttatttccaggtgcatgcttatgaacggtcgaacagagtatacaattacgaactggacccatgtggtccagtttacattgtgattggtgatggaggtaaccgtgaaaagatggcgatcgagcatgcagatgaccccggtaaatgtccagagccgttaaccacgcccgatccagtcatgggtgggttttgcgcgtggaacttcacgccgtctgataagttctgttgggatcggcaacctgattatagtgccctgagagaaagcagctttggccatggaatcctagaggtactgtttttagttaactccttaacgcatcaaaacagagtttagccttaagtttataactaaaaagattaatcattatgcagatgaagaacgagacatgggcactatggacatggtataggaatcaagactcgagcagtgaagtcggagatcagatttatattgtgagacaacctgatcgatgtccgcttcaccaccgccttgttaaccattgctaagatcaaacagagatggtctaataaaatttttgggactttgatcatgtaacagtttctcccaagaaaaataaaagtttcaaaatttctccaaaaataaacaaaaagtatcaaaatttgtttctaaaagatctcaaggaactcgagaacgaagctgctgcaaacaggacagtgacctttctgagccataagctctttagaacagagcttacaaaacgtgtgaccacaaggtgtaaaagaagcgccttttattttcaccatgcaaacgcagcaactaagctctccttctcctcctccatgactatctccttcttcctcgttgttctcatcttcttcgtcttcttcgtactcttcatcttcatccatggcgtatctcgatcctgttaatcccatttgtcgatctgtttcttccaacagatccatcagagacatcgtctgtttcggctcagaagctgaagatgatttcatctcctctgtttctcctgaatcatcctcttcgtcatcgtcgtcttcatcttcgcttcctccagccgccgccgcttcagcttccgccgcttcttgagcagcaaccgcttctctcgccgacatttgtctctcttccacgaacgtgacgatcggatgacgtcgtctgttgttttcttcgccttcgctgtgatctctaacggaatcgtgccgtgataactgcggcttaaaactcctagacggtggcccatcttcaagaacgctgatgtcaggcgaatcgtccgggtttttactcgacccgacccgcattgaagatccgcgcgtgaacatagcgcgtcctgaagaaccaggtggatctgacatcggtatagcgtgaaccagatctcggatgtttaaaccggcggagtgagaccggaacgctgttccaatgtgtttgggattagggataaggatatccgaagcagggatatgaagagacgaggtccaagcagaaccggttcgtttaagacggagtttctcacggaaaatctgccacgtggtccgatctttgtgcccttctttggcgtattcctcacgtatgatatcaaaaagggtttggcttgttggacggtgcggtacaagagattttgatggtaaaggtggtggcgacggtagagatggcggttctataaggatctcgccgccaagcacagcgtctagacttagtccggctaacgagttactacggctctttaacgctgacatttaactccatgcatcgaaatgttacctcgtgcattgaatttagagagtcgaaaacattggatttgcttaatgaaagaattcagaaaaatgagaaaaaagtggtagaaaatttgggattgtgttttaaccttttaatcatttaaacttttgctttcttttttcatttaccttcttaaattgaaagaaaattttgtgggtaaaagtgttttggaatggttagaaagagtaaggaagaacgagtcttaaggtgaaaaagaattatctaaattaaggattactctatgatcttttcgaggaaagttgaaaattctatttcaatattttaattttgatgatcaaaatgtaattcaactttttataacagaaggaccagttttaattaggtttgtggagatggtcgcaacacttgtacatatggttgggcaagaaaagtagagaagtgatagagaatttatgaacatatatccaagaaataagaacaatatatcgtgggttgcatatttgtgaggaacagaacttcttagaggattatttcggatgattagagccatggaccatggtgatcatgcaatacctgattttgaaaccttatttggcttgacacattttgggtgcttctctctgctcatcatactaatttttaacactttgccactactcacttaatatttgagtgtgcaaattaaaattgattctttttgtttggcacaaaacaaaaagtacttatagttttgaatgtgaatccatgaatggtacaaagtttataagtatatttagtaatatctcagttcattaaacaaacagtcaatatgtccgagtggttaaggagacagacttgaaatctgttgggcttcgcccgcgcaggttcgaaccctgctgttgacgtttactttttcctttttttccatggcccacgaaacaaatttatcacatccaaacttcaatgtgacatagctctttaagtatttgccaaaaggaaaatctacgagattctaagacttcggcatgatacagattacagaggatgatatatgcagaggaaaaataaatcacgaaacgttttggaggaggcgcatgacaaaagacgaattcaagaaataaactaagtaaagtcgaattcaagaaataaactaagtcaaaatcgcatacaacaaaacctcgtaatataatagtataatgtctgagcaaaacttgcaaaaacattcaaatacgataaactgattgaattcagtacttgacgggtgcaagaacatccaattgagatccaagcttctcttcagcaaccttctcggccttagctctgagtttgctaagttgcttctttctctcataaacagcttgagctctttcctttctcttgttctccagctcctgctcattttcatcaaacacacattcattagcttatgatccattcttctaactaaaacatgatccaatctaaagatatcctaaaacagtacagttatgtgatgtatgcatattattgctataatacacgcatgacaggaacttatgttcttaaaagcttttcatgacgatgttcaaatcagcttaggtacagaaagcatcacatcagtaaaagtgaacagtacacaagagaaactaaaggtgaagtgaagcataccttgatggtgtcgtagtggttccacccgacttcagaagaaaggcgacccaacagacagtatttgtgtccagcctgcagcctcaagaccctgatcaagaaggaagaatcaaagtttcagagactgtagctacttgtaagtataaatgaaggaaactgaaaaaaaatgaaaatgaaagggtaaaaggacaaacttgagagcatcaggaacgaccatcctcttgatcttgtcatatggagtaggaactccttcaaagaccttcaagcgggcaagtgcattagctccacgcttagtcttgtgtggaatcatactgccacacaaacaaaaacaacaattcaacatcggatttggcacattttctcaaacaaaaaacaaaaactacacattgtacaactacaaaaacatcaaagtggattctctactttagtatgattccaatcctagagcaattttcaatgaaataagagttcatatgcgctttctacattattcacagtactaaattcataaaatcggtgctcgaatcagtagctaaaaataacaaaaccagagagagatcgaagtaacgaacccgcgaacggtacgccagaagatcttggagggagcacggaagtgaataggtccgtgagaaggtttagtgttcatacgcttacggagaaacctcatgtacttcatcttctgacgaacaagtccgccggagagacaaatctcctcgcaccggacaaccacaatattctggccattgagcagatcctttgctacaaccgaagccaagcgacctagcatgtggtgacgagcatcaaccaccacgcgcttcgcgcaaattcctgatccagacaccatttttcactcagctctgatcagccgcaagcttactactccggggtgattaaaagtgagcagcttattcaaattagggttttgcggtgccttttagcaccattttattgggccgtgataattgtctgttgggttatgtacttagtttaggatagtcaggcccatcttttctcttatgttttatatgtaaattttaaatgccaaagggttgattagggaaataatataaaatattggggtttaattgtgaaagtagaaaagaaattagaagaagaagaagaaaaaggagaaaggtatgatacacttttacttacgtgaatgagtttgtgtgacaacaagacaagcgtggattctggtactcatacgatagaaacggttgatgttagagctaatctcaattttcaacaatcagataaacaaatacaaaaacattctctttccttggaaatttacacaccacaattttggaaaaatatataattaaaaatggtcggaaatggaaaggttttaaacttgtcggagctttctcaacacaggaatcgccatgttaagtgagttttatgttggagacatagatctctctaccaaggccagtgatattgctactactactaccccaaatcagacagagcataatcaagataacaagagctttgaattgaagagttctgagttgttgttgattaagctctttcagtttcttgttcctcttttcatcttaggtttggctcttggtgttcgattctacaccaaactccatcatttccatgaaaatcgatttgtggtttgggggcaatcaagaagatttctatggactatggttattggttaacattatttgcttttatatctctctgtattgtctgtgtataagacatcttatatattaatcatgtaagtgacattaccttagtttcttcaaaactatgcagaattggttctagtcttcacagtcatgcattatactcctactgattttccggatagttatagcatgatcatgtgagcataataaatcgataaaatcttggcataaaacatcaatgaattctttattaatttcttataaaattattgtttataactataactttcttatttataatatctttaaaataaattgatttagaaattccgaaaaacataatcaggaagagttttaaactgttagtattaaatttcattttactattttataaaataatagaaatgaaatctatgaaagtaatatttacagatttattctttatcaaaaaggaaaagaaaaggatattttattaaaaaaacagtgataggacgaaactgttaaatgggctggagagatataaaactgttagccactacctggcccataatatatcacatcgtctctttcgctgcacttggtggttctccaattccgtatcgaaaatcttcttcgggtcagacgatctgaagccgatcgctgtagaatcagtttcgtgctccgcagtttctcgagtttcctctcacttcaggtagtcttcgacaccctaatcatgttagattgatattaatgttgaattttagctgatattcaatggttattgatccagatcttcataagagaattcacttacggagagggactttttcgtagacgattctcactggatatctatcacccggtaagatcgtcttgctcgaaaagaattgaaaagtttttaagtaattgaataaggaactgtgaatcggagaggcttacttttttgaaaagatctaaaccatcgtagaagatcgtcctcaaatatctcacagaagttaccaattttgaaagatcactagagatagctacggattttgagaggcggatctgtccaggtcggcactgtgaaagagaactacactggttttttccagatgatatgaagcttccgtgaacgaatctgattctaaggtactcatcgaagagaatctgggattgtattgatctggtcccttagcttccagtttggctataactctgacaactgttgtaagtgataagttgtgatcaataatgggtacggagaatcagggctatccaaattttccagctaggcctgcttcctctccatttgcatctgctccgccaccagggattcctcctcaatcaggtggaccacccactggatcagaggcggttggctttagaccttttacaccatctgcatcccaacctacaagacctttcactgcctctggtcctcctccggctccaccagtgggtacgatgaggcctggccagccgtctccttttgtttctcagattcctgggagtagacctccaccgccatcatcaaattcgtttccttcaccagcatatggtcctcctggtggtgccccttttcagcgttttccatccccgccattcccgactacacaaaaccctcctcagggcccaccaccacctcaaactcttgcaggtcacttatctcctcctatgtctcttcgcccacagcaaccgatggcacctgtagcaatggggcctccgccacaaagtacgacttctgggctacctggagcaaatgcttatccccctgctacagattatcatatgcctgccaggcctggttttcaacagtcaatgcctccagttactccgtcttatcctggcgtgggcggttcgcagccatcttttcctggttatcctagcaagcaggtcttacaggctccgacgccattccagacatctcaaggtcccccaggaccccctccagtctcatcatatcctcctcacacaggaggttttgctcagcgaccaaatatggcagcacagcagaatctgcatccaaactatgcacctcctcccagtaacgttcaaggcttgactgaagattttaactcgctatctctttcatctattcctggatcgctggaaccaggacttgatcataaatcattcccaaggccattggatggtgacgtggagccaaattcatttgctgaaatgtacccaatgaattgccattctagatatctacgactgacgactagtgctataccaaattcccagtctctggcttcaaggtggcatttacctctaggagctgtggtttgtccacttgctgagactcctgaaggggttagtttccgttattattaacaagaatgtctttgcgattctttcatgttctagtgccacatataactttgcctttctttgcaaattgtcattttatctgttcaggaggaggtaccacttattgattttggctcaactggcatcatccgctgcagaagatgccgtacctatgtgaatccttttgtgacttttacagattctggaagaaagtggcggtgtaatatatgttcgatgcttaatgatggtaatttgtcaaaaatttctttttccataaatcatttgatcgatgatgctagaacttcaatactttcaggcatatatttataagatgactattcatagttatgggtttaaatttcttgttcagtgcctggtgaatacttctcacatttggatgctactggccgaagaatggatatggatcaacgacctgagctgactaaaggcagtgttgaaatcatagctccaactgaatacatggttcggcctccgatgccacctatctacttcttcctcattgatgtttcgatttcggctactaaaagtggaatgcttgaggtaagcatgatcgatttgaatatcccactttgtaattttgctggaaatgggctttactgttccataattagtaagtgctaattcttgtgtgattttatctgaatatactacgtattaatggatcatctagactgttcttgtttctttgtctagcttagtggctctctctcttcatatggaagctttcgtataatatagatcttacactgaccttttgctccttcgcaggttgttgctcaaacgattaagtcttgtttggataacctgcctggttatccaagaactcaaattggatttattacttatgacagcacgttacatttttacaacatgaaggtaagagaattgtaaactcacaggaacttttgttttgaaattctttagcctccataattttttttttgtggactttggcaatgcagtcatctttgagccagccgcagatgatggttgtatcagatctagatgatatctttgtcccattgccagacgatctgcttgtaaatctatctgaatctagaactgtggtggacgcctttttggacagtctacctttgatgtttcaagataatttcaatgtggaatcagcttttggcccagccctcagagcggcgtttatggttatggttagttaccatcctgacatatcaagataatatcatataattcatttgatgttgagtgtcctatttagatcctcatctgaaatgtggatcagtttgttgactctgtttctctccctatttcagaaccaacttgggggcaagttactaattttccagaactcattaccttctcttggtgctgggaggttaaagttgcggggagatgatcctcgtgtctatggaactgacaaagaatatgcattaagggtagctgaagatcccttctataaacaaatggctgctgattgtaccaagttccagataggaattaatgtttatgcattcagtgataagtacactgatattgcctcattaggtatgtgaacgttgaggttatcagttgatgttttttatttcagctgtttggagtcatgggtgatagttaagtttatcagcctgtaattacaattctttggtttcttgaagggactctggcaaaatacactggaggacaggtgtactattatccaggtttccaatcatctgttcatggagataagttaagacacgagcttgctagagaccttacaagggaaactgcgtgggaggcggttatgcgaataagatgtggaaaaggtttaatagtttatgataatatattcgtttttgctacctgctatgtcaatatttgctaatgcattggtgtgctacttgtgatcttatatatttttgcatgcaggaattcgtttctcgtcctaccatgggaacttcatgctaaggtctactgacctgcttgctcttcctgctgttgactgtgacaaagcgtatgcaatgcagctatctcttgaggagactttgctaacatcccagactgtgtatttccaagtggctttgctgtatccttgaatagttgatattttaaacatacttgagtttaaacatacaacacatcatttagcttttagtaatccttaacagaactaagatataccgcctcttgtggagagagacgtataagggtacacacatctgttgcaccagtggttacagatcttggggagatgtatagacaagcagacactggttccattgtgtctttatatgctagattaggtaagctatattcaaatttttttcatatgctacttttgatactatttaatgacaatttaaattctgcagcaattgagaaatctttgtccgcaaaattggatgatgcacggaatgcaatacagcaaaagattgttaaagccctcaaagaatatcgtaatcttcacgcggtgcagcatcgcttggggtccagattagtatacccagagtctctgaagttcttgccattgtacggattggcaattactaagtccactcctcttctaggtggacctgctgatacttctcttgatgagcgctgtgctgcaggcttcaccatgatggctctgcctgtcaaaaagctattgaagcttttgtatcccaatttattccgtgttgacgaatggctcttaaaggtttgtgtatttttatctcaatgtccattatcaaacatcagtgttcaagaaatagtaaataatttgtgaattcacatgcttgcagccatcagcagcccacgatgactttaaagacgtattaaggagattgccgctggctgcagagagtttggattctagaggcctttacatatatgatgatggttttcgattagttttgtggtttggccggatgctttcacctgacattgctaaaaatcttcttggggttgactttgcagcagacctctcaagggtatgtatttttatccacatatatccttacatatgaatatatgaacaggcggtacattcgatgatgtatatgcatcattagtgtttttcaagaatttgaaacatgataatatgtgtgaaacccttgtctttcttcgtgttgggtctcttaggttacctttcaagagcaagagaatgggatgtcaaagaagctaatgaggttggtaaagaaactgagggagagtgatccttcatatcaccccatgtgttttctagtgagacaaggagaacaaccccgagaaggcttccttctcctcagaaatctcattgaggaccagatgggcggttcgagtggttatgtcgattggattctacaacttcaccgccaagttcaacaaaactaagatagctcacaatggtaaggaaaaaaccatcataatacttccaataacatgcttaaagtaccacatcatgttcgacgcatcttatgaagcggttttactttcagacaactcgggtgctaggatgccacctctttgtaaccattgaagaactcttgagctcaaaaatcttctacttaagcaggatcatggcggccttcttccttgggccataatgtgttgttttggataaagaagtgctactttttgatttttcttcatttgtttttctatatagaccttttttctcaagattaggcttttatttgcctaaccagaatggttatctccgtaagattagtcgttttttaaatcttttgttgccttttttttttgtcctcattcgattttttgttgatgtgcgtctgttctagatttattttgggagttgcagttcatgaatctgtcctaattagggttattaacaagaagatgctactgttaaaattttaaaatatttttatgaataaataatgttgtgaaaaccttagatttggatgaaacgcatcgttggtatacatcggtaaagttcatacataaacaatacggtgattgatcgctgtaagaccaactgttcctgcaatcacaaatagataaattaggatttcaatttttaactgctgtaattctgattcaaagattctggtcggttgaaccgggacggggaaaatagacgtggcaatgtcttattggatggtactttctagaaggttacagaataaaagcggtcgtcggtataggggtcaaagtagcttaaacgacgtcgtagaggaatcttcgaatctcccaatagcttgcctttataacaaacctctctgaaccattgctatccaagaaatctttcagatttgcgcatatcgacaattttccgagcggccagtttacgtattttgtttgtacgtgatcaaatctccctcgctttctcgctatcaattttatcaattatgtgttcccgattgtttctagatttggattttctatttgcggatactagttcttttttgttcggaatcgattatggatttggtcttaagatttgcggaaattcttttgtaggtctgatatagtttgttcggaatcattcttgttgctcaggtcttagatcattgcgattgtaaattttgattttgattttttttttcttcaggtagttaacgtgtttcaaggactttgacaatggctgaggtatgattctctttttttcatttctggttcgtagttaattgcgttgcctcgttgttagtttgattgaaattggtgatatatgtgatatggcaggaagcgcataaggtaacattgaatgtctatgatttaagccaaggcttggcacgccagctctcacaatcactcctgggaaaggttattgaaggtgtatggtgagtcaaatctctgtcacatgttcgtatttgatctgttgtgttgtatatgccaaatttgttttgaacatttgtcctgtgtagtgccattcatagggtttgatattattgttttagctgttgaacatggttgcagttaacccaatgtaaaagatattggcatgactggttggtgtatgtaaatgtgtctaagcttctgcttttaatatcaaccgagtgtggttttccttgagaaatatgaattaacctgcttattgtttaggtgttttgctttttactcttttaggatattactttgatgttaaaccaggtagataacatgtgagttatgtatcctttttccaggcatacaggaatagttgtctatgggaatgagtacttttttggaggagggatacaacatttaccagttggaagaactccatatggaacaccaattcgaacgatagagttgggtctatcacatgtgcctaaagatgtattcgagatgtacttggaagaaatcagtcctcgttacactgctgaatcctacaatttacttactcacaactgcaacaacttcagcaacgaggtcgctcagtttttggtgggtaaagggattcctgactacattctccagcttcctaatgatgttctaaacagtcccatgggtggtcttataagtaagtcgctgataacttgcgacaccttccttgaacctcttctttctcggctacattattgttctaatttcatatccccattttgcagtgcctatgttgcaaggcctcgaaacaactctaaaggctggtgctgttcctcaagttccacagtttaggccacagccacaaccttttggagcttttagtaaagatgatggcccacaaattgtgatagctcctaagctcgaggcagcagaaacctcaactgcaactgagaaagtgccacctgttattcaaccatcagctagtaaagagaaggtcaaggacgacccgttgggtgatgctagggccaagattcaggaagagattacaagcgaatttgcagctctaatggcacaaggcacattacgagcaagtgaagcagctgctatggcgacaaaaagagtcatgcaaaagtacggacatctcaatgtaaacgcttagtgcaataacagagagatgaaacattttatttttactgtcttgaaactaagtccagaatcttgaacgatttcattacactattgccttcagctgtatttcgtgtattatgttcaacgatctacaaattaattatcataaaagaggaaaagagcagtaaacaagagaaaaaaaaaagattttacaagaattgtggcttttgaatttggaacaatttaggcttatactacagtcagtgaagaatctactcttatgctatctggcacaatcggaggaggatctgtgaacgaagtcccaggttctaactcaatagcagtctctttggatttgcaaaacatctctgagggaatattaatccctgcaaagccaaccataacagctgcagcaccaatgtagtcggtgaagcttggtttgttccctgataagctgtctacaatggctgccaatgggacctgaatagttagcccagctgtagctacagtggttgttgtcaatagtactgcctttgcccacagatagtcactaagcacattatctaacaaacctgcagttgtgatgaaacacacattagtctttcaaatcggcattcctacatcaatcctaatttactacttgtgccatcaattcccattgatatgagaaaatgtgatttattgaccaatagcttcaaggagacaatagcggaaataagggatggtgtttgcatacctttgccaacaactaggccaaattgtttcaaggtaagtgcgttgaagcgttctcgctttgtgaagttgagtattagagcaggaggaaggaaaatgaagaaattgaagagaccaagaaacccgaggaactgagccatactgacccggccgtttctttcatcatcatccggaagctttttgcgtataagagtgatgtagacagcatacagcgccgctgagaccagcgaaagaatatctcccaaaagagggttcttagctactgcatttgacttggactctgagtcacccatacttacaattatagtcccagacatacaaagaagaacgctgaagagtttcaaccatgtgaacttctcacccaagaatattagtgaaacaagaaaggtgaaaaggcttgatgcactgcttaatatggtatttgactgcaaacacacaaaaatgaaaaaaaaacttcagcaaaacatttagtagattcagaataagcaacaagatgatgggtgtccaatatgttcttaccgtaactgttgtgtacttgagagagacattaaatgtaagctgcgccaaaaaccaaaacggacaaatcacaaggctaactttagcaactcgcatccttgtccaacgacccttctcatctaatcctttattagaaactccactagctccatcactaacattgacactagcatcaatctcaagctctatattttccaatccagattcaatcccattaccaccctcactaatctcttgctctctcacaacaagccctgaactctcagtagcatctgatttcacaccagaaacatcttttccaagcaaaacagccttctctgattcgaccagttccattaaatgcgaccttttgcttctccagaacaataaactcccatatgcatcttccagatatcgaccaatctcaaaaaggggaagataaacaacgaacaatgaattacaaatgaaagtgatcaagaacggagaaacaccagcttccaccacagactggactacaaaactagccgcaatccaaatcgtggcaacggcaaataggtatatcagccctaacacccatctccataactttgttgacatacctcttcgaatctcaattacaaaacacagaacttgagctcaccgatctcactgattaagatcaatcatacattttaacacgaatgcttcaacacccatgaatcaaagatctctcttgcaacgtaaaatttctcaaggataacaaaaagcgtaaacgagaaacgatcggaacaaaccaattgatcggaaaaacaggacactaccttcacagcgacagaaatctagatcggcgtcaaattgttcaaccaatggcgattcaaaagcgaaatcagatatttatttaccaaagaaaaaacaaaaaggtatcgaattcagataaacagcgccaatgagagagcgagagagaagagagattggcggatgtgagtatgaatatgggctttattatcggcccaatatcgttaaaaacatttgtagcccaattttgtttaatacacaagacgaaagaaaccctataacctgaatgtcgtattaaaggactttcttgttcttctatttagacttcttgtagttttgctgagtattagtcaagactcaagagacacgaactctctctagtctcttcaatattgatcatgcagcctcgtcaaaacatagatccggcaaatgattggaacagtcttcgacaggctctagacatacaaggaacccagttcgacgaaacttgattaatttattaccaacagtcaacagagctaaagataaagatactagagtcaattcctggagtagatattgctcggtgttcttgcgttgtactggcttcagagtttcggaatctggcttcatgtactatattgtggaagcaaatgtgcttggaagattttgctaattctgtgattgaacaaactgaatatatatatatattatttttttgttggttggaagcctacgtttgttgaatgaattcatgaagatatgtatagatttatgtgttggtaagctatggtattgctatttagcccctctctgtacaaccagagataaaattatgaattattttgactaaacacaaaattaattaattgtacaaaacaactatcaatttataatgttaagctcgagaccaagaataagaacagattgaattctcgagctatgaaaactcagctggaatatacacattcaaacaaaacagaacataattaacaaagagagaaacggtaacaaattctatatcactatctttctgaaactgaaattgaaagccaaaaaacgtaaaaagtaaacaacgaccaaaccaaaaataaaaatcaacaagacaaaaaaagatgtaaaaaataaaaatcaagaagcacttgggttccgggaatgtgctcttgaagcaactccccactccattgcctcagccacggctctttcccgttcttccgctgccactgaatcctccacggacgtttcatccgacggctgaggaggatcatcgtagtgtggaacagagattgagccgtcaggagcggttcctaagaaaccgagagcggttacaacgtcactcatgagtggccgtaccgttgcctcttcttgtaaacacattgctgccactgccaccgcttgattcagagctttctccgggaacactccctccagactcggatccgctaactctgggaatctactcggttctttgaacaccggttgagcctaaaccaaagtacaaaagtttagatcttttaaacaattgaagccaaaaggttttcatgtaagctgaaaaagagaaactcacccaagttactagattctgttcatctttgggtctggtagtatcaataactcttcgtccagttatcaactccaacaacacaactccgaagctataaacatcggattttgtagttaactgaccggttctctgatactctggagcacaatatccgtaagttcccataactctggaagacacatgttgtttgtccccgacagggcctagctttgccagaccgaaatcggataacttggcattgaattcaccgtctagaaggatattagctgccttgagatctctgtagatcactggaggatttgccttgtcatgcaagtattcaagacccattgcggctcctagagcgattctaatccttgtgtcccaatccaacggtatttggtccggtgttagatctgttagcatttcaaaaaacagttaaacattaggactgattcaaagttagtcaatacggatccttagttttgtaatttaccgaggagatgatcttcgagtgaaccgcgagacatgtactcatagacgagaagtctctgatctccatcagcacaatacccaatgagattcacgagatgcttgtgatgcaaaagacttaacatcaagacctctactatgaactctttgttcccttgcaatccatttctatctaattgcttcactgccacaatctgaacccaaaataaccattcgaaaaatcttcagagatttgttgtagagagatatagaatgctataaatcatataccatattcatgtttcaaagtgatgtacaaaagtatatactaaccatgccggttttctcgagtttgcctttgtaaacccttccaaagccgccttcaccgatcagacattcttgtctgaaattcttagttgcagtagctagctccctgaagctgaatgtttgagcagcaatgttgtttgtcacttctttgtcttcatcattgttcttgttctgctcatttacagtctttggattctctgtaaacatcacaaagattactgaatctagtcttataaaccctaatatatataagacttatctgtaaaaattaatatagatgttttgagcttaccagggtgtgttttgttgttgtctctaccggtcacctccccatttctccggtagctgttgtctgaatctcttggaacctttttcttttcatggaaataaaaacatgaaaagcaattcatttctccggtagctgttgtctgaatctctccttttttttttccccttcttcttgtgattatatagacataaacttatttcaaaccacggcgaattggattcaaagtccgaagaaacttgtacaaaacagagtctgaggaccacaaattaagaccaaaaaatgggtcttgttcgaatcgttttgttcaattaattaatgcctgcgttgacaagaacaaaagaaacacattttcagataaatatcaggaaaacatatgtggattggtaaaaaaaatgcagaacgaagaacaaaccttagaatccttcataaacaatggttgcccctttcacaagaaacccatagggtttccctttatctcatcacgttgatatgttttattttcgtcaaagatgtaacaaaacccagatcaagaaaaatctacaccaaaaccgttgggatccgaagcgcggaagagtctcctaaaaaaatggaaggagataactggattttttttctttcaggttttaggtttctgaatttcttctcttaatatagacaattaaactactctttaagttaataattaaatatgcaaaatggagtacatatctcatagttctcatgtttgtgtgcctcacatttctctaaccttcccccacatatatgtattatagatttaaaacagattataaaagtgattaatattgtaaagtttgaagaaatgggaaataatgagaagaaagagaaaactggaaacagaaaaagagagaataacatggagaccatgaagtgtataagataaatgcaactaaagggtttgatgtaatgttgatggctgcacgaactaaatatttttaaaatcaaatgcgaataattgtaagattattgttattcccaaaatctatttaaaaaatgcgaacaaatcagaagaaaaggcaggcatttctatttctctgtctccttgtgtttacaaaaagaagtcaacaatatatcttcttcatgaggctcttgcaaataagatttgagataaacatatggatgtacacttttcttatccatgtatgtatctatcaacacacatgtatgtaataagttggaatagtaacaaataagttcttcaagcaaatcagtcattattaggaccataacaataacatgctatatatgttcaaaatttcgttgttcctcatatttcaaaaatcagtttggatttcagtttgaaactgtttggtttttaaaagaaaaattaaagagcttgacagctgttttttctagtgatcgtgtcttcatttttccaaatattcttattttcactcttttttgttatttactaatggcacccaaaaatttgctaatttcattgatattttctaatttttaaccaaaaatagaagaaacactcaaatatagaaatccaaatgaaacttggaccatcgttaatataatgtcataaactacttatacaagtcttattgagctcatttttaccacctcaaaaagaattagagtagccatttggtacctttgagaaagaatggactgcaaaagcatcgttattcgttgtcagagagagacatcaacctcaacagaggagtcagtcaagattacgtctcttgagttatcggcttttggatgatccttcgagtctaaccttatccgcacatgcatcggctttatgaagacaatgtctctcaattctctctttgacttggacaacaaattcacaaacaaatcttccttcatagttgtaatgttccgtactggctttaaaatctttgctatttttctcgccagttcttcctgggtcgcactttctgtctcttcgtttctcgctagtcttaaatacaaagctgcataaacaataagctgcacaaaccggagtcgacaaagttatacttttttctaatagtaaagtttggcttctgtacataaaagagacttgagaggagatttaggcgtacctcacttgagccaggacttgttttgacaggacaatcaatgtggatacgtccatcttcttctctgtcaacctcagaggggttaacatcttcttcttcctcttcctcagctgcttcagggttggctatttctttggcgaggctgtctaattcatcataccattgttgtgaaactccaatctgcaagttatgaaaacaaaatttctgagctacctggatttaaaccatacaattcgggaatgcaattctcttaaataaccttttctgaaggttcaactgcacttccagcactcgagaattcactgattgcgcctcttgtctgtcgccatatgcagctttcttgtatcggttcaacaagctccgtgcatggaggaatctctatgttcaaccgtatgctaattttacctgttaaatgaaaaagtagcaattaaatcaaaccaattccggctggaaccaatgttaaaccatcttcatgatgcagctaattgggactggggtgatgaactgctaacatcaagactagcataagcaaatgagtaaatgagcaaaaaattagggtctgtatagcaaatcgcacctggcaataaccggagttcctgagtatgactgagatgtgcttcctgaactccattagctctgttataatttagccaaagtaacacaacatcaattagaaagtttcagaacaagagaagtgttgttaatggataagataatgaatgagaaatcactaacagattaaaaactctctccagtggaatgaacaaccaatagggcaacccaaggatcccactgtttgagaattgaatgctagagcatgctccagaatctctatttagcttcaacaccctctgacaagctt

SEQ ID NO: 1279 - DNA, 121054 bp, Arabidopsis thaliana
gaattctttgcaccagcaacatctgatcagaagtaaacattcaccacacagttcatcaattacagaaaaattaaaaagcaacatgttacagactgccgctagggaactttctctttcacattctttcgctaaacatactaaaagccaatcatgaacacaactagtatgtcctaggaggaaaatcaggaaagaatcaatactgagtaaatataacaaaaagtattgtgaccgcaagtaaccaccttccagagacaactaatgtggcatattaagagatgcgagttcatatgattgtaaaacattgagttcatcagattgttatttaccatttgatgcatgacgagaagagaaattcatccgaccacccctgctaccacggccccctccaccagatctccattgtgattcagcagaatccttgttgttgatgttctgtaccatttcaataacattgtcaatacccatgtcccaaatatatgcggtttaatagacatcctttacacagaaacccatgaagagaccaaaagaactgcaaaaaccccatacctctttcctcttatcacgcttttttttaacctcatggaatggatctgcagagtcataaacaattttttgcattagcacataagattgtatagaaaaacacaacaaaaaaaaacttaaaacatatcctagcaaccatctctaaattacatggtacacaagcaggttacatgaagcactcgaaaagcctgatgcaataccacatctccaaagaatcctattttcataacaatttgttttggtaagatgatgaaaatgtggatttctaagcactagattcatctacaacgcagcagtctttgtttagaactcatacctagcaaaagtattattcctagacaaaccactcagaaaaattctagttagaagctaattctctttgtttcacacatcactagtgtaagtaattgattcccgtatattccaaatcaattcgtgaacctttttttgtgaaaaggaggttacaacacaatatcacataaacaactagagacagcttaaaacttaataggcgaagaaaccgatgatagtgaattcagataaaatctgaaaaaaaaaaatcaaagagcagagaaatcagatgctaaaacctaagttacaggagaaaaccccaaatcgaaaaatacaatctcgatccaatcaaagaagagaaattaggtaaagaaaaaagtgcagagaaggtcgagattataccctgaagaagtaagcgttgagcggtctcatcaggatccatgttacattcatgaagcattgcgataatctcatcctcgctatagttcccagcagtggtctccttaatgttctgaatcatcttccgagtagtagccgaaatcgaaaccctagcgccactgccgaccatcctctcttctatcaaacgtaaaatctcgcttctgatattttaacaggaatcgaaatctggacctagaccaaaagaggtctgagtacctatatatgtatacgaagaggcgagtgataaatcagtacgagaggatgggatttgaaactagtttgggtcgacgaaggagaagaagaaagaagaaggaacaagaaaaaaaaaaaaaaaagaggaagggggcgagagaaaggaatgagcaaaataatacgcactgtgattttggaagcgtagggctctcttttcttttttcaattttgttttgcattcctttgtagctttttaatattgagtttttttgtttgttttaatctgaatctttggtaaataatgataaccaaattgttgtcacaatctttttttgtccacaaatatatttaaattaggatttaggatatcttctgaatatttacactacataataatgacaaacataaaacatagtatttaagaaaataagaagaagataagttttgattgtaacttgatcatattaaatctcaactatctcaaacgatgttacccatatcattatgagatgagcgatttaatgattagcatattattatttatatttttacatctcagtaacgtattattgttttctatgtaaatatttaaattatcaaataattataatacgttattattatccccaccatgataattacatatatatttaatttactgaataagtttattttttttgtctttggtaatttcttttacaataccaaattaaaatattttaaaaattggatttcaaaaacataatgagttatatggttgtccaaatatttaccaggtccagtacgcttttagcattattaatagcaattagcaactctagggattgtcatttacataaacaaatcttcaattttttcattaattttcctgtgttttgggtccctattgcttctaaattctaataaaccgtccagatattgctgttatggaaacaatttttcaataaatctcatcaactgattctatcaaaatctaatcactaggctttttcccattagcattagcgcataacaaagttttgaatattaatatcattatccataggcagcttagattttttttccttagcatcaaattaaactcaaaaccgaaccaaaccgtaaatccacaaactaattttggttcgaatttaaaaacattatcttttaattttgtcatgccccctctgctaagtgcaaccattcgtcttctcgcttcatcgttttctcttttccgatggcaaaagcttgcctcttgcagtctactctactcccagcttactctccacttcacaaacttcgtaatcaaaacatcaccctctctttctcaccgcttccgctgtcccgatgccgtcccggaatccactgctcagtttcggccggtgagactacaatacaatccatggaggaagctccgaagatatcatggggatgcgagattgattcacttgagaacgctacttctcttcagaactggctctctgattcaggtctccctccgcagaaaatggctattgatagagtcgacatcggtgagcgaggcctcgtcgcttcacagaatctcagaaaaggagagaaattgctcttcgttcctccttctctcgtcatcagtgctgattccgtaagttcacactcctaatttcactcggaatcaaagaatctaatcttatattccttgatctcacttgcaagcaatccctcacctcttgttcagatcaatgcaaggttaaagtatctggctttcatgaatgtgaatatctaatatcggagattgggttttaggaatggaccaacgcagaagctggtgaagtgatgaaacgttatgatgttccagattggcctttgctcgccacttatcttataagtgaagcaagtcttcagaaaagctcaagatggtttaactatatctcagctcttccccgacaaccttactcgcttttatactggtaagttttgtacttgtttctgtagctgaactttggtctcagtttcttactccctacagcctttttgtactatttcaggactcggacagagcttgatatgtacttggaagcttctcagattcgagaacgggcaattgaaagaatcaccaatgttgttggaacgtgagatattgttctttctttctttctttctctcaactgctggaaatcattgatgcagtcactagtacttattgtttgtaggctagggggttgatgattatgtcttgcaagacactgctcatgtctttttcctttttcttttcctcagttatgaagatctaagaagcaggatattttccaaacaccctcaacttttccctaaagaggtaactggtatacgcccattttgctacagcttactatttggacatgtaataagatgcacttctgtaattacaactagtgttggttctattttattatctgagcttaaatttgttttgtccacatgtatatgagtgtgctatttcttggttgcaggttttcaatgatgagacatttaagtggtcttttggaatcctattctcacggttggtaagaactactgtatcataagcaatcattatcttgataattgatgtaaatctagatgtcttgaatttgaaacaacagacttgttctttaatcttagcatgactttctgcataatatagctgtctccaacaatttattgtttgaacaatgaccactcacaaccaaaatattgcattatttcgtttctctttccttccgtgtgctgcgtgcttgtctctgcaattcagacttaagcttctctaacacaggtgcggttgccttctatggatggaagatttgccttagttccatgggcagatatgcttaatcataattgtgaggtacttctacttatctttatgaccaattagctcctagattctcctaatcagaaagcatgattgacttatggtaatcaatatttcaaaatctgcttggaaaggttgagacgttcctggattatgataaatcttcaaaaggagttgtctttacaacagatcgaccatatcaaccaggtgagcaggtaaataagataaattcattcagataacctgagcgagcattgaagtttaatataagtcagtgtataacacaaagaagtcccgtttacacagtttgccttttagcgcttcagtaagtcagtccaaagtggaaccaatgttgtctgaagtctctgatatgtttcagtaacatgacattgtgcaggttttcatatcctatgggaataaatctaacggagagctattgttatcttatgggtttgttcccagagaaggaaccaatcctagtgattcagtagaactagcattatcacttaggaaaaacgataagtgttacgaggaaaagctggatgctttaaagaaacacggattatcgacgtattccattctccaccatccatgttcccctctcaaatttgtagatctctcttgattaacttgagttttgttttgattgtttgtgttaacttttctctggcagacctcaatgctttcccgtaaggataacgggttggccaatggagctaatggcatatgcttatcttgtggtgagccctccagatatgagaaacaactttgaagaggtttggcaactccatcttgaccctttttaccatccaattcttcccaaattcataatacatctcttatcaattattatccatttcagatggcgaaagctgcttcaaataagacatcaacaaagaatgatctaaaatatcctgaaatcgaggaagacgcattgcagttcatactggactcatgcgaaacaagcatatcaaagtacagccgatttctaaaggtaagtaacaaaacagctcatctctctctctttgtgggaaaattttcactccatctgcttatagtttgctttgtcaattatctaattgtaggaaagtggatcaatggatttggacataacatctccaaaacagttgaaccgaaaagcgtttctgaaacagctagctgtagacttgtccactagtgagcgcaggatactgtaccgtgctcaatacgtaaggaacaactttctagccaatacgatagataagagtctgtggatcgatccatgatattgtggaatctgtgtttttttttttgttttgtttgggtcagattctgaggaggagactgagagatatcagaagtggtgagctgaaggctctacggctcttcagtggacttaggaacttcttcaagtgaatgttgaatgaggacatttcaacagctttaagatggatcaaaggtaggcctcgttgtgcttcaaccaaaaatgtagttttttattacaaaaaaattgaacgttggtgtaggcatggttggatctgtctcactcgtataggaatatattggtccagccatatatgtaatttgatcattttctataaactcaaaacctgaacctaaattgattaattaaggaaacgcatgagagagtaagggtagaaacatgttcttcgtatttgatccgaatcgaactgaaataatcgatccaacaaacaaagataatttgaaaattaagaatatatctgactacaactcataacgaaaaccgtaccaaaactcacactccttgttaccgcaaacaagataatctgatggtacacgtcagaacatttgtttctttagcaaagcaagtaaacattccactgtggcaaagtaaaaaacgagaaacctataaagtcttcctaatgaaacgtactgattttatggagtttccattttcgacataatatgacgtggcaatatctaaatggtttaaagatgttttatctccaatgatataacgccacgtaagcccgctgaccaaataacccaaagagtaagcaagcgacgtcgtttatagtttgatgatcttgtcgggtaacgaaactgccccttgagtcaaaacaggcttcttcgtgtccgattctgaacgagctcgctctttctcatccaattctctccaccgtcttctactccgatcaatcttcaaattttcttaacactcatcgaccagatcgagtttccatcgatctaatcaatcaatcatcagatttgatcttctcaagaaggtaaatccctctcactctctgtgtcaaacctaatcacctcgtaggaatcgaaattggaacaattcaatttggtttggtttggaatctctagtcgattcttcttctaaacgattgaattgcgttttgtgctttgatataattcgaaattattgtggcagatgagcttgaagggtacgatcgtattactagggctcttatggagcttccaggctacgttagggattagattcgtgatagaccgtgaagaatgtttctcccacaaggctgaatatgaaggtgatacgcttcatgtctctttcgtcgtcatcaagtctgactctcaatggcattttaacgaggatggtgtagatcttgtggtatgactttttttcttctaattgaacttttctacattctacattgcaaaatcgtcgaaaatcaatagaattggtattcctaaacaatgcttaggatttccattgttaatgttggtagataatttgaagtatgtattgataaagaatttggttactctttaaagctgttatattgtaccatctggttaatttggtggttgttgttgttgttgatatattttggatgcattttgaatagatacatggcccaacaggcgaacaaattcatgacttcagggagcagataagcgcaaagcatgattttgttgtccaaaaaaaaggggtttacagattctgtttcacaaacaagtctccttatcatgaaaccattgacttcgatgtacagcttggtcactttgcatactacgatcaacacgcaaaggacggtaaggattatctgtttagttttgtttcagtttcgtttggtgatgaggtatttagctgaagatggtttttgtgcagagcatttcactcccttgatggagcaaatatcaaagttagaggaggctctttacaacatccaatttgaacaacattggttagaagctcagaccgatcgtcaagctatcggtaacattttttcctctaaaaaccacatttgttgttctcacttcaatattgagtgatggtttgaatatggttgttccttgtgcagtgaacgagaacatgagcaaaagagcagtacacaaagctttgttcgagtcgtttgcactgattggggcaagttttctccaagtttatcttctgcgtcgcttgtttgaacgcaaactcggcatgtctcgtgtctaaaagtatcgagtttattatgactttgaacttattttgccttaaaatgtaccagggaatctttacttaaaacctttttacagacagatcgtagttcattggaagatttgctttctcccatgttcaagaactaatcctctcgtgatgataattcttttttttctctttattaacagacaacttttccacaagctaggttttcatttcaatagagaaaatagtgattccttaaaaccttttttccctaaaacaaagagaataacaatgtgatcaagctttgaataagacgtgtcaaaagtactcaaaatcccttaactggattcgaactcttatagagaaggttataaaagtggacactagactaagttagttgggcccagagtagatagataaagccagctatcattttcttagtcgtcgtacaagttacctgaaaataaaataaaaacacaaactttcctgaaaaagtcgtctccagttttaagcattgataaatccgacaagaagtccgattttgttccatagcttgcttgtgtttttagtggattgagtcactgaaagagaaatcataaggctttgttgatgatggatcatttggtggagacgaattcagttccgagcagattggtggaagaaaggcttgatgagattcgtagagtaatgggtaaagctgatgacgacccgttaaggatcgttggtgtaggagctggtgcttggggaagcgttttcattgcaatgttgcaggaaaattacggtaagtttaggggcaaagttagtgtgagaatctggagaagaggaggcagagcaatcgataaagccacagctgaacatttgttcgaagtgattaattcgagggaagaattgttgaggaggttgataagaaggtgtgcttatctcaagtatgtggaagctagattaggggatagggttttatatgctgatgagatattgaaagatgggttttgcttgaatatgattgagactcctttgtgtcctttgaaagttgtgactaatcttcaagaagctgtttgggatgctgatattgtcatcaatggtttaccatcaactgagacgtttcaggtgttcaatgagattagtaagtattggaaagagagggttaatgctcctgttattatctctttggctaaaggtgtggaagcagagtttgagcctcatcctcggattgttactcctacgcaaatgatccatcgagcgagtaaattcacttcccattgtcttttatctgattgctagatgaatatttgatatcatcttccttagtatttttgttgatgtagagaaactttctatttttattaaggttatatgagtattgactgtgttggcgttgaagtgtatgatcagtagttgttgtcattggaaattctacagtttgcttgtcatattctctttgcagctggtattcctcttgagaacattctctaccttgggggacctaatattgcttccgaggtatacaataaagagtacgccaatgcacggatttgcgggtctgaaaaatggaggaagcctttgggaaagtttctaaggcagtctcatttcatagtctgggataatagtgacctcattactcatgaagtaatgggtggcttgaagaatgtttatgccattggtgcaggtaagatcaggtgtcttaaatggttatctgaataatagtgattcaaagtaaattactggaactggtgatcagaggtcaaagtttatgagctagtgtttgttttggcgtttttgtattccacaggaatggtggctacactgactaaggaaagtgctaccagcaaatcagtgtactttgcgcattgtacttcagagatgatttttattactcatttattggccaaggagccagagaaactcgctgggcctttgcttgcggatacctatgtaacattactgaaaggtcgtaatgcgtggtacggccagaaacttgcaaaaggagaacttagccttgaaatgggtgacagcatcaaaggcaagggaatgattcaggtactccatatatctcaatgacttcggttttaagtgttaaattagccttaaattatgtatgtttgatattgagaatttgtcgaatttgtaactttcatctgagtcgaaatagcaagtgtccataccagcaaaattactaagaactttgttctgtataatgtaaatttatgttcacaaaatccagtttatagcataaaacagtaaagagtattgcacatttcaaagaaactaaagaattttggagattgaatctaaacgccactgagaaaatacaaaattctgtcatacactgttgttatcttgtggtcctagattatttatatgaaaggctaatgatgaagtgctttggatgatgtaatgttcatagggggtttctgcggtgaaagcatttttcgagttgttgaaccaatcctcgttaagtcttcaacaccctgaagagggcaagcctgtaactccggctgaactttgtcccatcttaaagatgctctacagaattcttataacaaggtactctcatctctttactgggtaaataacatatcaacttggacctcattcataaacatgattcacaccttgatgatgtttttagagagttctcgtgtgaggcgattcttgaggcgctgagagatgaaacgatgaatgacccacgtgaactcatcgagattgctcacagccatctcttcttccagccatggcttcttggtcagaaaccttgagcactttcttctgtataagttcccctgctaggctttggtgcagacttgtttgtattttgaagatttatcagaaatacgcagagtagataagagttgtatacaatttatagttggagaataaaagttgtgtactttatagtgaaactcagtctcatattatatctttgactttcctttccttagaaacagtttttatacaatttataaatattgtgtatgggagctaaagatacatgctatacctatacatcacaaattctatatctgatatttggagctttaaaagaataaactatccaccagaccaccagtcatcatcatatcatcttctcaaatttatcaagcttatttaccctttgcatagacctcagtaccaataacatgaatatccctgcacacaaaagaatatttatgaagcttatgtatccttgtcatagacctgaaatatacctgcatatacatctacatgcacgtgtgtacaacagctttgatacctgctccaatgaaggatccattggcaacaagctgacttccttggttgctaaatgtaaccccaatattaagtagagttcctccaagaactgtatacatcgtcgccatctgcagtattgtcgctttccgggctgctctttccgactgaaccaatacgaacaaacaaaatccacaatgggtatctattgctttacaaaaccatgacaaagcttatttactttaataccagttctgtcagggtgattagaccatgaaaaaactgctttacctcaagaacccgaacacggagtttcagatcgcctgaatcgagttctttcacaaactcttctattcgctgcactcgatatggcatagacagagtagaagacctggcctgtacaggttttaaagttgaatttagtacaaatagaaagaaaagaagaaaaaacagagaaatgaaataaaatacgagggaaaacattacatcatcagcctgctttcttatttcttggacaagctgagttcccgagcgttgcctttgttttagatccaggagttcctgtttttgttgatattcatgagaattgacacaatgataaaaaaagagtagactggcgattgcaaaatatttgggtttcgagaagagaaaagaggtaagaacctgcgcataaggagccgcaaccttcacaaaggaaaattctggatcaaggatgtaaccaatacctgcaaaatcaaaagcataactgatgagacttgtggaatattattacaaaaagaagataaaagaacagattgaataggcaccctcaagtgtggaaaatgctcggatgacaaaggtgaaagttgatgggaaacggaatggctgatcctgggaaattgcaaacagatcctgccatagaaaggaggaattttttaatgtaagaaccacatagagatagagctcagcttctttttcaggtacagttttgatcggtacctctccaatagctgccaaagtctgttgctgatctggtgattggcttaataggttgtccaagaaaaactgaacagatctccttacctaaaacaaacacgtataaagttgcaatgagattacatatgtaaacttcgcataaataaagagtgagactgtaaggttaccgatgaaagatctccagtgggttgaagtgcttcaaggtctataaggttttgcatgacctgtaaaaacattgagttagttttcttattttcagattgagaattaacccttgcaagaaaaaattaccttttttgcatctttttcataaacagaatagaagagatcaagtaatctcttccgagtaaatgttttgatctctcccatcatgccgaagtcatagtagatgattgattcatctacatcaattgcaaggtttcctgggtgcggatccgcatgaaagaagccggttttgagtatctaaaacagccaaaacatgaacataagtttgaaccataagaaaaaaaagaagacatggacttcaagaactgttttgctatcttgttattgacctgtataagataagcttcaatggcccgtgatgcgattctagaacggttaaaaccccgtgcagctaaggcgtccaagttgttgatcttaacacctaatcacagaaatcaatgagtgtttataccgctacatactttatcaaacgacaccaatatattgggtagtttcaacacgaacctggtacatactccaaagtcaagaccttcatggcagagtaatcccaataaaccaactacaatgaaaacgagataaccagaatgagtttcatctatcccacaactatacaagaacttatctcatgggggttttggtttagcaagttaaacttacaggtacgcggacccagtttatattccggaagtctctccggaatctgtcagcgttcttagcttcgtttatgtagtcaatctcttgatacaaaattctgaaaccaaaggaaatatcagtcctacatagcctggagccacaagttataactacgtcttgggaaaactacttacaaggcacattcttcatagataccaacccaatcgtttgtaccaaatgattcacttttctggaaatactcggcaatcagcttcagatttcctgataaaataaattacgccattttcagcaattctcaaacatccatgcaggtattctattatataactcagaagttgttactacatacgtagatcaatatcgaaaagtttctttagtccgggtctttgtacttttactaccactttctcgccattgtgcaaaacagctctgtgtacctaagggaatacaatttgaaaaattatgatacaaacatcaatatctagatgaattgcaaagaaaacgataagcgagtaggcgttcttgagggtgttgctaagtattagatacctgaccaaggctagctgcagctatgggttgctcttcaaattctttatacattacactaataggagccccaagttcagcctcaatgaagcgctttgctttctctggagaaaaagcggggactctgtcctgaaaaccagtttaagagaacagtaagaaaccaaatgcataatttcaaaagtatgaataaagaaatagcaaagtacctgcaacttggaaagctcatccacgaattcgcgcggaaacaagtctgacctagttgaagacaactgtcccagtttgataaacgttggaccaagctgcaatacactctctctcaaccatgaagctgtttctcttcttctgcttttctgattatataacaacaggtgaaattaataagaatcaggaccaacaaaacatcaaccaatgaatcatttaaattagactaaaatgatgaaaggtttacctgtttttcttctgtgaatcctccaacataagcccatttcgaattatcgaacaagatacgaatcctcagggaaataacaaatgaccaaacatcaatactgcgttgaagtgagctataattctcatcagcccagctaaaaccttcatcagaaggaagaaccctaactccttcaaccggtggaggaaggtacgattctgttgttttctttggtgccttaaccaaagttgacgccgcaccattaatgtttctactactaaccaaactcgctccattaacacctttcccagccgatccattcacaccatctttcctcttcaccacctcactcgcaggaaccattttgactgaacgtccattgattccaaccttagagggcaattccgactgtctcatctcaatacgaaatctcttagacttgctgccataacactgagtggcttccccagtgaaatgattctccaaagagctactgaaaccaatagctttggtgactcttgcggtctcaccgccatagcagcagctctgagaagctaataaagccgccatttccacctaatttacaagaaaccaattgaatagacacaatcaaacaacaaaattcaataagctggattcataaaactggaatgcattggagaaaattatgcggcaagcatcatttgtataatctaaagttctaaactataaaagtatgaccaacacaaaatttctagtgatagaactccattaaatcatacttgagcctattcaaaaccatcgagttcaacgacacctctaaattattgatttgataagagaatcacaacgattctcagccatgaaaaagatataaataatcagcgaacattaacacgtactatagcaagaggaacccaattttactacaacccaaacctgttctgaacctgggatacccaaaagtaattaagaaaaacaaaacaaaaaacagagtagaaattaagaaaaatggaacctttatcaaagtcctgaattgggttgactggtgagacaaagatcaacccagacccagaaatttcgtagcaggaatctgtagaatcagctgtattaagtagaggaatttcttggaacagagtcgagagagagagaggtaagaggactaagttgcgtaatggtgtcgtccttatgactaatgagacgtgtgttgttccaccgaattttccaccttcctaccaaaatcaatattgagactttgtgcgtaaataggaaaaaaattggatttgataggacagggaaaataatctttgtaacttttagtgccaaaattaagacaataagagttttggaagatgcgtgtccagcttctacatctcacgtttattgtgtggacagttcgaaagagagtgttgagcatcttttctaacaataaaattaaaaggatataattgctcgttagtaatccacttaaaggggtttaaccaatttaaacggtaaacttttttaagagcaagcaaaacaacaatggttcatttcaaaaaggaaaatgacaaaactacatattaacatatgaacaaaacttgtgacgcttcaccacatagtttggcttctacatgatcggatcataggcagctccaaaaccgaagttccacccacccagactactattggaagtcattactctatcacaaaaccattcgtctagtttcttcttcccaagtatgaaatgttgcatttgcgagttcggctgaaaacgaatatttcttgctcttcagtagcgcctcctgagcaagtaatgacttccattcaccgctcaactctttcctttccttggctctaaggctcctcaacttctgtaacatctgcttctgtgcatagttgcttaaatgctgaaacagtgtcgtctcaagcgcatcctgtaaagcgcacagctcatcagcagcaccatcttcctccttctccttctcattagcctcattctccatatgtttgtcaacattttcagaaggtaatttgtcatcataagagtcgcctttttttgcaaatccatcaccatttccaggttcactgtttgtcactgcttcaactacctccctatccttcccaccagtctcattctccatagttttgtcaacattttcagaaggcaatttgtcattgctcccatcaacacatcaagatttatctttgccccatatcgccatggacaagtcaaaagcttcagaatcttgggggttactaaagctaggcagcaggatgaatcattatgttggaccgttagtcttcttttttttgctttcataaacttgtaaaaaataaataacctcttgtcaacaaatttcatttacatactccaagcccgtgggccaaaaggatcgtacggagccattttttgttggtccaagactccaagcgaagaagactatggacttcttgtattattagccaaaattaaaatttgaagttaggtaacaaatttatggatttaggaaaatacgtttataattgtattttcttatttagacattgcaaatcccatgccgttttcttttgttgttttgtcaatttcatgccgtatgattaaagtttacaatgcattttgtataagacaaatgctttttgataaaagaatattaaggtacaaaaaaagaaaaggaaggtaaaaagattcctttttccctctctttgggccttaaatagagacagagaccgaaagaaagaggagaaacctcacacaaaattggtcctaaacgagtctccttcagtcgtaatttgcagcagagcaacgatggcagcgactccaatggaaggcaaatgggttcaggtcagctttctcgcctttgtgtttctcttagagacgaatctcgtttcatcggatattacttgtctcatgttttcggatttttattgaatcgtacgagactttcggcttttgaaattctaatttcgttttggaatctgtttattattctctgtaaatctgtccaagttctctgttagattgctgatgtgattatacacttaggttcaataatcattttggttctacaacgaatctcctagtttatgctttctctgatcaattttggatttgtggatgatgagtttgtcatttattgaatggactatggattattcaccggcagagttgttcatatcatgttgattaacagtttactgatggaggagggtttaattttgtaatcatcatcacatataagtatttgaattatttatcttgtgtagacactattggattagtagactatgactttgtcattattcaattgactagtatttgtgaatgctgactcaactctttgtttctttctcattgatttctgctaatactttttgtaatgttgattataaaaacattgtaagatttagtatttgagtaatttatgttttgtgttatttgtcattcagcttaaacagaaaggaaccggaccaggagcaagaagctctcatgctatagctcttgtgggaaacaaaatgtatgcctttggtggcgagtttcaaccacgtgttcctgttgacaaccagctctacgttttcgacctcgaaactcagacatggtctatccaggaagcttctggggatgctcctcctcctagagtaggtgtagccatggctgcagtcggacccatcatctatttctttggtggccgggactcgactcaccaggagctcaacgagttatactgttttaacactttgaccaaccagtggaaactactctcttcaggggaaaccggtccacagaaccgaagctaccactctattactgcggattctcagaacgtgtatgtgtttggtggatgcggagttgatgggcgtctcaacgatctatgggcttacaatgtcgttgatcagaaatggattaagttcccatctccgggagaagcttgtagaggaagaggcggtccaggactcgaggtggttcaaggaaagatctgggtggtatatggattcgcaggagaagaagcagacgatgtccactgtttcgacatagctaaaggggaatggaaagaagttgagacaaaaggcgaaaaaccgtcagcaagaagtgtgttttcgactgcggttgttgggaaacagatactgatatctggaggagagattgacccgagcgatctggggcatatgggagcaggatgtttcacaggtgacgcttatgggcttgatacagagacgctggaatggaggaaatgggaggatggggttggatcggtggagcatcccggtcctagaggatggtgcgcgtttgcagctggatcacgagatggtaagcaaggtctgttggtttatggcgggaactcgccgagcaatgataggcttgatgatatcttcttcttcactcccaacactctactcaagtgattggtaactaagtatggtttggttttcttgccggtgagaggggctgtgtgaatgttcctttttttttagtttccttttggattggatgaactatgaagatgtgtgatgtgtttcattttcctctgttatttgtaattaaataatcgaaatttttcattaaagaagataacgaataacatcagcttaatggttattttagcaactaaaccataatagagatacacaactaaggatgagagcatcaatggaagctttgaattctatttattacccactcactctctgtctcattgagtcagtagttgataggtatttaattgcaagaatctctctatattggcaaaaacaaggtcaaataaaagtttgttttgcgaataccaaatccatcaaaagatacattggtttaccttgcaaaattattcaaaatatctcgttttggggaaaagatgttgcagtttgctactcacacgacacacaccaacctatatttaatactcactgaacaagtaacccaatgcatgctcttgtttcccacactcccacaaatcataaaatacaattatgttattatttcgtatatcgggttattatgttatttttaacttttatttagttatgcgatatttccttatttctaactcttaaggttggcgaaaaaggaaaaaaaaactcttaatatggtgagaaaatatgaaatatatgacgtggattttccttaggtctctttaactattttgtctgataacaataattggtttatagctttggcgtatagcctccttaagtgttatctcacgtctcttcatattctgcttctctcagaaatttccttaattattatagcaaaatttgatctgcatttaaaccctaatatttacgttatatcattaatttcttcttctttccgtttcttattttaggagaataatttgctcagtttagtgttcacaagcagagtcgctctaaacggtatgctcgattctgcgtcctttttttgctccttctatgttttatctttctagctttcatagttttttttttcctgcattatggtttcagcgacaacggattgatcgttttagggtttttacttccataattatttcctaattttttctatttttaatcaatttaatagagtgttgattgcgatgaagaagaaagccattgtgattgatgatggatatacaaggtttatggtgaatgaaatgtctgaaaaaatcgatgttccaattatctgtcttgacgaagatgatgatgatgatgatcttatggttgataaggagtacaacgtcttcttggatcatcttcgaagaggtgataagaaaagttcaagcactcgccttgaagttgacaatggagcatctgacattcgtagattaaagatcttttcttgtgattcaaagagatctaagcttgggaatgagaatccagtgaagaacagagttaatcaacagagcaagaggaaaactgttggagttgaggttgaaagagttaaaatccgagaaatcattcaaagagacaacagagttgctgaacgaagaaagcggaggatcgcagagttagaagctgcaaagacttcaagagacgttccttcactcgaaacccaacaagaagacattcaacaacgagacaacaaagttaggaaactttccgagtcaaaggctgagactttaagaagagatgatgttccattggttaaaactcaagaagacattcaaagagacaacagagttgctgaacgaagaaagaggaaatgtgacgatgctttaataaaagatgttccattggttagaactgaagaagacaagagggttgctgtggagattgatcacgtagagcgagtacatagagttacagaggttaatgatgtagatgagacttcttcaaggagcaaagaagtttttgtagggagaaggaagaagaatgaggggagtgaagcggttgtggataaggattacatgaggtacctcacatggcttgtagattctcttagcgattcgacaactgagccaatggaaaatcttcagaaagatgatatggatactctaaaagaatcgacaatggtacctgaattggatccactagtagaagtgaaggttgaaccacatgatgattggtctgattatataattgcgatgggtgattccccttttttggatggagaggagtgtacaccgtttgtggcgtccaagaaagtggttgatcttgatgaaggaagcaaagagaatgaaagtagtagcagttggtttagaaaggagctaatggatgttttgaaaaatccatatgatgaaggagagatgaagcagctccatcgttacgtatcaatccataaaaaaatgactcgatgcagagaactacgaaagggaagaggatctgattatgagactgacgaactgggacaatcttatctagaaagtttccctgatttcgaaaaagaatacaagcttgtggttggtgttgataaggcaagagctttgaagttgctgcgtggctttttcttttacttgaaatatgtttctcatgatggtgttttcaagccttgggagaagactcaaagttggcaaccttagaaatggtaaagcttttggcttcatgtagattaagtttttggatttctgtctgtttttttttttttctttgttgttggatggcaatctgatccagtgtagtttcttgtaaccaaagaatctggttttatttaggtttttcctgaaaactgatgcaatgtctcaagactttctgatctcatataacaaaaattgaaggaatcagatgagtgaaggcattacaatattcagtttaaacgttgtatcaaaaaatctgaaacagcctttgaaggtcataacaatcagacattgtcaagttgtcgaaactaacagagaacaagatgtgtaaccaaaatcagcatcaccttcctttatatttacatggctaatatatgttcgagaagtacatgttaggaccatgaagctatgagtcatgttgagtcacctattcccttatgaaccagcatatcatatactctgtctactttactcggctctactttgaagaagctataagcatcagactttttctttatctgccccttctttatttctcttgttaagatatccaacatcttcaaatagtgtacaggcagtattctggtctcattgcacatcttcttttcctgcacaaaaaacagcttcaatctctcaaaccataggaataatgtcaacaaatcaacaaaatcacaaataagatgacaaacatcaagtttgaaaattattgttcttacggtctctgagagtaagtcagctccaaggagaccatcaacatcccaagtgtccaaaccgctgtatattcttggaggtgtgacctttggcagtgagtcagaaccaaagggatgcaaatttctgggtaaccctcttggactttttagtgttttaccggctatactgcctggtgcaccgtggttaagccgcagcagcatactttcttcagcttccttctttctcttctcttctataaatctatttgcgtctgaagttgtcctgcaaccagcagttctagcttcctgcaacatttattaaaagctcaacttaatgttcccacctaattgagtttgtaatccagtactcaagcttggtaaaattttaagcatcaaacctgaagatcctcgattcttctgagaatttggtgctcttcaatgactttcttaatcagttccttgtgctcttctttggattggaaccgcgcaaacactttacagcttttatatatttttctctcctctgctgaaaggctcatctcatattgatcagggtacaacaagtttctttccagaacaaattccttcctccgcttcctctcatcaagcctgccaacaaaggcacaatcttggcttgtagcattggcttatgaaaaaattctccggtttaaaaatggttgttcctgtgataagtgtaccttttcgagtaaatacgaagaacctgcagtttctgctcacgctcagcatctgtgtcagaatccttaaattccatgtcagcaagcagttgctcagcatcgttgtcatgttcgatctcaaattcttccctctttagattgtaaccatataactctgttactaatggaactttctctccaggaagtctgagtttcttctccccgacactcctgtcagattgttgttttgcagctaagacacaagggccgttaactacctttagtttttgttcgcgtaaatatcactttgcataaaaacttgttccagtatataacaaaccttccaacttgatgatgtccttagcctgcggtacattgcctttcttcttgactgtacaataaaaagtattactttacatatggaatcatggaagagataatatttggggtcgtagtacgaaatgcggatgatttgcgtccttagccataaatctaagtgcaaataatgtctacaattttatatagataaaagcattttcacatacctccagctaaggcagacaaaggtggatctatttcattgaccttccctgaagcttcgtgtctgcccatggaaacataatagtacttttaaaaaggtgcattcaacattgtaaacgtaggtaaactattgttacaagcataagtatatacttgatttcagctgacacaggtaactcttcttttggagatagcctcacaaatgcaggtatttctgtgacaaatagtaaacagagctcagcatcctccttttttcagtcaaggttaatatacgagtcccaaatcaacaagaaaccccgctaatagattttaaagctgacctgttttgactgcactatctttactcatagcaagcagctcatctttgctctttccaatagtatgggacaagtcctacagagcggggagctagagtaaataaacaagctaggttcaactatctgacgatcatgtgttttcatcagtccttaccggaagtggaaagcatggtgactgcatgtaagcagaattgaagtgtttaatacattctgtcgttgtcttactaccaacatggtctgcaacttctttccaattgccaaacccgtatgtcgcaatggcctaacacagtcaatttacttcccaatagtcagatggaatctctatatagacatgggagtgtacaatcagaaacgattaatgattacctcaagaaggagtatctcttcatcggcattccaatcagaagtaacaagcgaaaaagacaaattgtcctgtcaaacaaaagggtagattcaatacaaacaaaaatacaaccatagaacattttctttgttttaaacacaatcactaatctaattacttttcagctgacaaagcgttgaattgaattcaaatatactgctcggcgttggaaactaaccataacacgatatgggtgactgttcttgtgacgattaagttcaacgccgacagaaaagcattccacacaaagatcaaagtccatacaaacagcacatttgaaacgaaccaaaccagacagatctttatcgcaatagttacaacagtaaaggccaggtttcctctcattcccagcttcaattcctacaatgtattggtacatgtaagaacttttggaaaacgcagcttggtacatgatacatcaatgcatatctatccacagcagaaactttagtcctatcagtatcacacctaattgcacaagtaaacggaaacctaccggtggaaattgatgccgcagcattctcaggacccaatgatatctttttcctttttgattttctgaaacagccaaaatcatcaaaattaggataaagacaagagacgacagcagtatgaaatcaagagccacccacaagtaccaaaagaactccgattcagataatcaaacacagctaagtggattaccagatattgaaatgttttcgcaaagacaagtaagtaattgaacagagaaaaccctagaagacttcgagctaagatggacaaagaacgaaactttaaacgaaccctggattcaggtcttcctcagcaggacgagaagctagtttcgaacgacccatcggcaccaagctcgcacttcttcccggcagattgaagaaaaaaccagaagagcgagaaaacgctaaaaagcagtgaaaaaatggtaagtcggtaaatgactaaattacccttaacaagtgtcaataattatgttcacgccatctttaaaccctacggcagttgtcagtggtcacgtctctctcttaacctaaccaatccaaagttgccgctagggtcaccggaaaacttcagagttgtgtcttctattgaattctccgggaaggtaaagaagattagtgggttttgattgtgctgtataaagatgtgtactttgtttgagctgtctcttaaaccctagcaccaatccgtgaaccttgaagtttgtcattccggtagaaattcctcagcagttgatctaattcgttctctgtgtagtattagtgatggggctttctcttggggaacaacatttcattaaaggtgggattgctcaagatcttcgaactgatggtcggaaaagattgacttaccgtcctatctacgtcgaaaccggtgttattccgcaggtagtgtaatctcctagagctcgtccgcttctcattgttgcttcccagttgtttaacagatatgttctttctcttgtttttgttggctctaggctaatggttcagcgagagttagaattggtggaaccgatgtgattgctagtgtaaaggtacttcctttgttctctctgctactgttctattgttgaatgggaagtgctattgtagatgttacccagtaatcttgtgtaattgcaggctgaaattgggaggccaagttcacttcaacccgataaaggaaaggttgcagttttcattgattgcagtccaacagctgaaccgacatttggggtgagcttttcttttatttcgtttggttttggttctatctagcacttgtcacacccgttctatcgttctattggtgtttctcttactagtggaattgttcaacatgagattttggttatcattacttttcttcagaatctcctaaattctactgtgttaagtctttaggcggctaattctttgtgatatgttgttacttaggggagaggaggtgaggaattgtcttctgagcttgctttggctcttcaaagatgtcttctgggtggcaaaagtggagcaggtctgcaatcatgtttatgcaatgcttttttttacctgcacactgttacgctttctgtttgtaacgtttatagcaattcatgttttggtaccaggagctggaataaatttatcttcgcttttaatcaaagaaggaaaagtttgctgggacctttatattgatggtcttgtcattagttcggatgggaatctattggatgccctgggtgctgccattaaggtaattcttgtgatgtgtgtttggttttctctcttaacccttagtctcaggttttagttacgaatgttagtgagtaaatcatacccatcaatcagaatcatgagaaaggaaaggccagagaatataggaaacgaaagggaatgggtctttagttaagtgtatatagattagctcaatgtagttgtcttgttattggttttagtagctttacgatatgtttccaattgatagtttaagcaacccaaaagtcatctttcctcaaggctgatcacatgctttaatgcacttgttgactatactcctgcaggctgctttaaccaacacggccatcccaaaagtcaatgtttcagctgaagtagcagatgatgagcaaccagagattgacatcagcgacgaggaatatcttcaatttgacacttccagtgtcccggtcatagtcacgttaacaaaagtaatcgaatctcacttttcttgattcacatcgacatcttcttatgtacatttcgctaatcttttaccatgctgtccttggtttttgcaggtgggaacgcattacatagttgatgcaacagcagaagaggagtctcagatgagctcagctgtatctatatctgtgaatcggacaggccatatatgtgggttaaccaaacgaagcgggtctggcttagacccaagcgtcatccttgacatgatctctgttgccaagcatgtgacagagactctgatgagcaaacttgattcagagatttcagccgcagaggcctgcgaagacgaatcttgactcttgagtctcagagaatcaaagtttcaagatgaaacatgttagcaagggatcaacaatatttgtatctgtggaaaatcttatacgaagtcagaacagattaagctaatcaaaatcctttttcctatgttctaatgttccatgctttgtgatagtaaaggtgatatttttgccattatagtattagtaacattatatctcatctagggattattaaaagaggcgttccttggatctctgtgtttaaagtgaaagacataacaagttacaaaaggatttgtgatattttgggaggaggaaatgagaatggagatgaggtcagcaaatgaaattaagtggacttggaaaaaagagaagattggtggtccatgattaagctcaaaggtcaaaagagtgtgtgagcagtgttggtcacgtgtatctcagcttcgggtttggtaaaaatggctttgaaacattcaattgttttctgtaaaactcccaaatccgatactattcacatttgtttcctccttcatttcataacaagcaagctggcagagaaaatttggtagtcatctattatgtcatagaattatgatatggtacatactacaaaacaacaaaaggagggagcaaatagaaagcgttaaatggcaaaactcaacgaatttacgtatattccgatgaactaactaacaatgatattgataactgtttttgcgaatcaactaacatcgtttccacatttaaattgtgactagcataaacaattaaaaagtaagatttgaaaatcagtcggttaactaattggaaaagaaaatgaaactaaattgattgactaaagtgattttttcttttcttattggccactaactcttattttgttttcattatggaaaaagagtcaaacctaatcaaatatatttagtctatgatttaccctaataaaatatacacaaaaaaattgataactacagtacttaaaggtttttaactgtaaaagttaattttgacagtaaaaatatttatttctaaaaataaaataaaaaaaaaaagagaaaaagatttaatagcaaaaatggtcgtggtacggagagacggtggcgcgtggaggcgggagaggagcgtggaggaaaagaaaaagagccaaaagagaggaaaaaagcaaacactttcacttggtggacccatttgtccctcccccagactctctcttctcatctctctctctctctctctcttcaaaccctaaaaattcacgcattttggcacagttaagttcgctgaatcccgttcctcttcctctgtctctctccccaagaaaatcactcagatcaaagctcaaatttcggatctcacagctgtcgcttcggtaggtatttcctcttcttttccccccctttctcttctcctgtttcgttttcgatttggattacacgaaattcatgtgatatgttgcttctttgggttttgtaaaatgattgctggtgaattgtattgggaattttgtgcagaggaaaggatgaccagagaacatcctcccgagcctcttgatttcttcatctggactgttgaggtatattcaatcaatcattccttctttataagcctttcatgatgatcacttcttcaattcgcatgtttcttggaattgagctcttcattattagacttgttggttgcagaatcatgtttattaaattattcagcctatttttgatctgaattcagcctatttaaccagttacagggttgatttgatatttcttcaggtatgaccctagtttgccttaggcttgttcttgttgtttgatccaattacactgattgatttagtttactatgttacttattttttttgctcttttggtactctgcttgttattacaagaataaatctcaccttaatgattgcaattacatcaggcaagctcgaatttgacgcacctctagctattgaagttccattagtggtcatttagtttactatgttacttgtcgctctagtccaaggaatctgtgtttgttgatgtacatatactccggaagtggttttacctcagggtgtgtagactgcagagtgatgttcgcatatgtcacttgttgatttgctcttcagaaaaggttgaatattggatgaagattagttgatgaaaactcgataacctgtgcctgataccaaaaatagttaagagttagtccactcatatggagaagctggaggttgtgtgttgctgaatggttttgttctatcagatgctattatggattttcttagttatgctcgtgtgtaatggcgagcatcttgtagatgagaagctttgttctttttttcttcaggatgttgggtcttggctcgaggagataaaccttgggggctaccgccagattttcaaagaaaatggtgtcaatggagaatatctagaaagcatgtctgtgtttactaccgagcagatccttcacttcataaggaggcatcacatgaagtggggagacttcatcaccctctgtaaagaactcagaaggattaaaggtactctatcgttctctctataactctcagcttaagttgttgcaggaatttaactatggaaagaaatgtctttttttttacagtggcttgcttgaaaggtgagcagagagttagacggccatggtgggcaccgtcttgtctatccgtagtctttgttaaggcagccaaacgcaaccgacagtctcgtgttgtatctctcaagcttgaatcttgacattacactttggctgtttatgtacgtacttgtctctcttctcttctcttgttttcttttcctttttttttttttttggtttgggtttgtttgtggcacatgcactaggaagaaacaaactcaagtcaaaaaagctgtttggcttggtgaaatcttgcaagcgggaaaaaaattatgcgttttgtactttggtggtgtatacaaagcttgctctcagatgtttaatatatggcttgtgcaatctttatgtgacagataatagtgtgacgaatccaaagtagtaatttgattatatgtaatgtggaaaccgattgaaacccaggcgatattgagaacgtagtaatttgattatatatgttatatgttccaatgattttggacactaataaaattatttaggtcacaaatttaaaaactctatcggtggttaaacattttcagagatagcgtccattcaaacattttcgtggtgcaaattttcggagaaatatggtagagatttggcgtatagctcatctcatgttcctctttggagattagtacgtttagtaccctatcctcttggacgaaatctcttatcgagtatcgagtccactttatcttcacagaagtgagtaagtgacaaacaatgggaagcgaccacaacttctaagagaaaatagatattttatacattctttcttacaatttttttgcagttgaatttatcatctacaaagtgtaaaattatggattgagcaatgcaatttttagaagaaacaattaatggacagagatataaagttttgtaaaaatctttaaaattaataattatctttgaggtttttacaagtttattatatgtccctttccattatttatttttttcgttattgacattgcttacatacagtccattattttaagtttctcttaattttattttatttattagatacacacttatgtgatacatattgatatcatctttaccaaaaatcttgagcttagccaccaacataaagttttgacaataactcgtcatcggatttttcctcagtctatcaaaccttatcaagtctagtcgtctagaaggggaagacatgttcaaacggggaatcagatttatcgtcgttatgtgagtttattttattccatatatggtttctcgctcgatacgtttgatggtacaattcatcatgcgtattctcacttcaactttaatcgaagccttgttcatattgtataatcaaccgttgatacgtgtcaccgcatctggacatatcacattttttgttggatttcttatactcacccctttcgtgatccgatcaaataataaaactgtgtttttggtacatgttcttgttgggatagcgtttgtatgttggtttattttcgtgttagttatcttcttcattgcatacattctaaagcaatatgatttcttatacaagccaataaggttttaatcaggattatccttaattaatgtattcatacttaccgttcacaaaataattatgagaaaaccaaataccggaattacccttcaaatccagaagcttcggctttggcctaaaaaccctactaaaccccaatcgtctctcttcttagctcagagtgctaccgaaatcaaaatccaccattcttttctcttccgagattttagaagtttgcgacgatgatcaggctctctaagcgctccgtctctaccctcctacgctccggtaaccaaagcttccgtatcgccgccgcagcttccacctcccgttcttccccatctgccacggtattcatttcaatttccttcatctatccctcgctttgggttttggtttctcggttcagtggccaattggctttcgtatgataggcgaagagaattgattggattacttacagtgtcactattttccccccttttaggatgtcaagagaagtgacactgaatcgagatggtactcatctttaaccaatggacaatctaagaatagtgggtcatttgctcaattgaacatgaaaaccaattggtttatgggataccggaacgaatccagtgcagcagcatcagattcttcctcacaagctcctccaccggctgagaaattcgagtatcaagctgaagtacgtacgatctgtgtgtttagatgatttcttgttttgtgatcaattttgtgtgtgtcctcgtcactaatgtttgaaacaaatggcaggttagtcgcctcatggaccttattgtcaacagcttatacagcaataaggaggtgtttcttcgggagcttattaggtatcgtattattctctatctttttttgtttcgtaatggtttttgtgtaacggactcatatttagtaatctatattttacttgatttgttgttcaacagtaatgcaagtgatgcattggataagcttcgttatttgagcgttaccaaccctgagctctcaaaagatgctcctgatcttgatatacgtatctatgcagacaaggagaatggaatcataactctcacgtatgacttattagtttctgatttaaatgtataaatttcgttttgagcaaatggttagtagataataatatgctgtcaatgcttttttcccactttgtcagtgattctggtattggtatgacacggcaagaattagttgactgtcttgggactattgctcaaagtggaaccgccaagttcatgaaagctctaaaggtcttactggtttctctgatactattgcttctctttcatggaatcacttgatcaactaagcattgttgtaacattttcaggatagcaaggatgcaggtggtgacaacaatttaattggtcaatttggtgtagggttctattcagcatttttggttgcagatcgggtaagttcttatgttgtgatgtctgcagattcctttattgatatactcacctctccaccaattcaataccataattcacatctatctatcttttgaaggtaattgtgtcaaccaagagccctaagtctgataaacaatatgtatgggaaggagaagcaaattcaagcagttttaccattcaggaagatactgacccacaatctctcattcctagaggaactcgtattactttgcatcttaaggttcgttatgctttgatatttaatttgtagatcaattctgagtatttgttccttcagaagacatgacatactaaattatctctattatttctttccccaatacagcaagaagccaaaaactttgcagatcctgagcggattcagaagctcgtgaaaaactattcccagtttgtttctttccctatttacacttggcaggaaaaaggatacacaaaagaggtatgatcaccagagttagcagatttgtgaacttaaacatatgtacttttgtgtcagatgcaactaatattcttaccttattaactggctttgtatatttggctctctctcttgcaggttgaggttgaagatgatccaactgaaacaaaaaaagatgaccaagatgaccaaactgaggtatatatacctgcgtctctttacctgttctaagaaataccttgatcagcttctggaaatatcttaatcagcatcagaagatagctagatgtgtaagaaaagttggcttagggttggggactatttttcttgtaacagaaaaagaagaagaccaagaaggttgttgagagatactgggattgggagcttacaaatgagacacaaccgatttgggtaaggacttgtcaatgtatcttgagtgcactctgaatcaatttaacagtgtattttatttattgcagctgcgtaaccctaaggaggtgacaacagcagaatacaatgagttttacagaaaagctttcaatgagtatttggacccattggcttcatcccatttcacgacagaggtattttcaaaggaacacatttattgaattggatatttccattaaacagccgaattagatcgtctttgttagacgatccactgaaatataatgctctttgattctcttgttggcaatgctcagggcgaagtcgagtttaggtctatcctatatgtgccacctgtttcaccatcggggaaggatgacatagtcaatcaaaagacaaagaacataaggctctatgttaaacgagttttcatttcagatgactttgatggggagctggtgagaaaagtttcttttggtgtggttcaaatttctttcaagaaacctctgtctttctaattatattgatatcatttttgtggtgtttgtggccagtttcctcggtacttgagctttgttaaaggtgttgtggactcgcatgatctcccacttaatgtatcacgtgagattcttcaagaaagtcgcatagtaagcgctcatatccaattcgtatgcaaagcctttatgatatatgttttgttttaagtgcaatgctatgttaagcttacgattttgtattgtgtctccaaggtgcggatcatgaagaaacgtctagtgaggaaggcttttgatatgattttgggtatatccttgagtgaaaacagagaagtatgtttcataactcttgttcccctaagcttacagtttaaccttttttaattccctttagaaatcactgctacgttctggtgatgattttcctgacgaatgagaatggcattgttaacctatacaggactatgagaagttttgggataattttggcaaacacttgaaattagggtgcatcgaagaccgtgaaaaccacaagcgtatagctccactgcttcgatttttctcctcccagagtgagaatgacatgatcagcttggatgagtatgttgagaacatgaaacctgaacagaaagccatatacttcattgcttctgacagcattacaagtgctaagaatgcacctttcctcgaaaagatgctggagaaaggacttgaagtatgtgttgttcttctgaatggggcctcgttttgttcttccttgcaaatattcctattaactcagaggtgattgacatgtatttctttgtattgtgaacgtaggtactatatttggtagagcctattgatgaagttgccgtacagagtttaaaagcttataaggagaaggattttgtagatatcagcaaggaagacttggatctaggcaagtgcctgatgtaattccttgatttagcatgtcaggtaatcacttatgtataataacaaattctggctttgatctttgtattgacaggagacaagaacgaggagaaagaggcagcagtgaaaaaagagtttggacagacttgtgactggataaagaaacgattgggtgacaaggttgccagtgttcaaatttccaaccgtcttagttcttccccctgtgttcttgtatctggtaaatttggttggtcagccaatatggagaggtaagatctgacctttttcttaagcaaggatttccgttctccttttttgcccctggtgaactaacacagaatatgttatctggacaggctaatgaaggcacaatcaactggtgacacaataagcctcgactacatgaaagggagaagagtgtttgagatcaatcccgaccactcaattatcaagaacataaatgtgaagtcaccattcatcataacttgtacctggctattataattaaatctaggagccgctttttgagcttggcttgtttttttcttgcaccctgcaggctgcttacaatagtaacccaaatgacgaagatgcaatgagagccatagatcttatgtatgacgcagcactagtttctagtgggttcacggtgagtcctattctacattaacattcttaactttttgttgtctctagaattgaaataaagtaaatactggtaaaacttaattgttgtttctcaaaactacagcccgataatccagcagagctgggtgggaagatatatgagatgatggatgtagctctttccgggaaatggtcaagccctgaggtgcagccgcagcaacagcagatggcacattctcacgatgcagagacgtttgaagctgaagtggttgaaccagtcgaagtggatgggaagaaatgaacacaagcctaatgttttatgtccctgctacgattctcatcatattcttcttcttttattagtagtagcagtaaaagtagaaccccaaaactcagaacaataggcaatgagcgaatgataatctctatttatgttggagagattaataattgattgagcttgtttttgttccagtttgtgttgatcctcctcggtataattttaataaccgttaagaaaaattcagttggggtgtttttggaaagatttttcgagttttatctaacaaaactaaaattttgggacatatggtaatttttaattaaatagagggatgttgttatcgtacgaattgggttggtttaaaactttgtttggacagattcgactcaaacgttgaacgcgtttaaaaaagtcaacaaaagtcgaaggttaccggctggtcaggttaaccgttagagattaatgaactggcagctgtatgtcttttttatagttctgtcttaacaggcaaaaaagtgtttaatttatctttcctttgggtttctcacggagtcacggttcctcgttcgtcctctcccgtcgtctctccggtgagtccttaattttccggcggtctttttccctttctcgtctgtttggtgctttctttatgtctgaggcgaatacagcaaaacgtatctgttttggttgttgagttcgaggctggtcctgaaaattcggtgacaaaaagagtcaataactctcgtgatcgagttggatgcgttgttttgagggttgattcagtttatgactatgtattttggtacttgcaagattttctgattttatgaagattcgtgtttgacttttatagcgtataatctacggggcaaacagattcgagcaacttgtttttttctagcgcttgttttgtgtttactctgtcatgtgtttgtattttttgagcttccactagtgattaatcatctcagctcaatttgaacataggagatgtagtttttatctgtcggtggatttctagggattttgcaaaatgttttgggctttcctgaattagtatgtgatttggtcgtaaagtattttagggatttatgtgttccttggggtgaatctgacattgacattatcttggtgtctgcagcactaaattgatgggcacatcatctgggtccaatcttcctcaccagatgctacctccacgtcagcaactacaaacatctctttcgcttgtatcttcagatccccacttgtcacggtctaattctggcattgtgcgtgaatcaccagctgaaagtgctagctctcaagaaacttggccaacctcaaaatctattatgggaaggaagacagatagcggaaagacagggcctgactctcatgatcaacatgtgatccgccatgtttccattgctgataaggtatcgctacgggacatagctagagagagacttgacatagtcgctgagagaatgcatcgattaccagaagaatatctcgaggagttaaagaatggtcttaaggctatccttgaaggaaatggtgcgcagcctatagatgagtttatgtttctgcagaagtttgtccagacgagatctgatttaacttcaaagacacttgtcagggctcaccgagtgcagcttgaagttcttgtggttataaacactggtatccaagcattcttgcacccaaacatcaatctctctcagtcatcactcatcgagatctttgtgtacaagagatgcagaaacatagcttgccaaaacgaactcccggctgatggttgtccctgtgagatatgcgctaataggaaaggcttctgcaacctgtgcatgtgtgtgatatgtaacaagtttgactttgcagtcaacacatgccgctggattggctgcgacgtgtgttctcattggactcatacggattgtgctattagggatggggagatttcgatgggagtttctcccaagagcgtatctgggatgggagaaatgctgttcaagtgtcgagcgtgcaaccatacttctgaattgctggggtgggtgaaagatgtgtttcagcactgtgcaccaaactgggatagggaatctttaatgaaggaacttgacttcgttagtaggattttccgtggaagcgaagatacaagaggccggaaactcttctggaagtgtgaggagcttatggagaagattaaaggtggactggctgaagcaacagcggccaagttgatactcatgtttttccaaggtaagcccactcgctattgttatatgataagggtttactctttatagacctaaccatgttttgtgtatgaagaaattgaattggactctccaaagagccttgaaagcggagaaggtgggggtacgatagcacctcaagatgcatgcaaccgaattgctgaagttgtaaaggaaacactgaggaaaatggagatagtgggtgaggaaaagacgaggatgtacaagaaagcgcgaatggggcttgaggaatgcgagagagaggtagaagagaaagcaaagcaagtggcggaactgcagatggagaggcagaagaagaaacaacagatagaagaggtggagaggatagtgaggctgaagcaagcagaggcagagatgtttcagttaaaagcaaacgaggcaaaagtggaagcagagagattggaaaggattgtgaaagcgaaaaaggagaaaacagaagaggaatacgcaagtaactatttgaaactgaggctgagcgaggcggaggcagagaaagagtatctgtttgaaaagataaaagagcaggaaagtggtgggaatggtggtgaagcgtcacaagcagtgatgtactcaaagatcagagaaatgctgcatggatacaatgcatcgtcgccaagggtagatccaagatcaaaccagcgaaatcctttcagatccaatccttagatgtttgtattgtctctctttgtttgtattaaaaaaaaaatccgaatcaattaaggttggatttgtgtgtgaagtattgtggtctttgtattcaaattttgcacatgatcgtctatgttgggccataatgttatgcaagctttgacacagagtgttgccaaaatctcgatacttattcactcggatttagagaattgtggatttcgctaatggagggagatccatgttaccttaaatagtttatatttgagccaacatgagagccaaagaacatcgccaccgactttaaaaagaaaatattttgcccaaatggatattacagagtagttatttgcaataacgtcctcatgtttgggttataataacgatttgatttcttacggggtataaagcaaaaggaatcaaaacgtttggggaaataatgtaatattctggaaacaaaacgcgtataatcggattgataaggaatattatatcatcgccgatgcaatcatcgaccatcgttttgttttcctgtctacccaaaaacaaaccctagtgtccgaattctcgacaaaattcatcggctccaaattccattcgtgctttttgaattcgcgttcttctgattcaagatgtttctttcacctggtcattctcctcgtcagatttcttctccatcgccgtcttcttattccgatgataccctccgatcaacgcctcgcagttcttcctcggagatcattcctcgaaaccctagaaaacggatgagagttctcgatgaggacgcttatgttgaagcaatcgagaagatcatcgagcgtgattactttccagatataactaagcttagggatcggctcgattggatccaagcggtgaaaacccgtgacccgattcaaatccgagatgcccagttgaagattatcgagaggcgtggaaagaaggcgaatcatcatgttggagataccgagggtaaaactcaaactcctggatctacttttctgagaaatttcactcctttagatgaatttgatggtaaaacccctagaactcctggagtatctggtagagaatttcatggtgttgaagtagatgctggtgatggagatgaagatatagatcttaatttgtccctagatgagttctttaggagatatactagtgaggataacgagagcttttcgaagattcttgagaaggtaaataggaagaagaaggagaagtatggctttctccttgaaggtgaaaaggaggatggtaaatctattgaggatgtgaagagagataggattacagatgggtatggtacatctgatcagccaccgagtactttagaaggatggaaatatacggcgaagaatcttctgatgtaccatccagctgatcggggtgaggcgcctttaactgaggcggaaagggcagtgagattacttggattgactaaggagatagttaaagggaacactcgttttcatggtaagactatggattctaggccaagagaagatggttctgttgagattctctacactccaatcgcaggttcttccccgatgcatatctcaggtagggacagagacaagtctaaaaggtatgatcttgatgatctaaggaaaacaccgaatcctttctatgtggaatcagataagagggcagacaatgggtatagttttgttagaacgccttctcctgctccaggtcttgatgaatcaccctttataacatggggtgagattgatgggacaccaatgcgattagatcttgaggatacacctattgatattggtggtagtgctgatggaccgcactataacattccatctgcacctcctagagatgtaagggcacattcattatcaagggatgcatcgcgaaaacttagagagagatcgaatagtatgtttaagaaacctccgttgccatctcctcatcgaagtggaagtgcaagtccgaatgttaggactctttcacccgctgctcagaagtttttcagaaaggcaatagctaaatcatcttctactgttgatgagagccttcgtgcaagttatcgtggagcaagtcctcgtggagcaagtcctggtgctgtgactcctaagagtgtgagaagtatttcaagatttggcaaagatgggaccagctcagagacaaggtcgccttgatggtgccaatgttatggttatctgttgttgaatgctttggtgctcacataggcaacaaagttacttcttcttgtaccaattactgatatgacagattttaaatggaatgctatctatcttcgcatttgtaattttgacttccacatcttctcttttctcttagctcccaggctacgcacttcaatattacaacatcagcacaatatcctcaagtgtaaaatttggtgtttaagctttatctgtagattctctatattttagttccttttgtgtgattcatgctttttaagaggtgtcatcctcgagattgttctctcttcaatctcaggtttccctcagagtttggaattgcttggatgttaattaatcattaatgtttatgtatccttacattaagatctggagacagaaccgactgcaacaagagtttcaatattcacagcagcatgaagtagacgtagatgtcaagatctatggtctcggtccaaagagtgattcgagattcacaacagtggagacacctctagcatcaatagtttgctccctagagatacctttcagtgatgaaggtggatcaagaaaacagtgcttcttaaaccagagcaatgcaacaatggaagaatgcgaatccacaagtatcaaatccaggatctgatgaaagaaatgcttctgtcacaaaacaacctctcatacgcaacattgtaagtccaactcgaaaaactaagtggtcttggaaaatgaagagtatgaaacatggaccagaggctgtagagaaagcatcaaacttatatttatatacaatgaacatcacaagtgtatttcaaagacaacattaaggataaaccagaccagtaaagaaaccaaacaaccaaaaaagaaagaaaacttcaccataacatatgttgcttgttccatatcatttatagttagattgtagcagcaacacaggattcagctctagccttgtcagaatcttccaagactttcttagaggctttaataacaatatgattagtgatgtaatgcttgcgacaaacaggcatatagacatcagctccaccaataagctcagttctggtgtcacaattctttcttaaagtgaagaaagctttatgtccacagacctcacaccttgcagttagcttagtcacagaatcagctattggtataatgtcaagtacagccccaaaactcctcctgcacatagagagatcaattccacattttacagtcaacaaaattgttaaacattgaagtaaaatatcaaaatcacagctttggtactaggatgaagcaccttaaatagtcaccatctaggccagcaacgatcacaattttaccatcatcatcagcgactttgcagcaaaactcataaagatctccaaagaactgagcctcatcaataccaatcacatcaagctgccaatcattttaagagaaaaacacaaattcaatacagatccttcacaattaagacccgaaacaccaaatagagcatcgaatttattaccttgttataagcatctagtccgaatttctcaggaaatgacatgagatctggaagagcccagcaagggaatccaattccatcatgtgtcaccaccgaatcttttgcgtatctcgtatccttactcgatttcagcatcgcaacacttctgcttaaccaaaacacgaaattaagaaatttacggagatagatctaacaattaaaatctacggagatagaaaataaactgtaccttccgtcgctgatctctgacttgattcggcgaaggagagaggtcgatttcccagaaaacataggacccatgataacatgaacagcacctgacccacgacgttccagatcggagagaaaatctccggtgacgtcactgtcgagggttttgatcaaaaaggaagctttgagagtcgccatggcagagacttgagaagaaaagatggtttgtagatgaaaaaagggagaagggttcaatttgcttgtggttttaggtagcgatggtgaatagcttgttgaagatatatatacgcggacatccagaagttgaacaaggaagaaaattgctggagaagatttgtcaaagataagggtttgaaattttgaatgggaggttttttcaaaaaaattacatctttggagggaaacagttttttagagcgaatctttttattttacctctctcttttcataaagcggaacactataaacggaatttaaaaaaaaaaaaactgattttctattggcttattttttttaattaatttccttaatgtatagatcatatgaaatttttaaacatgtgtgtttaggctttgcaaacacattatttaagagaatgataaatatttttaaaaaatatatccacataaaatggtactggtttttggtcatatattccactaatgttttttagaattattgtttaaattagaaagtcgtaaattcgtaatattcgagaaaacaactttctcacttgggtttttatcctacaaacccatcattttgtgtgtgtgcttttgaatgtgggcttaaacccaaaaccctgaggctttttttggccctgagatgaacatgttcacaaccttcttcaagtgttccaatacatacacgttcattgctttttcgtagttgcaatttttatttaatttttcgtatgtagttgcacaccttcatgtctaaagctacaaattgttgaaatgttttttccgatcacctcaattaatgtacaatcgtagctcgttgtattcctaaaaccgaactagaatacattttcatcgccaggttattacaagttaaatcaatttgatcaaaattcaaacatagataaaatgtacaccagtaggttaaaactaaaccaaacgtacacaacaagcctaaattatccaaacaacaacaactctcagttttgctttaaaaattctgtgaataagacatccttaattgcaaatttatttttaattacttctttttaaaaaacttttagtggcaccatcctaattagtaattactttctatataattcttctttaagatacaaactaaaaattccgcaaaaagaaacatctaaacattccaatatattaatatttttttgttatgacaaaagtaaaatttccgtgtaataaatggaagggaaaacgtataaaaagtttagtattgaaaaagagaaaaaaaagaaacaaaccaattatgtaataatgagtataaatatataaatacagacatatcttcttcttcttgcacacccaaaaagcctttgtctttctatctctctaccaaaacttctttctttctctctttttctatatctctagagcgcgttactgcgcgtcgtgagtatgtttttattgacgccattgaaattgggttaaatcggtttgaatcggattgaacaaaaactgtattaataataattcttcctctacttttctctctgattgattccaatcttctttcattttcttcttcttcttcttctggggaaggggcaggttaaaattatgccatctattcaaatcgtgcctatcctcagatcttaactcttttctctacgagattcggcatctgggttttattcttcttggtgggtttttttttattcttcttcttctgatctcagatttcccctgattggtttttttttttgctaaatccgttttatgttttcccgatcaaactctcctggcagattctcggatctgttgttttctagattcaatctgaatttgattttacgtttttgtctttgtaaagatgtttccttttgatcagattttgataatccattgacatctctgattcaagcaaaagctaattaactttgatccgattcctttgtgtgtgtgtgcagagcaaaatgcaatcggataatggaaagcttttcatcggtgggatatcttgggacaccaatgaggaacgtctcaaggagtatttcagcagttttggagaagtgatcgaagctgtcatcttgaaagatcgtaccactggtcgtgctcgtggtttcggttttgttgtttttgctgatcctgctgttgctgagattgttatcaccgaaaaacataatattgatggcagattggtatgttcactgttctctgcctttcgtttttgtacaatgtaacttgttttcgaagcttccttatgcaatcaagccttcaagagttacagtttgttctcatttggttccgattaatcatttttgtgctttgattggatttttgagaagaaatgagtgatctttagttatatgagcttagtttttcatttttcaagttgtttgatcttccgcaggttgaagccaagaaagctgttcccagagatgaccaaaacatggtaaatagaagcaacagcagtagcatccaaggttctcccggtggtccaggtcgcacaaggaagatatttgttggaggattaccttcttcggttacagagagtgatttcaagacgtattttgagcagtttggtacaactacggatgtggttgtcatgtatgatcacaacacacaaaggcctagaggtttcgggtttataacctacgattccgaggaggcggttgaaaaggtattgctcaagacattccatgaactaaatggtaaaatggttgaggttaagcgagctgttccaaaggagttatctccaggtccaagtcgcagtcctcttggtgcaggttacagctatggagttaatagggtcaataacctccttaatgggtatgctcaagggtttaatcccgctgcagttggaggctacggacttaggatggatggtcggttcagtccggttggtgctggaagaagcgggtttgcaaattacagttctggatacgggatgaatgtgaactttgatcagggattgcccacagggttcacgggaggtacaaattacaatggaaatgttgactatggccgaggaatgagcccgtactacattggtaacacaaacaggtttggtcctgcggttggctatgaagggggcaacggaggaggaaactcatccttcttcagttcggttacacggaacttatggggaaacaatggtggtcttaactataacaacaataatacaaactcaaactccaatacatatatgggaggatcatcaagtgggaacaacacacttagtggtccatttggaaattcaggagtcaattggggtgctcctggaggaggaaacaatgctgtgagtaacgagaatgtgaagtttggttatggaggaaacggtgaatctggttttgggttgggaacaggtggttatgcagcaagaaacccaggggctaacaaggcagcaccatcctcttcattctcttctgcctcagcaaccaacaacacgggttatgatacagcaggacttgcagagttttacgggaatggtgcagtttatagtgaccctacatggagatcaccaactcctgagacagaagggcctgctccttttagctatgggattggaggaggggttccttcttcagatgtttcagctagaagttcatctccaggttatgttggcagttacagtgtgaacaagagacaaccaaacagaggtaattgagttcagagtaattttctgctttaacatgtgattctatgaaaagcaaaggactcttgagaaaaagaatttagaaagcctagatagtttccaaatttttgattatcctcgtcttctttctggaatatacaaaccatggtttagggtcttgcactaatggtgatctagaacaccttcgtatcactagtgaattggcttttcctcagaaacacgaatatacttgcatgcagaaacagtagccattctgcatctttattgttttttagttcatcagagattatttagaggaaagtttctttccgtgctttagatataagctcatggaactagaaaactagttgaatcttttatgttgctcacaccagtgtctatgggaagtctaagaaacttgtgatgaagaaactcaattgcatgactggtttcttatcgctcttctcttctctgaattatatttccctttttcggttttgttgcaggaattgctacttagtacaatcgtttttgttttaccacgatattgtaggcgagccatcacggtgaacgatctgtgtcttttggcgaatcttttagattatcttcttttcccttcatacaaagccagtgaggacgaaacttgatcatatcatcacctagagctaaccagagaatcccgcagacttttctgtcatggtttggttttctaaattcattgttcctcctaggcttttttctgctttctttttttttctatttttgttttcttttcttctttcaatgagggacagaagaaactgtatcagtctccggcgaggcggtaatacataaggagagttcaaaacaaaaacccaaaaaaaaaaaaaaaaagatgatccttcttcctcagttttcttcttcattgtcatgtaatggttcttcttcttttcttcttcttgggggttatggttaaggtttgtgttttgaggcagattgtactagagttttttttcatgtttcttttgttttgtcgtttttaagtccttttgttttgtttttgatagtgtgagatatggaaagagtatttagccatgtagggctttcgagaataagtctttttatcactatgagattattttgttctcaagctgtttgtatgtcttatgcgaacgcaagcaaactcgtttctgttgatgtacttttattttatagaaaaaactatttttatcttttattattgatttctctcttatctttttctcttactattgcaatgaatgcctagcctgattttatagaggacgacactaacattgtctccggtattttcttttctcttagtctcaaattttctgtccttggtctgtgtactctttagtcagaatctgtgagctatatttcactattcttatgaatcctaatgagtaacgactatttgatctgtgatattcaagttttatgtattcactctgttcattccaaatatcattatgatcttagattttgcattcataattagaacccaaaagatctctgatgttcaagttttatgtatgtgaacccaaaagataaactcatgagcaacctatttgtttttgaaatttttttcactcttatttcaatcatagttgattattgcggatttgccaaacatacatgtttcacggttcccaatattagtttgagttttggtccgtatcttccggttacaaaaagaaaagaaatgataccttgggagccaagccaccactacggaatgtttcacttgcacaatttaagaaatcaaaaagtgactttcttttttttgtttcgggttctaacgtcaatctcgacaacaatgatccgatcgacttgtcattttgccggaactaaagaaaattaacgggactttatttactgatcaaattactatgaaccgagcaaatgaaatagagatttgtcaccaagaaataatggatgatgcattcattgttgaattaaatgagagcatacatcgtatatagttactgtgtagaagaaattcatatataaaattgaattgaatgagtgtttgattaattaattgttttagagcttctacatttaggctgctggagcgctgcatgctttagggctctgagatcccaagattttgggactgacgtttgagcaatggaaagtggctggaccatctgctccattgtacttgatatcaatgtctccaatctccacgttctggcacggataccccttgctgcaaagtagcttcaccgcgtccttgttccctgatgttcctctgatgttcttgaagctaatgttcaccaacttaattgttgatgctttctgcaaatcacaaatcaattaacaattggaaaatcaaaatcaagcgttgagtaagatctgttgaagttggataggaaatacatacttgcttgttgcactggttccaagggcagtactcttggtcgatgaggattgggttgctaacgtccttgaggataatatcctcgaaatgaatatcggatgcggtggtggagcaagctgcagagggccatgtcttgatcctcaacccgttgtcagtctcttgaagagtgcagttgatgaccttaatgccgctgacatcttgctcgtgtccgtaccttccaagactcccgacactgattccgtgtcccggaccgcatgtgaccttctccacgtgaaggttcttcatcccatctccgacggagatacaatcgtctccggtggagatgaaagagttaaggatcttgactccgtcacttcttcccaaatggattccatcagtgttgggactgtcttctggggcgacgatcttgatgttattcatggtcatgttcttggctcccaacacgttgatgtggaagttcttggcatcgatcgaggatatgtctctgatctcagagttcaatatgaagtcaaaccttatactctgtaaaaacagaacaaataacatcactaagttgtttctcaacatgtccaaggggattaaagaaagaagcacatacgatgggaagtttcttgcactcgaaagtcttgtgacagttattgactctccaagctgcattgccttcaccgtcgaaggctcctcctccgttcaacttaaagccatcaatgttgccgaagacgacccatttttccttcccttggatagcgttaccgtcagctttgacagtaccttgaagggtgacctcaatgggagctttgcatggacccctcatctcgatctcaccaagcttgaactctccttttgggatcaccactttgcttggtgacgaagattggcatgccgatgtgaatgctttcagaagtgcctgcatatcatcagtgcagtgtgaaaccctaattaacgagttaaggccaaaaaatggttttgtagatttcttggaaagcaagaaagagaactaacctgagtaatatcagaacctgatgaagaaccaatggtgaatacctcagcattggctgaaattcccaacaaacagataataaaaattgtagaaactccaaaatatccacccattttttccccaaaaaaataaaaaaattactactaatattactatttgttattctattttttgttttctggaatttgattaagctcaggtttacctttatatagtgcgttggatggaggagagatgttgaagtctattttttgaaaatttctcaccacctctcattttttaggtcgtttgacccatcaggaagtctgatgtctaattttgtatcttgaactaaggatgaaaactaaaaagtatctaaaagggacattttcattcaaagagaatttctatatatataaagtctaattttgcctaaatatggtcatgttaatagtttggtcggtacacaaaacaacgatagtataaaattcgactattggcctggaatcccttgttaaattttttcaccatcccgtctttatatttatctttataaaaattagaagtatatatttttaaaaaatttaggtgttgaatattctttggtaaaatcaaaacgtaaaactcttaagtttgttcgttaattataccattcatttcattatacacatatatttttgtttacatgaaaatggaagtcattcgtgcatatttacacttttaattgaaaatcaaacaaattgattattatttttagtcaaataaggtaatttgattttttattttcttaattaatcgaagcatatatgctactagctggagtatattatattccaccggttcacgtactgatcagtgatcactgatgttacacaataataccactttaattttattttatttttttcattaaacccatacatgcatggtgatgtgtttatccactgaaactttcagtctgaaagtacaacaacatggctgctagattcaagtgatgcccccagtttaaggtttttttttttataacttctaccgtctacggtaactttgtcctttagtctttaattctttatcgtcacacgtctagcgtcctatgctcgagctttgaaaacgttttctcggaggcactcgtccttttttgttcgttgtgtcagactcactacctttttagcacgaaaaacggatggtccatgaacacgcaaatctcaaagcatataataacttgaattacacgtgatttatatttttgaagttaattttttttctaatcaagttatttcaagaaattgattggaaaaagaaaaaaaaaggattttgataacaaacgatattaaaatacaaataaaataaaataacctgcatctttttagttttattgcattcatatatgcgcacacacatctatgtatttgtgttggcatcaaacaaataaaaagtgaaacaaaattcttttacagtttttaaataaaagaaatctcccttgtgtgacattgggaaaaactaagattgaagaaaaaatggatgagaaattcctaaatgttatgagaactttctacattttacttaggttgggtcagcacgggtggtgtgttacaagcctttgggaactgagttccaactagcttaggccttacgtttgagcacatgaaggtggctggaccatcggctccagtgtactgaatattaatgtctccaacctgaacgttctcacacggatatcccttgctgcacaatagcttcactgcgtctttgttccctgatgtccctctaatcctcctgaagcttatgtttgccagcttaatggatgatgatttctgtgaattgaaacacacgttacgaagttttaatcatatttttcatatactaatcatatggtgaaagtggctaaattaagcgagactctgtatccaatattcatgataaggatatatatatacctgcttgttgcactggttccaaggacagtactcttggtcgatgaggattgggttactaacgtttctaaggatgatattctcaaaatgaatattggaggcagtggtggagcaagctgcagagggccaagtcttgatcctgaggccattgtcagtctcctggagggtgcaattgatgaccctaatgccgctgacgtcctgttcatgtccgtaccttccaaggcttccaacactgatcccgtgtccaggaccacacacgacgttcttaactagaagattcaccatcccgtccccgacagagacacagtcatctccggtggagatcctagagttgataatggagaccccgacacttcttcccaagtggatcccgtcagtgttggggctctctgctggagccatgatcttgacgttgtcaaaggtcatgttcttggcgccaatcacgttgatgtgaaagttcttggcatcgattgaggatatgtctctgatctcagcgttcgtcacgaaatcaaaccttatactctgtaaaaatagaacaaaagaaaattacaattgctatattttgtgtggcctaacttagaaacaaatgctaacttaaagaaaaacttacgatgggaagtttcttgcactcgaaagtcttgtgacagttattgaccctccaagctgcgttaccttcaccgtcgaaagttccacctccgttcaacctgaacccatccattctttggaacacgacccatttttcttttccatggatcgagtttccgtcagcgaggacagtgcctagcaaggtgatctcgactggagatttgcatggacccgacatcatgatctcaccaagcttgaactgtccttttgggatcaccaccttcctcggtgtcggagattggcatgccgttgtgaatgctctcagaagcgcctgcataatgcaatgaaaccgtaacgagtaagttaagaaaacatagtcatgatgtacaggctttatagattgcttcgggatcaagaaatgaaaagtaatagaactgacctgcgtaatatcagaacctggagaagacgtaagtctaagcacctcatgagcattggctgaaaatcccagcaaacatatcacgaaaattgtagaaattccaaaatatgaacccattattttattttattttaatttttttcttatgtttttttttttgtttttttttttttgtttgttttctaagatttcaactaaaatatatgctgctttatatagtgccttggatagagagatgttgaagcaccattttcctctccacgtctcgttttttaggttgttcgaacccacaaattaatcgatgccgaactttaaattaattacacgtgttttgtattttattaattacacgtctcgtattttgaacaagtttatttagaagatctttactagaaacgttaacaaaaaagatattatgtacgtgggttatagaattttaaatatcttcttaaaatacaacgaattattatttataagtgttcgaacttatgctttaggatttcttcgtataaattttaaaaacattcttaaatcatatgaaatattacctgaatttttagatttcaatatggaattttaaaaagaaatactacaaattatgcctccgtccttgcgatcacacattggaacacaggctgcccccaccccagacgaaatcgattccacatataagatttttccaaatgatacaaactgaaatcgacacggtccgaaattagtcctatactggatacatatcatcaagataatgactggaaaagaaaatcgtcttgggggacatgtgatgaaaagctcacatcgaaatgagattgaaacattcttcattgccaaaattgttttgagttcgatatattaaaattaaataagcaaatgtagaataagatatataatttttttagttttattacattcttatgcacacacacacatctatatataaaatgtgttggcatcgatcaagcaaacaaaaaaagagaaacaatttttttacagtacagctttttaaaagtctcccttatgtgattttcaaaaaatataagttcctacaagtctcccttagcagctgtcttgggagtgggtccggcgctacaagccttcgggttctgagttcccacaagcttaggggaaacgtttgagcacatgaaagtcggtggaccatcggctcccttgtactcaaggttaatgtttccaatctcaacattcgcacatggatgcgccttgctgcacaatagcttcactgcgtccttgttccctgatgttcctctaatattcttgaagcttatgtccaccagcttaatcgtcgatggtttctggtaattaataaaaaaacaccctttgagaatcagaatcatatattatgaggtaattaagtgacatttaaaacgtccatagtttgccaacattgagttgtagtggacagaattcatatactaacatggcaaatcctcaagaaatatgaaaccatcagaataacatgtctgcttgtcaaaatgaatgataaagatatatatacctgcttgttgcactggttccaagggcagtactcctggtcaatgaggattgggttgctaacgttgttaaggatgatgttctcaaaatgaataccagaggcggtggtggcgcaagccgcagatggccatgtcttgatccttagcccattgtcagttccctgaagggtgcagttcacgacagtaatgcctgtgacatcttgctcatgcacgtaccttccaagactcccgacactgattccgtgtccaggaccgcacataacgttctcgacgtggaggttcttcatcccatccccaacagagatgcagtcatctccggtggctatcttagagttgaggatcttgactccttcacttcttcccaaatggataccgtcagtgttggggctctctgccggagcgatgaccttgacgttatcaaaggtcatgttcttggcgccgagaacgtttatgtggaagttcttagcatctatcgaggatatgtctctaatctcagcattctccacgaaatcaaaccttatactttgcaacaacaaatacaaatacataactcaaaatcttcaatggtttaattttggtttacaaatctgcttaaaggctattaagaacagaaaaacttacgatgggaagtttcttgcactcgaaagtcttgtgacagttattgactctccaagctgcattgccttcaccgtcgaagattccacctccgtttaacttaaagccattaattcttaggaagacgacccatctttccttcccctggatagcttttccatcagctttgagagtaccttggaggttgatctcgactggagctttgcatgggcccgtcatctcgatctcaccaagcttgaactcaccctttgtgatcaccaccttgctcgctgtcggagcttggcatgctgatgtgaatgctttcagaagtgcctgcaatgaaacttcaacgagttagccaaaggttgtgatgtcttgggaaacaagaaatgaaaagtcatagaactaacctgagtaatatcagaacctggagaaccaccaacgttgaacacctcagcattggctgaaaatcccagcaaagatattacgaaaagaactgcagaaattcctaaatatgaacccatttattattatttttatttttattattctattttttatttatttattttttggttttctgaggatttaactaagcatctgctgctctatatagtatcttgaatagagatattttgaagcacaattttctctcaacgtttaaatttttgttgattgccccatttttaaggaagtaggtctatttttgataaattagcgtttcattcttagagaaaagacttgttccactcatgtttataacattcgtataatttttagccgtaatatgttatcgtatatatatatatatatatatatatatatgtacttttccaaatgtatcatttcattccttaaaaactaatgtattaaagcttctgtattggtctaattcaactttctatatttttaagctttaagatgcatacagaaagttgagtttttttatttgaataaactgagtttttttcaactcagcttctgtaaactgagttttttatttgaaaaaatttaacattcattcaaaaaaaaaaaactaatgttgataatgcatgatgttgggtatacattatatcgatcaggctaagatacacacatttttggaaagtgaaccttacttacgaacaaaattaaccatgagtttgttagattgtatttacattgtgtttacatgtaattagtgtgtatttcttatgaacacagtcacacacaacggatttgtactttaccgcaaactgtatatgcagattctagatgcaaatagaaagtatatctatttttgtgcgtatactttgtatgaaatgtgtaactaggaaaagttgaaaggttcattatttaaaaatgtaaacttcagataaatacgaataattatgttttcataaattaatataaaaatttatatatagcatttggatatcattaaaacttagaatagtttggaacgcaatatgtgatcgatcgctgataaaggaatgtccaccaatcagcaagaagatgaaaagagcgtcatcagtgtgacccaaagttaaaagtgtttcaattttaaacaaattcacaataaatagagagattcatgtcgtttttatatcagtgttggttctttcatcatattttttatgttggaacctaacaaagacaatgtcctatacaagtattattcaccaaaacatttaaaaattcttctaacatttgcaaaacaaattctcctatttacaggtgaataattgcaaaacaaattctcctatacaagagatgcctagtgacgcggtgacactgctaccctcgacgtgacacacagatcttttaatttatgatgactctttcgctgaattaatcgttacgaatatttttggagagattaacgtttttgttaggaacttagcacattatgtatgtttcgcttatgtgtatatctctatgtttctgtgcatatcattcataagtgtttggattagtttggttagcgatggatcaatatgaatcatgttaattattagcggtatgaatttggctttatttcaaaactttagcgaatacaattaacttcatgtttattattcctaaactgataataattgtataaattattatggatttgtatttcatgaaaaacatatccttatttatgaaataaaactgaatataaaatggaattgtataaaagcaaaagataggagcatctttttgaccctagtgtatgacaattgagttttagtgagaagtgtttaaaacttgtaactagcttaaatgggtttagtgcatttactattgtggagtttctacaaaaagctaaccaaaatgtgaaacgaagaaatcaataaacacgtttccataaagtagtgtaactttttagggtaactagttgtaggcaagaccgtatgtaagaacaaaacagtaagaactttgtagctttcaagaaaccatcaatcaataagatacctgtataataagaaaccttgagcatctttttgaccctagtgtaagacaattgagttttagtgagaagtgtttaaaacttgtaactagcttaaatgggtttagtgcatttggggactaattattgactaattatttctaaatggtgcaaaaaaaaataaaacttcaaaatttcaatgatattattacttttcgaataattattaaaacattctcgcataaatgcgaatccacacaacaattactacccaattcacgagtcactcttcaggttataaactccaatcctgaatggactccgtcttatctataaaatatccatataatttatatgtcaaaaaaatattgcaaaattttttcatcgcaccctaatcaaagcgtcttcaccagattggatggatttatggtggacaagcgactttaatttatggacccggtttagcaacttcagtgcaagccgctggaaccaactttccgctgagaataggcttgatgttagaacatgccgagacagctggtccctctttgccgttgtggaccaagttgatgtcagagagagcaatattggtgcaaggcactcctttgctgcacattagcttcacagccacctttgttgctgatgtacccttaatgcccttgatagtcacgtctgacaacttcacttgcgatggtaccttcatgtaaattaattggagtgagatttaacaacttgattgatacatatactatcaaacaaaccaaaatatgtattttatgtattagattcgattcggttacataccccagctttgcagtggccataaggacagtactcttggtcgatgagaacgggaaggctaacattgtccattgtgatatcttcgaaaagaatgttggaggcgatgccggggggagatcctggccatgtcttgatgcgaacaccattgtcagtgttcttgatgaggcatttcctcacggtgactccttttactggttgctcattagggtatcttccaagacttccaatggaaattccgtgtcctggtccacattctacgttctcaacaatgagattttcggtaccatctccaatggaaacgcagtcatctccggttttgatctttgccccaattaagttgactccattggaccttccgatgtggataccatcggtgttgagactctccggaggtgcatcaataccaatatccgaaagagtaatgttcttgcagttaaggatgttcatgtggaaaagtttgctgtttgttgatgtaatactattaatctttgagtttgttagaccagtgaatcggatgttctgttacaaaaaaatcataatattcatcaagtcattccatgaaaataataacgtttttagtgtaattatgtaaaattgaatgtgcttacgatagggagagagttgcatttgccagttttggcacaatcattggccttccaagcgagggacccttgaccgtcaaaaatagctttgtttccattcaaagtgaaatcagctatattttcgaaatcaatccatccggcatgtggcttagtggtcttgaccgtagccggagccttgaaattgccattcaattccaaagtgactggacctttgcatggacctttgaactctaggctctctaccatatactcaccttttggcactgtaattgtgctccctgctgcacaagcttctttccatgcagccgcaaatgcctatatatacatgcatgaatcaatgtgaaattctttcttaaacaatacaaaaacgaagtataatataaaatatacaacaaacatttggtacgtaccgcactatcatcagttttgctgtctcctttggctcctgatgctttaacatcaactgctgcgcctggtttggcacctgatactttagcaccaactgatgcagctgcaccgccaactgctgtagctgcattttttgctgtatcttcaactgctgtagctgcattttttgctttatcgacaaccggtgtcccgtttgctattgtggtggccataaccactagtagcacaagaagcactccgcttgctttgtgagaacccaccattttttattctctttttattgattttgttttattagttttttttcttcttttgtttattctcttcttcttttgtttttgtgtttattgatgttttgttctgatgattcgagactccgttttatagaggagcaaagggagatcgaaaaccacaaactcatgccttgctaaaaataattccgaggattgtgcttcaggtagaagaatgaccaaatcatggaggccgataccttttgacttggtatgttttctatttatggacttgataatgtaaacatctcacacaatttggtaatttaaaataaatcagagtttgttgcaaaagagagagtacatattacataatcatttatctaattgggcctatacgtgaagaatggttaatgggcttgggtgtgagatggaacaaatgaataaaaacgtaacccattagacgagacaaaccctaaaccctacggaatggagagcggcgattacgatgttgagacgaaaagagagaagcttaaatcggttctctctcagctccttgctgatccgattctcgccgacgttccgaggaatccaacactttctgatgtcgtcactcttgtcagccttgagaagggaagcgctatgcgtctctccgtcgtcaagctcgacggctcctcccttggtacatatatacttcgtttgggcattatgtcgaacaagtggtgtgcagcattgtaaaattacatgggtttcttacttgtttgcttcctcattgcagatgtggcggtcatgaattcagctactttgaaagatctgaagcttttgatcaagaagaaagttaacgaaatggagcaagcaaacatgggtcatcgccatatttcttggtaaatagcttctctcaagtaacatttatgaatacagtaaaattgtttaatagaggagtttttgggaatatgcaggaagcatgtatggtcaaacttctgtctttcgtgtaataatgagaagttgcttgacgataatgctgttcttcaggatgttggaatccggaacaattctcaggttaaacacctctgtataatccaatctcaattaagagttaattgggttatgattcaactcttttgacatgtatgttgtgtgtcatgaatacaggtgactttcatgccatatgtgatgaagaagggtcgaggaagacactccaagaggaagaagcatcgtctctttcgttctctccacaagacttcttcttgaagcctttttataatttggtaaccaaaaccagtctctcagctttattcacatgttagatagcattggtaggtttgattcgactaaacttaggtatatcactcaacacttgagctaagaaccctgagacatggcaggatatcaaatcattatatacttgtcaagaatgacttggggttttacttaagtattgatcaaatgatttgagacattaggtctgatatgttttcgaaactaagttaagattcccagtgatgaacattttagtaatctggaacggtgataaaatggggctccctcttggattatttccgtggaggttttagaggaaccattgttgaagatacttggcaacttctgagggtctcttcgcaaaatgaaatctgttatttttcttactgttttgttgggattctgaaacattgcactacacgctgatttcacttttttccattcatcattgctacttttgttactatcacaagtggtgaattttgatcaggttggagtggacaaagtcgtctcagcacggatgaaatcaaaactaacagattccgtctgtggtttatcccaccttggaatacaccagcagcacaacacgcagcagcaactacttgtgaattctgtgatagacttgtgggagttggtttatcacaagtagtcagcttaggattgatctttaatagacttgtgggagttggtttagctatatttgtattcatccggttcagtgtataagcagtaaaattattggtggcaatgtgaataacagagcagaaaactgctaatattttcattattaaataaaacaggaaaccgaaaggaatttgagcttcaatacatttttttactttagaaaatgtcttgcagctgaagaaggttttgtagctgagtcccaactattcttgtccagagcgcaatgccgacgtatgcgtgttctcagctattggtaatacaaaggttattactttaacaagttttaaattttgcaaggggcacggtaatatctcaaagtcaacacataaacaatagacatctcttcttaaattgctaacataacatatatgatttgaacatagatgggcctacgaaaatgtctttgctccgatgctaaatcatataatttacagcctaaagtattggtatctagtgtttggaaaaaccaaagtggtgggaaacttgtgcacctcttactaaaatgttattactttttagcttttgaaagaacacacacggcacaactgcccccacccaccatttcttttagtttttacatacttagatctattatctattgattaaaaagtcacttggcatcgatttgatacattaaagtcttggaaattttcgattcaaatctatatgtttgcggtgtgccatcatatcgttaaaatgtagacaaataaatttactgtaataaatgatcaaagtatttagattttttaatgattgacaaaaaaaaaattagaatttttacttataaatctcttgatccaaactcttcatctaactgatgtttacacactaattatgactgaaacccatcaacacaaatagagacatatagagaaaagtctaatatgatctacattacaaacaaacaatgcaactctaattaagaaaaaggccttttgtttttcgaaaataaaaaaaagaactgaactaaaaataaatttgaaagtgtacaaatttataaaacagaaggtaaagaactaaatatagttgtatactattaacgaccaaaagtaataattagattttaaacaacttagattaaaaaaaaaaaaaaaaaagtaaaaggaaagagaggacttttgcatgagttggcaacttcttttttttgtttttattattaaagtcttaagaaaactaattatttaattaaatgttgctctgtcatcatcacactttttattgtttggttttgtattcttcccccattttctttattctcttttgacaaatatgcaatttccaatctcatcctacggtctagatctctccaatcatcatccttcttcttccaatattcactttaaaataaaaataaaatttagagataataatttccacgaaagaattattattattatgtgatgcctattcaacgtaccctcccttttttcctccatcatcttcttcttcttcttcttcttcttctcctctctctctctccatctcgatatcaaaaactcttgcttctgattctcttcattcatggcttcagagaagagtttcaagaagagaaagatcaccgatgatgtagacggagtaggagtaggaggaggactagaatcccttcccgaagatatcatcgccgacatattctctcgcctaccaatctcctccatagctcggcttatgttcgtttgcagatcttggagatctgttttgactcaacacggtcgtctctcttcttcttcttcttccccgacaaagccatgtcttctccttcactgcgattcgccaatacgcaacggtcttcacttcctcgacctatcagaagaagagaaacgcatcaagaccaagaaattcacattaagattcgcatcttccatgccggagtttgacgtggtaggctcttgtaacggtttgctctgtttgtctgattctctctacaacgattcactctacctttacaatccttttactacaaactccttagagcttcccgaatgttccaacaagtaccacgaccaagaacttgtcttcggttttggattccatgagatgacaaaggaatacaaagttttgaagatagtttacttcagaggtagtagtagtaacaataacggtatttacagaggtcgtggtagaatccagtacaagcaatcagaggttcagatcttaaccttgtcatcaaaaacaacagatcaatctttgtcctggagaagcttaggcaaagctccttataagtttgtgaaacgttcatcggaggctttggtcaacgggaggttacattttgtgacaaggcctcgtaggcacgtgccggatcgtaagtttgtatcatttgatcttgaagatgaagagtttaaagagattcctaaaccagactgtggtggtctaaaccggaccaaccatagactagtgaaccttaaagggtgtctttgcgcggtcgtttatggtaactatggaaaattagacatatgggttatgaagacttatggagtcaaagaatcatggggaaaagagtatagcattgggacttacttgccaaaggggctaaagcaaaatctggaccgaccaatgtggatttggaagaacgctgagaatggtaaagtggttcgggttttatgtttgttggagaatggagagatcttgttggagtataagagtagggttcttgtggcatatgatccaaaattgggtaaatttaaagatcttcttttccatgggttgcctaattggtttcacactgttgttcatgctggaacattgtcttggtttgatacaccccttgatttatggtaaaataattaaagttttgaatttttattacatttagagttttgagatttgggtacatcttcttgccccctttacataccaactaagtacattcttttgtacgtaatgggtagattaaggtgtatttcttttcaagttcttgtttcgtttctgttgaatttataggttccttttcatgtcttcggtaaatgtaaatataatttctaagtgttagcggtaaatgtttccggtaatttggttctacactataaactattacttattgtttgggactaacccacgatcgtgccatttgattttattgctttattattgtatgttattatgttttgacatgctcgatcaccaagcaatgcagaaaaaaaaataaaaaaatcttgtagaatattctttagatctatagaattcatataacaagatattagatgacgacgataaagcaaactttaaagatatatcataaaaaaaaaagaggctttcgcaaatcacgcaaatcatatagttttcactaaaaagaaaaatttgtgtattaataactaaacgatcttcgatctaaatattaaacccatgtggaaagattccctatcgcctgaaaataaaatgaaaactctattcatcggaagatctaatcataataatatcttactaaatatataaacatctatataaaacttgaagtatatgcatttttcgtggtctcggaattataacatttttgtacatgatcatgatggcgaacgtaattgggtctataaagttacaatgtgaacgaccagaaataatatcgactgactcgacaactgcaaggccaaatggccgtttattctaggttaccgcgatacctctggagtatactgtatacgttctctctaaattctggcttttttttgggtgaatttaaaatggaatcacttcaccaatatgtacatgggtcaactccaaaactgaagacgacgaagagaagcggaagaccgcaagaatgccaatcaacatcacaaattgtttatcgtcttctctcttctcttccattccacttattttcagaatttatcttcaatattttcaaattacatcaatagagtcatgtagtgaaatagatatgccgtccggcactataatgctaattagcaacaactgttttatttatttttcatgtcatgagtttgactatcttatttcatgaatctataaaacgaattaggttttggtacggtgtcgtgtggacagtaacctaatgcatgttgactaatatgggattaattaatacatgtgtaacgtagaaaatgctttcccaaaaaaactagcatatgactttggaaaggcattgtcaatacttctatagcgtacatgacttcggagtttcgagtctatataggaaataacactagtgagagaatttgttatggaaaaaatcagtgtgtgatgttgagataggagttaaaacaatcaaaagtgacataatctatatagacataatcacgtgattataactttataagcaaaacgggataggttttgcatgtctaggtagcacctattgtttgattggtggcaataaattccatatgttttaaaattgaaacacaaaaaaaggggcagaagcatatgcccttgtttgtctcatgttaggttggatcccaaaatcagaccggataaaaccgggatatatcattaatgcaagtaataatgattgaagacgagattagaggactaattccgtaattacaaacaaatgattttattgacaattcagtgattattaaaaataaaaaacataacaacattagtggtcattgtcgttgtcgtggctcgaggctatcgtctctcctatgcgcgtggaagaaatagcaattatgctttcttttgtatttgattattatccgttagtgaccctcacgatctctttctctctcatataactcggatcaccacatgacttgatcttcttgccgttaccaaaaccaaaatccctaaatttgccctcatttccctctgattagatcccttaccccgacaaagacaccaaaattcttgagggcgagagagctgattgatgtctttggtatctggagccagggacatggggttcgacgacaacaacaacaacaagaacaacaaggatggagatgatgagaactcctcctccagaacaagagccgacgacgatgctcttagtcgacagatgagcgaatcttctctttgtgctaccgaggaggaagaagacgacgattccaaattgcaattgggtcctcagtacactatcaaagaacatctcgagaaggacaaggtttctcctttttgcttcttcttcttcttccttccaccctatttatttgaattacattgtcagatatttgaagaatttgttgtcgttgaatctgggtcatgtaggatgatgagagtctgaggaaatggaaggaacagcttctcggaagtgttgatgtcaccaacattggaggtgtgtttgtgtgtacctctttgtttcaatgattatttatgttttgataataaatgagaaatttttaatcttgggaaatgattttggccatatttgagacccttgttagatcatactagttgtttcgtttgatatatgattcatgtgagagtatttttgatctctggttgggctttgtttaccttcgaatgtatacaattttctttcccatgattccggaatttggtgtctatgtttatttctttgcttgattttccatttttctgagtgctactgtagagatatcaacttaagattggaacatgtgttttttgcatttatgcatttgtcaccttatatctcttttgatacgcagagactcttgatccggaagtgaggattgatagcctcgccatcatatctcctggaagacccgacattgttctcttggttcctgagaatggaaatccaaagggcatgtggtttactttgaaagaagggagcaagtacaacttgaaattcacttttcatgttaacaacaacattgtctctggtcttaggtacaccaatacagtttggaagaccggtgtcaaaggtaaaacaatagaccacaagtttgtttttaattaattggtcctctcgatggttgagagacaatgtgatccaattcctttctttaatggctacagtggacagagctaaggaaatgcttggaacctttagtcctcagttggagccatacaaccacgtgatgccagaagagaccactccttctggcatgtttgctcgaggatcatattctgcaagaactaaggttggttgttggtttatgaacttcataatctagttctgtaatattcagttctttggtgttggttttaaaaagttactcgacaatcttgtttcagtttcttgatgatgataataagtgctacttggagatcaactacagctttgacatccgtaaagaatggcctgcgctttgaaactcggagaatgcgagagttgtctcctgagagaggatgttgtcggtagaagaaagttgtgtttgtttcactccatatctccgtttatttcgttgaacatataattgtgaatcgttttctgatcatcttagaacaagaacgacatttacttcctacatccttgatcttgatttttccagtaatgtcgttggaaatcagtatgtctgtgtttgttctcaactctgtttctccttccacgttaacatgtgtttgatgatatgattgtgtcagattctgacatgtataatgattctcagtccagctgaaagttaaaaaaagaagaaggttttgcttcacagaaaatgcagagcctttctttattcatagattttatatgcctttaaagagaagccaactatttttgaacgcatcttacgacaccaccaagtcttttttgctaattctaaccacttttaacaattttgataaaccgttagttatttttctttaaccgcctcgtgtaaacatgatcaccattcaccaatggggtttgaataaagtgaaacgcgatccttgatacaacgtcgctctcatatggttgtgtgcatttgtatgatttttattgtgttttggttatttaaatttagattatggaattcatggagacttcaaatttgaacttccaatagattccaagtttttgtttttctatgtttatataatgccaagttcttatcatcttatcaacttcttttaagaattctataaactttttgttttggaaaaatagtattgagaagaacagttgacaattcatactacaaaccaaacattgatctataaaaacatgaagatcacaattgatatatgaagaggggtaaaaaatgcaaaaggcaagtgacacctcttggaatgtgaagaaacttgacatttcccatctcagaaatggatcttggttaatgttttgctctcaaaataaacttaaaaaatcctatttatatatacttagaaaaaaaggaaaaaaaaaaaaaaacatcaagagggataaataaaccattgttggactccctcgtttgcactttttggctcatcttctcccaacagttcttttttatttatgtgctcttcccactttctttaagagagttaagtctccgaagtctctggtcaagttctgccatcactgctggttcctgcttcttcctctgctttgatatcgtgttggtagtcattgatccgattttctcaaatgccacctgaaaacatttgttgatcgatagtcaagattacgaaactcgaatatataaactcggttttcagactagggcaggcatggcttaccgttaataattcatccgggtcaaaaagctggtgtgaagttttctgtaatatgttgataacatcgccgacctggtgggtcataagcagctcgttctctttcatctgcaaatgacgagagatccttgagatgagattcatccaagaagaacaattatggaaaaggctgatcagaggaagagaagtaagaaccttgaatattgctaaagctgcatggaatagaaccttcgctccttcatagaaaagtacatcccacacccttagagttgtctgcaaacaaaaccaaagttctcagtatacataagaaaagtaatcttaaaagacatataattggacaaaagggtttgtttttctaaacacctctgaaggaaggcttttagagaagaggcatagaaaccattcagtggctacaagggaaacatcaaagcccatatcttcaagatgagtagctattctgcaaaaacaacaaaacataacaagaaattgataagctggtgaagctcagcgacaagaaccaacgaagaaagagagacttaccgagaacatttttgggcaagcaaatctttgaaaacccgctgctcaacatgacatccagataagttggttgtgtaacaatcacggactaatacgttttccaaaaggaccgctagcatccagaatgcgtcttcttctgtcttcatgacaagtaatagtaacgctgcaacgtagtttagaccctgtaacaaaaaacgacattgattaagatacaaactaatttgaaattgagaaaatggagatgggaaaaaaggacaggcatgtacctgacaatagccaacatctgaatcacgaaaggaatacccaacaagcacacgtcgtagagcagcatgaccttctggagtgtccaaccatggatggcctgggaaagtacgtggcagatcctgcaagaatagacacacaatgtcaagggcaaatgatgagaagatccgaggaagttgcagtataagataatggaatcaacaaatcttgaatgaccatcaatcaaagcagacgaaaggctctgctataagttgcctcaacacaagactcaagaacggatctagaacaatcctaaaacaaagaatcaatgaaaagctaaaattgctccttaaatcacacaaattacttgctcagagacacaatttcaagatccaggggatgaaatcaagtattcatagcacataacattatgaagtagcctcctatgaccatcatacaacacagtagaataagagaaagggttttcaaaagtaggctcttagttgcaaacagagcacaaggatcaacaacagatctacaccaacccttacacaaaggatcaacgaaattcaaccctgaaaatactaagatttgtgaagaacatcaaacccaatcaaaaaggaaaaattgagcctttggattataaatcaaactcacatgatcaatctgcctcgtagccggcgtgaccatcccttcgacggctttggtcaaatcactataataactctctgggacggtggatttcttcttagcagcaccagaaagagaaaaccaaaccttaggtctaagcacaggagggatccctttccgaatcaatctcttcaacgtaatcgcattagtcaaagtggagagcttgagagaagttttcaaagcgataccgtcaccgatcaagagaatctccggctgaagataccaattagctcctttgctagcttcaagagcccaccaaactcgtccttgattcctgactttctctctaacctcgttcaacacattaacgtcgtcgacatttccttccaccgtgaacccgtacaagtcctggaatttaacgacgatgttggctcgtcttgcgtggatgcttggacggagaatcggaatctgagattgtagctccatcgttaaatcacgtctgctttggatcccaaacatcctccgaatttcaaatcccttgtctgaatctctctaattgttgttgttgtcttgtcggaatatttttcgtcaatttcagaccaagcacgaacacggacaccgtcaaaaaagagtactcggctgctacaaaaaaaaaaatgaagtagttgtttgatatctcttgaatttaaataaaaaaggagtttataataaatcttagcaaagttttctgatacctttcaatattataattgtggtcacgttctgcaaacgttatcacctttgaacacctctaatcttcttctcctctacgcagtcaaaaaaaaaattacagcttctgttaaaaaaagagatatttccagaaactaaaagaagctaagaacagatgatttcttttttatgatttctctatctcgtgaacaaatggcactaaagttggaaaaggagaattaaaacaactttaaataaatagaaataaggaaagaaaagaaaaaggaaaataattataactgaaagaaatgcaaaaaattccagaggagcgttgaattgaatctccgcgtctctcggttgtcgaagaagagaaattatgagagttggaatttggaggagatagagattttgattgttgaggaaatgggagagtttatccctaactttagatagagctggggttggattgagagcttttaatttttatggggttattttataatattaatgaaagattgtgattttgaaacgttactatttacaactacgtagagattggataagtaagagagtcattagtgacgcaggtttaactttgaatcattgttatggcagcaagattatgaatttctccttacttttcgttaaatgactattatagccctgaactttgtttgtattgattggctctgtcatttctaaggacaaatgtgtaatttcataaacgatgtgttaaataaagcaatttcttgatgttcatatcagatttaaattgcaagatagagagagaaagagacgatgtaaaataattattaacactggatttattaaattttaaatttcaaattccacaattcgtcggtaataaaacgtgctgaagtgacatatagcatatgtatctaatgtgatgttcatatgataaagacaggtacatttttctacgattaattgtaatatacatattattctatggtttgagaacaatgtatatggtatcccataattgattttattatcagttttgcttcaaagatacgtgagtccacgactccactaaccttgataaactttgagtctctaactctaacctttgtttatccctcccaaatcgttcaaactatacaatatgcatatatgtttttgttactcgaaccatatgcaaagtttaattacgtaccaaacactattggattcatctacgtctagatatatgatcttgttcgttttacttatgagaaattaaaaaaacaaaatatgcattcccaccaaggggacgaaaccagctctctaaggtgggattaagtagtgtcgccggtaagatacaagatgaataaagcgactatattaattagaggataataatattcaaaccgatatctctaaaaattaacgacttttctactactggaccacaatcagctccatattgggccagtgacatttcatatatcttgggccgtcttgttttgttaacatactaatcaatgtaaggaacttcattaacaaggtcgtctcatctgataaactatattataataatttgtctctctccaaataatattggtctataatttttgatatatttaaaaagttgttgcgtgtgtgttgttgccttgttgggtgcattttttgaaattgacccataaaaaataccaaaaatacagatattctccaactaattttcaattattgaataataccaccaaattttaaaataacatgagaatctttcttggaaacgaaactacacaacacagtctctgttttgtaacataatgatccttctgtgttccacttcccgccgtaactaattgtctccaaaatctctcatttcgtctgtttaaaagttgtgatgggaacatggaagaacaaaaacagtaataagaagaacagagttagctacatttcagtcccagctcagatcataaactcagtttcatcatcatctttacacaaatttctcgataataaatcttcaaagaagaacacaagcaagttcttcttcaatctcagaaacccaaagctctgggctttctctctcttcttactttctattttggggatatcattaagactcggtctttgtctttctcatttcggttctggcgatcacgaaagtcaacttcagagttcagattctaatggctcgcccaaatcccatatgggttttgcgtatatccgatcaagcactactcaagttgagatttcaaacgcaaaggatcgatctttagatatgggagtggagaaaaatgaaacctttggtggtcaccaatcacatttgatcatccctaatggaaatggacatgatgataagaattatgacttctggaaacagcctgatggattaggttacaagccttgcttagatttcagcattgaatacagaagagagagtaagaagattcttgtagagaggagaaagtatctgatggtggttgtctctggtgggttgaatcagcagaagattcagattgttgatgcagttgtgattgcgaggattctaggtgctgttcttgttgtcccaatattgcaaatcaatctcatttggggtgacgagaggtatttttgatttcttagagcagaattttagagagtaatggatcatcaaaaatgttcatggttttttgtgttcaacatgtttttatttgcagcgagttttcagatatatttgatttagagcaattcaagagtgttttagcaaatgatgtgaagattgtttcgttgcttcccgcaagtaaagtaatgactagaccatcggaagatggtagtatgccctttaatgcctcccctcaatggatccgttcgcactatccaaagcgtgtaagatcatacaatatcccttgaagcaatttgtgatgaacaacatatgagaaagaatgttcaatggtctttgttgtatcctgcagttcaatagggaaggtgttctgcttttaaggagattggattcaagattgtctaaagacttaccctctgatctccagaagctccgttgtaaggtatatatgtttctaactcggaagctaaacgtgttcgtttttgtttttatcatttgactagaaaatgtgttgcaggtagcatttgaagctctaaagttttcgccacgagttatggaaatggggacgaagcttgcagagaggatgaggagcaaagggccttacattgcgttgcatcttcggatggagaaagatgtgtgggtgagaacaggctgcctttctggtttgagctcaaagtatgatgagattgtgaacattgaaaggattaagcggcctgagctcttaacagccaaatctagtatgacatctaacgagagaaaactcgcgggtctctgtccgttaaatgccaaggaagtaacaaggtaaatgagtgagctaccggtttttcttacaaggtgttgtgtgttgagagagacatcggttctcatttttacttttttgaattcaggctgcttagagctcttggagcaccaagagatgcgaggatctattgggcgggaggggaaccgctcggtggaaaggaagctttgaaaccgttaacaagtgaattcccacatctctacaacaagtacgatattgcgttgcctcttgaactcaaacctttcgcaaaacgagcttcgataatggcagcaatcgactatatagtgtgtaaggagagtgatgtgtttatggcatctcatggagggaacatgggccacgcaattcaggtacacattcttaggtctcagttgtatcaaaggtcaacctctggtgtgcatttacacattcttaaggttggttactaagagatgccataaaattaaactttcaggggcacagggcttatgaaggacacaagaagattataacgccaaacaaaagacatatgctaccatactttgtgaactcatcattgactgaaacagagtttgagaagatgataaagaaattacacagacaatctctaggacagccagaactaaggattagcaaagctggaagagatgttacaaagtaccctgttcctgagtgtatgtgcaatcaatccaacaccactatttagaacttcttcttttttgcacatatggtttaagacaaacaaaactaatctttaatgcaagtataatatgatctgcatactcactttctatgctttatcttgaaactaaacctccttgtaacatgacattttcattgacaagattatcttaggcaaaaaagaataagaagctttctgaccatacccaagagagacgaaaaattcacacaaagagtagcagaaacgtataaaaacgattcatccaatagttatttcaacaaaaagctcaataccactcgaaaaaaaaagaatccaatctttcaccaagagactaagagagatacaaacttaaagcttgtagagctaaaccaatgtaagggaatcagtagccttttccacagtgaatcaaactgcccgcacctagaaaaagcccgaaaattgctgcgctgctgagggtagtttgcccaatgaatctaaccttatgaagccccggaacctgaagaaaatgaaaggaacatatgatcatcaactagtgatcttgacatagatatctattgagattgttttcacaatacgcgtaagagcaatttctactctagatgtctttcttatctaacttaaagcgctaaaacatcaaattgatcatcctctccaactcacaaataccaacacaacaagagctatcataacttcagcgtttcacaagagcaatgataacaagccatatccaagagtgagtgtatatatatgttttcaacaagaaagattttcattttacaagatgactcagaataagcttaccttgactctaatcgcctcgtaagttccatagacagcacctgaacacaacaaaaacaagtcttaatatcatctccataaccaaaacccgtgcccaaattcccaaaatcggatacatttaaaaggcgattagattgtaattctagggtttaggttttttttttccagaatgtaaaggaaatcgaaagcgtacctactgcgccgccaagagcgccgccaacggcaactccggcagtgattttggccaaacagctatttttcgccatcttcttctttttagagacaattcgtttcttgtgtcggagaatagttttttacggttgccctcgccgcttttaaggtttttaactttgaagtttttgcttacgcaatggattgattttgcctttcgctacaaggtcgagccacaacaccgacctgttccttaaccggcctaaccgattcgaaccaaatttctggaaagacgtcattggtttacttacagctttacccaatttactaatttacccacccgactccaccggatcttaacccaactaagccggcactattattttttgttataagtttagcaaaatagacattttaatttcatttggaaaccaacaattatttaaaaaatttacactaatattttaatgtgttagttactttgatatagattttggtttatggtaatttacattataaataataaaagggtcatattcttttaagaatgttgtttatcgaattaaatgaatgttatatggtgtaaagaaaatttagagaaggttagttattggaaaaacatatgtttattcaaagggaagctaattgctcaaaaataaatgtgccggcaaaatccaagtcaagtcaaagcattagcaagttagcagaataagaaggagaagaagaaaagcatgacctcacaactccaaaacatgttctttagtaattagacatctcaagaaaagacgactactctctactcacttgagctaccaatatatcaatcacttgagctacctgcgaccaaaattgattttgattggcgccacaggtcgtcctgatccacactgtcaaaacaaaccccatacgttcatatttgcagaatagcaaaacaaaattggatacttcttaaatactagtattcagacagtaattactcatttacttgctcaaccaaattagcttttatcatgcagtacgtaggcaaagatatcagcatcacatcaagatgatgcaatatagtaagcctccgaatgagttttgtatcactcttaactacgtaatatcagacactaatgttggcaaattcctgactaggtaaaagaaacagcaatcatcaaagataggcattggcttgttaagtatcaagagaagagaattttcttaagcagctttcctattcaatcacgcagaaagcaaaaaataaaaacttgtccaaggcaagagaagctaattgggtagagttttacctttccacatctcaaaaagaagagacgattctcctttgaaagaattgcctctgtgctcttgcaaggaatgcacatgacgtagtcaactgaaattaacagcaattagagaaatcactttaagaaatcaacagaaggatgtttagttgaatcctaatcttgagaggaaatgttacttacggatatatcctcgtaataacgattcaaagtccctctgtgtaaatctccccctaacaaccaacctttgctgatcatcaagtttacccctagtacccagctcagcaagcaagaacgccataacatgatcagggtttcgatgcatcctgaaaaagttttagttccaaatacaaacatgaaaactcactacgttctagtaacaatggttccaaaagtaaaagtaaaaaagtttgaaggggcagagatatggtaatttcttcatacgtcttgcaatagtccataaagttgacaaagactgtcttctttgtgcctttcgctgtctcttcacgaagaacttgtggtggccatataattgtaagaagccaaattccaacaagctccggactattttcacgcaggatattaaagaccctacgaagaatctgtacatataattcccatcagaaaaagaaaaaaaacaagcaggaagaagtatgcattgacttaaggaaagaatgctccaaagcaatatttatataagtcgcacgttctagtaaccaaagagaatcatctaccaactatgcatgcttaatacaagatcctgaagtacaactgtttacttggttttcatttttggttgggtcaaaggatagctgatgtaaaagggcaacaacaacaatcaaaccaaacgaaaaaggaaacaaaatctattgtcttaatttagggaattaatcaaggagtccttgtagacaaaaacaaaatgtcaaaagccaaacttacttcttgctcatcatccttcacttctttcttgttctcattactttcatcagccatgatttactgccaagaaaagcattcagaaaacaaaccaaatactaaaatcaagaatagaatgtgtatgatcatcaacaacaaagattggactctgttacctaaaacatgataagtagtaatttctattccgagtctaaaacatgataaggatttacctttggtaacgaaaccgcaatgcaagattggtcttaacgaggaaaacacaagcgagagaagctatgaagactgcgtttcccaaccctaattttttttctttctcaaaagctttttataattaaaaaaaaaaaaaccataattttttagatttttgccacaatttaattcgtaaaacaaaaacgtaattgacacaaaaagagtctaaatttacacactgacggcaaaaagggatataatttatcgacaaactcacaaaagtatcggcgaagaagagattggattctctgtttcagttccttaagagtttgaggagattctctgtgtataaattgagatggttcctcccataatttataagtataagcgaaggaaagatcggcgacttggtagggacgatgatagttcagtgatgatgactcgtcggagacccgactccgattttatcgaggtaagtgatgagaatcgctcgtttgctttatttaaggaggatgatgaaaaaaatcgtgatttgggtttagttgatgatggttccacaaatttggttcttcaatgtcatgatgatggttgttccctagagaaggataatagcaatagcttggatgatttgttctctgggtttgtttataaaggtgtgaggaggaggaaaagggatgactttggaagtataacaacgagtaatcttgtttctcctcaaattgctgatgatgatgatgatagtgtttctgattcacatattgaaaggcaagaatgcagtgaatttcatgttgaagtaagaagagtttctccatactttcagggatctactgtttcacaacagtccaaagaagggtgtgattctgatagtgtttgttccaaagaaggatgcagcaaagttcaagctaaagtcccacgagtttctccatacttccaggcatcaactatttcacagtgtgattctgacattgtttcttcttctcaaagtggaagaaattatcggaaaggaagcagcaaacgtcaagttaaagtcagaagagtttcgccatatttccaggaatcaactgtttcagaacagccaaaccaagctcctaaaggtttgcgtaactattttaaggttgtgaaagtttcaagatatttccatgctgatggaatccaagtcaatgaatcacaaaaggagaaatcaagaaatgtgaggaaaactcctattgtgagccctgtactctcgctttctcaaaagaccgatgatgtatacctgcgaaaaacgccggataacacatgggtgcctccacgatctccatgtaatctgcttcaagaagatcattggcatgatccatggcgggtgctggtcatatgtatgcttctcaacaaaacatctggtgcacaggtttttcctcatttctatctctttttattccatatctttggtgaacataagtaattagcatttgagaccaattagtttaagtggatgtgtttagtgttgccattgcttgttgcatattttctcagttagttacaggaattagtactcgaaaatcattcttgagggaagtccaaaatttgttaggaagtaagaagttagacctctgtgcgcttgaatctttcaattttaactgttgcagaagaagtagctgcagtttttggtttgataagtaattgattatcaatgatttgaattgcttggtcttgttgaatatggtagaagaaaaggctttgtaaatttattttaaaaggtgattgcagacgcggggagtgatatcagacttgtttggattgtgtactgatgcaaagactgcaacagaagttaaagaagaggagatagagaatctaataaaacctcttggattacaaaagaagagaaccaaaatgattcaacggttgtctctagagtatcttcaagagagctggactcatgtcactcaactgcatggcgttggaaagtatgcagcggatgcgtatgcgatattctgtaacgggaattgggatcgcgtgaagcctaatgatcatatgctaaactattactgggactacctcaggattcggtataaattatgaatgagaaggtacaagtatatatttgtcctaatttgctctgttttttgttgttgtcaatgtgtaaaagttgtaaatgaaaatcttgtcttatactagtttgttatatcatatattggaatgtgttttggtatcatctatggggttttctgtgtttaatattgtcgaacacctaagatggggcatgattgttgataatgaaaagctatgcgactttctcaggttctttttctgtattaaaaattaagttagttctttgttagattaggcaccaactatataataattcaaagaatgacaatgatgaggcaactacttctatgagccaaatccaaaagtaaaaactctttaaaataacgtcaatatttaataatggtaaaaccaaacacaacctaatgcattttattgatttatttgtacagccaatcacaactttagtttctaaattaagagatttttataaggctgtttttgtaaaaaaaagaagtaattaaatgttgtgataattgttttaatgacgtgtcaactacaatatttgcacgaaattgaaaatcacaaaatcgaaaatccacttttttgttttgtttctctctttggccgacaaataaaaaaaaaacaaaaaacacaactaatcataggcttctccatcttcttgtctgcaggatgatgcaatttttcagacaattttcttccaaaatcttttcgtaattctgttttatttttcaacgttttaggtttttaccaatccgccgtagttatatccaacattaatttttttccctcttctcagaaaaaaataaaattcaactcatctctagagtttttaggttcttccaagaaattgaatttggaaggaggctttgatgggtttgaattttccataatcgtcccttgtttacggtatttttctcaaggaatccctgaaaaactatttcttggtctttgtgtaattgtctggtgcaaatcaagttattgtttttatcttgtgttgttgattcagactcttgttgtttgaaaatgctatggctcgtgaggggatgttgttttgattttgggaaagtcttgtttgaatggtcacggcttttctgaacattcgcgtgttctttcttgtctcggctctgcttcgaaatgtctctcggccaagaaaatgttgatcctgttgaagtttcaggtaaaatcctacacaatcctttaataattattatccaccaagtttttaaacttgtaaaggtttcaaatttttgcctttttgttttatagggtcgcatgcttgcttatatgaacttttatgttctgagacacccaaatggactcctcttagggttgaagatttgcaaacatcttcttctggtaattattacttaatgatggagataaacattcttaagatatgttttaagtgttagttggagacaatctcatgtcctgtttgttttgttttagatcccagagatcggttggagaagttgctgaagcaacctgggaataaatattgtgctgactgtggctctcctgaaccaaaatgggtgtaagttgattaatacttctgtgttgtttgtacatttcttttgatgaactggattgattcatttcatttcgttttagatcgttgagtcttggtgtatttatctgcattaagtgttctggtgtacacagaagtcttggagttcatatatcaaaggtactttcttttcatagacaatcttgatttttctctgcttctgtgtgtttctagagtcttttatcgataaatttgattgaatgatgatcgcaggttctatcagtaaagctagacgagtggacagatgatcaggttgacatgcttgtaggttacggtggaaacacggcagtgaacgaaagattcgaagcttgcaacatcgaccagtcaaagaaaccaaaaccagattctactaatgaggaacgaaatgatttcattaggtgacattttttacttaacaatttgttataatggtattgtatgtataatcatcttgtccctaaatctttaaatctttcagaaaaaaatatgagcagcaccagtttatggatccaaaggatggtgctttgtgcacttatcagcagcctagcagaacaaacacttcaccaccgtctttatgttctgcaagccaccgttctacaaaaaaccgtattggtcatgcatttaggaatagctggggaagaagagaatctgatcacaaaggaccaaagaagagcaattccatggtaacaatcactatacatacatacatacatgtttgggtagttactgttgccaacgttagttaatttttgtgggtgttttataggcaggtatggttgagtttgtggggttgattaaggttaacgtggtaaaaggaaccaaccttgcggttcgagacgtgatgaccagcgatccttatgttatccttgctcttggccaacaagtgagctctctaccaaatctctctagacttgtatgatttgaagttaacctcggtctttttcaatgtttgtttgttgtagtcggtaaaaacacgggtgataaagaacaacttgaatcctgtgtggaatgagacgctaatgctttcgatacccgagcccatgcctcctctcaaagtggtaagaacagagagcttttccaaactcggataaacactactactgaaccgagcttgatatgtaaattttttgcagctagtgtacgacaaggatacattctcgacagatgatttcatgggagaggcagagatagacatacaaccattggtgagtgcagcaaaagcatacgagacatcgagcataaaggaaccgatgcagctgggaagttgggtggcgagcaaagagaacacattggtgagtgatggcataatcttacttgaagacgggaaagtgaaacaagacatttcacttaggctacaaaatgttgaaagaggtgttcttgagatccagcttgaatgtcttcctctcactcaatgatgatactttcttcttcatccctcttctttttttttttctttaaaagatttatttctaaatttatagtgaagaaaagatgctgctactttcttgttgttccacctcaaacaaaacctctgtaaaaaaacaacaccatgatttgatttgatgattcttcagaaccaatcctagtttcctctaccggaagatcaaatacaaagaaaagcaatcaatatatcatcaactctctgcattgacagatagattggtattaccgaaacacccttcatcacttccaagttccatcagagcccaaaaacccatatgggggtataatcgtctcgtaaataacacataattaattgtttttaatacgtaagtgtttttttggggtcaaaatacataagaatttatgataattaagtggataataactttttcgttaaaaataattaccgtgttattttttgtttgttgttgttgttacttgttacattaaactataatttatatatgagtatcgaattccaattgcggaagaaaggagaaaataatctccggtttgagctgcgtcgacgagatctatcgtcaggatctcagatttgttgttacactcttgctcaagtctggagacatgagttctccggtacggatattatagcagatctacgaaattggcctgagatcttttacgtttcattagttttgaatttggaaaccgtcgtctctgatcttacgaatcatcttcgtcttacattgtttcagggaacgagtatgttcaccaatttcactaagctctgcaaaggacttgccctggtacttgtggtgggacacctcgtggttcagttcattcccgctaccgtcccataccttgctctgattccggcgaggtacttcgtctcgtctcatctccttttttaatcttctgtcaacacttgggtttacgattttgctactggatggattttgttgtgctcccacatttgcttcgattctgtgtgatctctgcgctaaactaattgctaattcacggttttgaggaaattatgggttctatatgctgttaaattacttaggatgcgaaatttgatgctcgcttggtaaattacgtgattggtcttcgaattacattgaaactattgtgatgctacttgcacattgtcattctctaatatctactttaggctagaactattattaccatgatagttctgacttgttacaattctgaactcgcttcattataggactattccttttgcctggaatctgataacaagcggctattttgaactctcagtatatggggtatgtttctatgtttttcctctagttcaacttgttcctatccaatccagacttttcatctatagtacttgaattcacgagtgactgtttgcaatgttgcaggttgtcttcagcaccgtttctctcctttttatgggaaagttcctggaacctgtctggggttccacggagttccttaagttcatctttgtggtgaacttccttacgtatctctgtgttttcgttacagccattgccttatactacataacgaggctggaagtttacctgtaagtaacctaccaccttacacataccaagtgtctactgcttgtttattttccttctcttacttaagtatgaagggggatgtccccattatgaaaatttcgttgaaatccttgtgattcttttgcttccctgctcgttaagtttaatatttaccactgaatatgataaatcctctctactttgttatatttcattattatccactctataataacgtgttctttgttttctcctggctagatatatgccctttgctggttttcatggtgtcttggcaggccttcttgtagggataaagcagataatacctgaccaggagatattgctgttaaagataaaagcaaaggtaatgttttgctttctagtaagaaatgatagagctttgacattttctcactttaactttttttaatcgaagttctcacatcctattcttacttctggtttatgtgtgcagtggttgccctcaattatgctaattttgtcaatagcctcaagcttcttcacactagattcagcagcatatcttcccactttgatatttggtacatatatgggctggttatacctcaggtacctacagaggagaccagaaacaaagctcagaggtgatccaagtgatgactttgccttctctactttctttcctgaacttctcaggtgaacgacatttctccctttttactgtactttcgagtttgcccacaaatcaattcttgcctcatatgttgttggtaattttgtttttcaaaataaaatgcaggccagtaattgaccccattgccttaatctttcaccggatgctttgtggaagatcaaatgccaccagtgaagaccatgattattctaccagtggtgcaccattgccaggttctgattctgctgaagcatccaggaggaggtaaaaaattattttcttttcctttttctctctttcctgttccacttcaaatcttcaatggtagtttagatgcaacgatcttactaaattccctgctctttaggggttaatgcagttcatgtcttcaaaaattagtatacaccgttttttattggcttgacactgttgaaacataatttaagatctagttgatgcaagagataatgaatgatcctgttcacttgattctaagaataaatagtaatggctcgtcatcagttttaatcaaaatgtaagagttagtcttacgagtgagaaaactagaaaggcaaaaaacttgttataacacaaaagatgttgttgttgcagagaaagaggggcaagagctctagaggagagactaggaacggaaagattggttcctgcaaggaacaaagatgaattgcagagtgatggtttagataacgtataagtggagattgcaataagcattttgaagaagctgttgttggttcttacttgtgttcatgtggacagtttttttttgttttttttttttgttaatgaaattggcgtttatacagaatcagcttcgtaaattcctttgacagctcagaaaggtagtacatttccttggacaaaccaccaattagaaacaattttcttggacgagaggatataaaagtagttatacatgttttcacttgtctctaaacttgttattgaaacagtcgtaactcgtaatggttcactctaagacacaaaaatgtttcttaattgaatgaaaaccaatgaacaaaaatgatataaaaaagaagtcttcataatatacaagagagagggagatgataggtcagaagatggcccataaaagaagggattccattgactagatgtattttgactatatgtttttttttttttttgtgttaagaatactgtatatgaaaatagaaagagagagaaaagaaaaggaaatgacgtcagcattgacaaggtaaccacgtcgcaatgtagcgagtccctccagatgtctggtttggtagtcgctttaggaatcaaacgcggagctccaataacaatggccattaccaaactcttcaatttctctatcgattcttcacacaacaacattcctctttcttcccccctttttttcctcgttttcgatttcctcgtctcgtctcttctttctgttgtcttcttcttcgttttctcacgccattccccccaaaaaaagaaacatctcttttatctctctctctctctctcttcgtcgtccttggcctatactacattgaaatccgataagttctgaaagaaacccaacacagtaaatgcggcttcgcgatctaagctatggaggaacgaatgagaaaaaacatagaatccaacaataaaatgtgagaaaagagacagagaaagaaaggaaaaaaaagtgaaatttggaagaaagaagaagagagaaatgtcggtagcacacgcagatgacgccgacgattacagcagaccaacgggagagagttaccacgccgagaaagcattaccaagcggtgatttctacacaggacaatggcgagacaatctccctcacggtcatggcaaatacctttggaccgatggttgtatgtatgtcggagattggcaccgaggcaaaaccatgggcaaaggtcgttttagttggcctagtggtgccacctacgaaggcgatttcaaaaacggctacatggacggcaaaggtataattaacaaaaattccccaaaatgttgcatctgattttgctaaagttttgatttttattttgttttgactcaggtacttacattgattcctctggagatttatatagaggatcatgggtgatgaatctgagacatgggcaaggaacgaaaagttacgtcaacggagattgctacgatggagaatggagaagaggtttacaagatggacatgggaggtatcaatggaagaacgagaatcattacattggacaatggaagaatggtttgatgaatggtaacgggacgatgatatggagcaacgggaaccgttacgatgggtcttgggaagacggagctcctaaaggcaatggaactttccgatggtcggatgggagtttctacgttggagtttggagtaaagatcctaaagaacagaacgggacttattacccttcgacttcttccgggaattttgattggcaaccacaacaagtgttttatgttgatttgagtgaatgtgtggtttgtacttgtcagagaatcccggttttgccgtctcagaagatgccggtttggtacggtgcttctgagcagagtagtagtgggaacaggacgaagaacagtgagaggccgaggaggagatctgttgatggaagagtaagtaatggtgaaatggaattgaggagtaatggttctggttatcttcaggtagatgataatgctgagagtactagatcatcactagggcctttgagaatacaacctgctaagaaacaaggacaaactatctctaaaggtcataagaattatgaactcatgcttaacttgcagcttggaattaggtaaccgaaactctcagtgtgttatcgatttgtgtttgcttaaattgctctgtttgaatgttgagtgttgtttttgttgggaagacattctgttggaagaccagcaccagctacttctcttgatttgaaggcttcagcttttgatccaaaggagaaactttggacgaagtttccatctgaagggtctaaatacactcctccacaccagtcttgtgagtttaaatggaaggattattgtcctgtggttttcaggttcgaaactccgtacttttgatttcttctcttgtggtattaagaaaaccgatgaaaatgttgtgtttctcgtgtaggactctgcggaaactatttagtgtggacgcagcagattatatgttatcgatttgtgggaatgatgctcttagggagctatcatctccagggaaaagtggaagctttttctacttgaccaacgatgaccgctacatgatcaagactatgaagaaggcagaaaccaaagtaagagctgaattttaactgcaaaattctgcttattaagattcactcatctgttttgtttttcccttgaaaggttcttataaggatgcttccggcttactacaatcatgtcagggcgtgtgaaaacactctagttaccaagttcttcggtcttcattgcgtgaaattaactggcactgcacagaaaaaggtcaatgccttttttgtattcatgtctctgcattgttgtgattagcattttcaattttggatgtactgatgatagaatacttgcgcctgcaggttcgatttgtgataatgggtaatcttttctgtactggtcactccatccataggcggtttgacctcaaaggatcctctcatggccgtcttactactaaaccagagtccgaaatcgatccaaacacgacgcttaaagatcttgatctaaattttgcattccgattgcaaaagaactggttccaagaattctgcaggtgaatgattcactacttgtaataaaactctttgttatatatctcttttcacttctttcattagtaaacccaaattcgagtgtttggtttttaacaggcaagtggacagagactgtgaattccttgaacaagagaggattatggattatagtctcttggttggtcttcactttcgagaagctgctatcaaggactctgccactcctacttccggcgctcgaacccctaccggtaaaatcttgtcaaatctttaactcagttttcaaaacttccaacttaaatcttgatcgaagcaacttcatcatctacaagcaggaaattcagaaactcgtctctcccgagcagaaatggaccggtttcttctcgatgccagcaagtaaagaaccaaaaattcaatgtttatatcgaaaactgtaaagaatgttttataacacaagtgtggttcttgatgatttttgcaggctagcatcaataaaattgggtataaacatgcctgcaagagttgaaagaacagcgagaagaagtgactgtgagaatcagcttgttggggatccaactggtgaattttacgatgtgatagtgtatttcggtattatagacattctccaagactacgacataagcaagaagcttgaacatgcctacaaatcaatgcagtatgatccgacatcgatctcagccgttgatccgaagcaatactcacgacgattcagggatttcatcttcagggtcttcgttgaagacgcttgagagaacaatcatctaacttgcacgccaaggcccaacaaagttgaggtttttctttttgttagaattttttccttctatatagaaatatctgtaaatttattatgttatttaaccagttcaccaaagtagagaaaaattgattcttttgtaactaaagttcaatactctgcacctttttgttgttgttgttgttgttattctttgtacttcgtttcttcaaacgtgaaagaaagtatgtgtacagatacggtgacttgtatttattattcactactttcatccaatcttcatattttactctttagaattaaataatcaaatactatacaacagaacatgtttcaaattgattttttaaaagttggaacaagttgacttgtaggtgataaggatgtgaggtttctggtgctctacaagccaaactcaaagtcaatgctaataattttcttaaaaaatattggagcattagttttatgtaaaaacagagggtttaagtagggttatataaatctataataatgttctagtgagctgtggtttaaggcaaaaagataaaaccatcttacgttggatataagtcaaggcaaatatgtgtattttgcgtaacattgctttgaatagggatgctagagaggaatctcgaataagcatttgaaaaaagttgcagaacttttcgtgtgaaagaggtatccagaaaagctaacctaatgagtttgtttcggtttagatagtgctaaaatatagatgcaattttaattgggaacagtcacgtctagaaacacatgtgaaacaggatccaaactggtagttgtgggcatgtgtctagggttcctgcatatgcttttggctacacgagactttttcagtgtgtatcgcctgattcatttgacaatatgccttctcgcctatgattgctcttatcatacttgttacctcaattactcaaatccattttccgataacaaattaagaaactcaaaataccgactcatatccgttattaccaaaccctttatccgaaatgtacgtagagagatagttttagactatcacctaacgcaacaaagagtatagagtaaaaaagaaagtcacacgcaagatcccattccatgcaacaatctaaaccttctctaacttaacctttgacatcatttaccaattatccatcttgcctcttttttctgttagctctgcctacttttactgtatgttgattcatactacgtaccaaaacaacatgttactttatttttcttcaaaattctcataattttaggttttaacgtaaattatatacaattttgttcatcaaaactgtatcgtcgtaccattttgatggtttcttaataaaatagttatttttgcaaatataatttagctggaaaattggaattctttccgttttagttttaggtcaatattgaattccaccgtaaataatacggaaaaatgatataaaggagaatttggtttctcaccgaaacacattagcactaattttgaccacaatacaattactgaagagagagacaattaaagtaaatgggttgaaaaaaataaaaaaatgggttgaattattttctaattggctacgaattttgggctatctaagactaagaaaacgaaataataagtatgaaaaggtaaaaaaaagattggactggagaaatatctaacaaagttgaagttaaagctttaaccaacataactgcttttacttgagacttatttcagttatttgcagataacctaattcaaaaccaaagtcaatacttacttcttcgtttaggccgagattagctcttccattttaagattttatttatttttataacaaagctcttcatgttttgggagacgaccaaaattgtcaaattgttagccaatcttttcccttcacataagaaataaatttatggatttacctaatacaaacaaaacttttgttattacggtgtttcttatacacatcattgattaattattattaataaataagaatatacattaacatatttaccaaacagtagagtaattaaaataagcctaaaaataataattaaacctagctacaacgtgatttaattgataagcaaacatagtatggaaattgcagagtaagtgacagaagaaactaatagattttcaaaacctcgagacccttaataaataagtccaacggagaaccgatccaaccaacaaaatggtgaactcaatccttaagaaacactatgaggatgtaaatgcggcttggtggaaatctacattatttattaggagaaaaaaaccaaataacaaactaatagtggttcaggcatacaacatgacgtcaaaataaataagaacgtttaacacagcaaaaaaaacaaaacgaccttctgtgtgaaagtttttaatttcgttttaatactaatattttagagatcgttattttgatcttagattcttttgtcaataaagatattgatgcaaaaatttagcttaattattaacttattatacaatttggtgtattgatctagtacaaaagaacccttcattacgtatatatatttgtatttttattttatttttggacaaaatatatttgtatttgttaaagtggctttaatgtacgttcaatttgatcgacttaaataaacttatttatgttaattgtctggaaacgatttgagtaatgaaaatgaggaataataacgaacattttcctctgattttctacaagaaaaaataggtgatattcaactaaatctcttaaatcaaatacttctctgtctctctctcatctctataaatacacgaacttttgcattcttcatgacacatcattcactcatctctttcctcatcattctttctacgtcaaacccaaccttaatctaactttgagagaagtcccactccaacaaaaaaaaatgtatgaaaagatcataatcttatcagtatttctcttaacatttcttccttcttgtttcagcagctacccatttaatcatagagatgatcttttcatgtcttctaatgtttattatgaaaccaatcgacaacatcaacatggtcacaatacacgcaacagtcacttgaaaaatcgccatggttatgctcctagatcttctcctcgatcttttaacgtcaacactttcggtgctaaagccaacgggaacgacgattctaaggtttttatttctctaacattataatccaatatctctaacattataattaaatgaaatctatgtttgagccgtaggccttcatgaaagcttgggaagcagcttgttcgtcaaccggaatagtttacattgtggctccaaagaatagagattacatgcttaaagcggttacgttctctggtccatgtaaatcatccttgattatttttaaggtatggtttaattaaaccactgcaagtattggccgaattattattttttgttataatgtttcttcctcttataactttcattttttgtgagttagatttacggaaggattgaggcatgggaaaatccatcagactacaaggaacgtaggcattggattgtgttcgaaaatgtcaataaccttcgagttgaaggaggtgggcgcatcgacggtaatggacatatttggtggccaaaatcttgcaaaatcaaccctcaacttgtaagttgttcactatattgattaatgtctttaattaaaaaccttaatgaaaataattaaactgactagttattttattaaacagccttgcctgggagctccaacggtgagaatctcaaacgcctaacttgctgttttcgatcttaatttcagttcttataaatagatacttatattaagtaatgaagctataaaaaatgaaattaatgtaatgaaataaatgggcaggcggttacgtttgtggagtgtaataacttgagagtaagtaacattaggttggaaaacgcacagcaaatgcatttgacgtttcaagactgcaaaaacgtgaaggctttgaatcttatggtcacatctccggctgatagtcctaacactgatggcattcacgtttccggaactcagaatatcttaattcaagactctatcgtccgtactggtatattaatcaatgaaccaccttaatataaatgtttttgacattttcatgcaaattagtgaataaattaaatatattttgatacaaaaattaataatggataataaatagtaatgtgttgggtttatttttggtgatgaaggtgatgattgtatatcgatagtgagtgggtcggagaatgtgagagcgacaggcattacatgcgggcctggtcatggaatcaggtctaaccatctctctccctaatttcacctaaactttttgtttttgtcttattttaagcaacatactatgtgcaatcaacattctatatctttgttggattactatcaactaatttttatcaacttcaattggagatttttttttaatatccatcattttttaatgagggacggatattataagatgcatgcatgcccaaaaatcattttgtcatttaaaatattaacgaaaaagataaatgcaatgtttttaaatggtgttaggcgttataacacaagcatatgtgttaactcaatattattgatattttgttgatttacatgtaaaacagtattggaagtttgggagaagataactcagaagcatatgtttcaaatgtggtagtcaacaaagcgactcttataggaaccactaatggtgtgagaatcaagacttggcaggtatattatcaatatcttttgtttataataattattattactatgaaaaggaacaataaaaatatgactataattaatgtatatatatcagggaggacatggaatggcaaagaacatcatattccaagacatcataatgaaaaacgttacaaacccaataatcatcaaccaggactactgcgatcgtgttgaagcatgccccgaacaggtttgaaacaaatcaagacgatgcttagtaataaaataacaaatcttttcaacacaattagagtaataataataacaaaactgagatattggaacacgtggcagaaatccgcggtacaagtgagcaatgtgttgtacaaaaacatacaagggacgagctcaagacccatagctgtgaaatttgtatgcagcaagaacattccatgtcgaggaatatcaatgcaaaacgttaaactggtcgatcaaactcaacaagatgtatccaaagcttcttgctccaatgtgaagttggacacccgaggaaatgtttctcctctttgcacttgatcacttttgatccccaagaaaaaaaaacagtattcaccgatcgattttagtctatttctatatgttttcgttatttggtcgtgatttctgtatatatagaatatcaatatagtccatgtttgaagtgtaggtttttatggagattattcgatatacgaaatgggattgtaaggttataattagggtattgatcttggttagatgtaaaacaaaatttactaatattctgtctcagcttatcatttaccaaactagctttttctcattcatttatgatcacatcacgtccacattaaaataaaacaaaaaagggatcaattatcacaaaaacaattcctctagaaaattattcttttgaggaatatattacaaaaaccagaagtgttggcatctctcaagaagtaaaaaaaaaactcgagagagacacacaactcaacaattacaagtctgttgtataaatggaagatgatatacacttagctgggtgaattcttcctgcaaaatttgggaataaatgtacactcacaagatggtgttgatgtgaagtgctttgaggagagatgttgccatttgcttcaccagaacttggcctcctgaacgttgtccatcacgtcgttcttctatcagattctgcagtttttgtggaagatcgttctctacgatcagctgttttggcttcggatgcttctcgtaaacggcctgtttccagtgatcgccaaaaaccaaacactcagcactcagaacaagacgagtaagaacttggaaaatcaaatgatccattaccttgatgagtttcaggaggttaagtcgagcaatagcatcttggtggtctagtcttgcaatgagtaacggagtcagtccatttaacgctaatgtcttattgattgaagatgatttcctggattcaacaaagagaaggattagctccatactaactaattttgaaaagatagacattctattaaaaagaggagagatgcatacgtgatgatcttcaagaatggctccaaaatgtgcacaaaatgtctctctggacagttctggaaaaagttaactaatttctgaattgcatctttcttgagaaacgcctgctccaccttttggtcaacgtcttgcgccaagcaaacagcaattgaatccaaggctatcacggaccaatattcatcatcgagtaaactcaggtaaacatccagaccgccgtgggcccttaactgctctcttgaattccgagatgcatgagccatatcacaaagtagtggcaatgcatattgtttcagaggagaatccgacatgacgaaaagcatcaggtgcggaatgattccattttcagcagcttgttcctgcctcctcttgtttatcttgcagaggttgaatagtgcactaagtacctacataacattacaattttagaaaccttggtttgggagtaaccgacagacaaaagctatctccatacaagtcaagaaggtaacctcatgatggatctgataaacaagaggcccttccttaagctcaaggttggggatcaattgcttgattgcatctgcacgctgaagattttccaagcaatttggatccgtggataaatgattggtgcattccagtatctggacaaacaaaaggtattgtaagcatacgacctgaagatcctctaaaccacacatccaagcttgtccaaagagtatatgaagcaccgtcagagaagaaaaacaaaaaatatattttgaagtacctttaacagaataggaggttccacacggttgaacatctggaaaagacgactgagtaaactttggctgcacatgtatgattttactgtcgtttcagctcgggcaaattcaagaagcagatcagccactttctccaagtaatccattgagacatctgcactcagcgcatgggcaagtaaaccagatgatgtggtacttccaggtctagcatttaaaacacccgaacctgacagaacaccagatgctgtctgagatgcaatcccacacgtagatgcgactctctcaatagccataaccttcttagtcatcgtcttgctggaatatcttggcgcagtatcaagatttccgttttcctttccacgtccagagacttctgaagtaatcatatgcaacaagcaaaaacatgatcatatatgtgcttacaatatgaacagtcttcctaaatatacaacttaagaaaattacctgcaaattcagccattataaattctaggtctccattggttttcttttcgtctgatgcatacaaaagaggaagtctactttcatgcctctctatgccagcgatatgctttacgtaatccagttgaccagaaatttttcttgaaggaggttctttctccaataagctaagcaaaggtcgaacttgatctggctgagtaacaggaaaaccattagacgcaccctccgccagtttctgaagcttatctgttgatgttctattggcagaaagagatatcctatgttgttgtataacatcctctgtggcatctgctacaacactgcttaatctaggcctatcaccatctgggtgcaaggcatcgggttgatggacatctgaactttgagaatttgaagttaaagcatgagaaggctcttcaccacccccattcctagttttcaacccatcaggatgatcaatcacactaggtgaagtctcacgctgactaaagataggattgttagggtcaagttgaccagagcgtgctcgtggagtttgaccatccaaaatcaatgcatcccccgatatagaagccagtcgagttgcctcactcaagctataaagagtgttgactagcctaagaagaattccattctttgcagcaatacggcaaaaatcatttctcgaggtggattttttgagtttaaatacctgccacatcccatcaatagccaagtgaaccatctccctggacagaaaagctcaaatcagttgaacttagtagcacataaagagcgaaaaggaccagaaatgattcaagagagatgagccaaattaacaaaatggtcaaatattgagaaatgcatcagccattttcaatagtagaaacacacatcacataaattaggcaggacgacaggttcaaaacaaaaccagatgctgctgggactggtaataacctaggaatcactgcgtgggataaattccaagttcttgtgacgaaattcttgatatatcttacattagtttcagcactttatacattaaaagtagtccatacattgtaagaagattgtaaactctacgcacctgtgtttggcatagtctgcttcaagaaatcccaccaaaacgggtattccacggcaagatatgaacatttgcaacgtcaaggggctgtaaagatgctaccattatcaactatatgacttgcagaaaagaaaaaaaaaaaaaaaaaaaagagagaagcaaaattatgtatatttgatgagtcgtgaccttgactgacaaagctgctgcaagaagtaggctgcttccttacgaatttctcgtgatcgatccctctcaaaaccagcaaaactcattaccaaaggaatctgccatgtcacaaggaaataatcaatttttatgggatttttgttatctacttgagacatcatgaaaacttaggtgataatataacaacatcatgggtatattatctacggattttcccaaaaaggtattagctgttgaattggatgtttgacatttaatatagaaatgaagatacgagtctttgtaaaaacaaatatgcagattccaacgaacaactggtgattcataaagtcagcaaccaaatggagagtaggacttacaagaccaacaagacaagcattttccaggaagtcggtattatcttttacaatttcatttatcagctgcagcacggcacatattacctgaaaacaccaaaaatattcacaagcataagccaactactgatgatgaaggacaacaaaaaatcctgcctgattacaactaaaacatactcgagatttaggaatatcgagtagatccattagagggaggaaaccattctgtgtcacaaatactgctttctgcccaggtctctgacgaaacatggcaacaagtttcaaagaggaagttactattgcatcttctgattcatctggccttaaggagctcaccaatctgctgaactcgactgcctataaaaacttaaccaattaattactaagatttaaattcgaacaagaaaatgaaaacaattaaaactgagttgagaagccacggttcctttttcaacatctaattgcaaattttcatcctcagagtatgaagtggctcggtcaagtagcattagcatgatataaaatgacaaaagattgctaaaagttcaggatataaatttacagaatacctgcagaggaaaaagattctccgggggaactttttcatcaaatacctgagaaacaaaatatgaaaatacattaacagtataacacttgaatcaaacctgcatacttaagacagagcataccaagtcatcgatgttaaggacatcatctttcaaaacacccatcattaagcggaaaagatcaccaccatcttgtgagtgccccgtttcaccctccatttgcttctgagcaattctagccctcaatttcgttgccagatcattctttccaccatctgcaacaggagaatcaccctgatttacatttgcagtaggcgtcgatgttgaggcttcatttgtttttccctcaggaactttatccagtggatgaaataaatcatgcaaagaagcatccccaggaggatcactgaatctggtcagttcattcccaccaaaactagatggagtcttcacagcctttaagataataacaagcataacaaatctagttagtttgcaagccacagccccacaaaaaacaaatatatctcactacagaagcttctaaagtgaaataagctaaaaagtatccattacagtacaagctcagcaaactgttttgttttggtcagtaaggaaaaaggaacttatcaattaactcaacagacagagctatcatctaagaaagtgctagggaagcaatgacgtaacgaaacaaaactgacctttctaagcccatcttcacctttttggctaaaactatgtgatgactggatagaatattcttttccaaccagctttgttgctaaagtattccttctaccttcagaagcttccgtttcaagatttccaggtatttcatcacgatcatatttctcatggttctctaatacatcttgagatgtcccctttgcatccgaagaaatactgcaagtaccggattgacgagaagacttatcgtgcatagacaatgtaggaccttgatctgaattgatatcatcttctgaatccgttccttcttcaccaagatcactgggtgaagattgatctttctcagacctaaaactcgccccacctataacaggtaatttgcttttcgagttctggacaaataaaaaaattggatcagtagctttaacaaagttcatctctacctttaatgcattatactactcatctctaaattcgttatcggcatctccaaaagattaattgataacagagataatgatacttacagtttttgtcacctctactttttctgctgaaacgctttcaactacttcttgactaccttcagcatccttctctgaacttgaatcggtttccttcatatatctgcaaaggatgaagtgccaacagacagtattacatgtaagtgcaagcaaggaacacttgtactaaactctaagataagataaataataatatttgaaatattcttccaaaagttaacgtaaagacgcaggttctcgcctgatggttccactatgccgaagcgatgaccgcaatgctcgtctcgagttacgtatccaagggtgagagagaagtgtcttcgcatcaggcctctgcctggaatcctgtaaagtgcaagatacaaatcaaatgtacatatacatcatatattaaataaatcaaaatgcctagtttctggtatagaggtagtagagtgataaacattattgcaccagaatataccttcttgaagcacagtcttaggaagtctgtaatatcaggagaaagactatcaggaataggaggggtatcatcctgaaacaaaaccagaaaaggcaaggagagaagtgatttacaacaaggaagaataagaattgggggaagcaaaagaaaccaaaattcaattgacttaagacaaactcgtaaaatgatgggaaaacctgaacaatgcgatagagggctggcatgggttgcagatcatagtaaggaggtacacaagtcaaaagttcaataatagtgcatccaacactccaaatgtcagaagcagcacaaactcctgacaattcaataacctaaaacaaagtttgggtatccgtcagtacacaaaggagaaaacatacttgtcagaataagaacaaagtccaatttcaaaatttacatatggaattttgacctatacagaatatataatggtaaaagatacatatattttatcaaaggtgtacctcaggagccatccagtaaggagttccgaccactgagtgagtgttaaaatcagcctcgttgagttttgtggcaactccaaaatcagcaagcttaacaaggccctgaagtataatatagtcaagtaatagcctagaagatcttgtgcatcccagaatacaacagattttgaaacggaaaagcgtaccaaagacatgagaataactaataagatccacaaggtacagaaaaacacacctccttggttgtcaaaatatttgcacccttgatatcacgatgtatgacaccctgctcatgaagatatactaaaccttccaagacctgtattcactagttagtacataaatatttttttttaaaacttaactcaactagaaaaagatatatacggacctgtgcaatgtaaacagtcaccaacgactctgggaaaggtccaaatttattaggtttaataatgtttgcaagagagccattctcaacgtacctgcaaacacataattggacttgaaaatccagaccgtagtccagcgtggaccaaaattaaacacaaaagtattacttactccagaataatgtgaaggtgagtctttgtcttcaacgatccgagatacttgacaatgtttttatggttcaagttctgtattgaaatatcatcttagaaggtatagaggaagattgcatcttaaccagcataaacattgtgtaatggtggaagaaagaagctacctttaggagatcgatttcttgctgatgaaattaacaaccaagaagcatcaaaacaaggattcagtcagcatagcagtggtaaggagatgagagatcacatctagtccataaagacagaacaaataacgaagatagatacaaagtaacaaaccattatggtgttaagatcctcttgaccaatgttttccaaagagacttgtttaatggcaacaaagtctccattctccaagtctaatcctatataaactcgaccataagctcctttaccaatttcatctcctagcatctgcgctcaaaagtcataaagaacaaaacttggagtagtgagtccacaaaagatttcaaatttggtagagcaaaagcaaaattagtaagaagaaacccagaattgcggaagaagaaaagctcacgtatttgttgtcgagagtctttgatttgtggaactgggatgacgtcatctgtcgcgccatctctttctcgtcagcaccaaacaaaattgctactcaaggaatttgatccatttttttttacgagggaaaattcacaagaacaaaattaaagaattagggttttaaatcttgagaaaatttgtaaggattcgagatgggtttgaagatcaaatgccagccttaatacagttgtgtaataaattacgacaaaattaatcaaattattttataaaaattaaaagttttttttgggttggggaaattgacgaactgtattagcggaagtcagaatacttttgttcgatttctcaggcgccagtatccttattttattctagggtccttacttttttctttatttacgatttcacccctttatttctaaaactataaaaattcctaaaaagcttttgtggaatacacttaaatttttaaaagtgaaaatgagaagatgaagaaagatatacgataaataacaagagtatatatcatagtatacctacttctttagacatgtcgaaagggaatgctttgttgcttcaaatttagtagatcgaaaatacttgttaatcgcttgagttaccaaagccaaaaaagtgaaagaactatagatttattggtgaattcgatattgtttcgctttattggtgttaattttcatttgttacatagagaatctatgtggatagtatttaatatttactaataccttatcatcaatttagatttggaaaaattattataacgtttttaattggcggatttggtatacattgtttcaaatggcgtaatcagaattatcagataagattttggataattagatgtttataaccaatcaatattgtaactttcataaaaattaatttttttacacaaaaaaaaaaattagataattaatttattaaacaacgattttaatagtttttatatgtaacttattgatcattttctttgtagcataagtttgagtggaaacaaatcatatccagcctccgcgcccaaaaacatatcacacaacagacaacaacactcagctatttacacatttacattgatcatggttaaaaaaaaaaaaaaaaaaaaatcaaattttggatattgatttttttttattttactagaaacacacaaaaaaaaaaaaagacaatttagttctagcctcgataaaaatcaggcatgcccaattgcccatcatgtcagaccaaaataatgtcggataaaaaagcccatcctagaaattgggtaaaatatgaaaagactgtcaagttaaaaaagttatttttcgtttgaccaatccaaaaagaaaaacttgagtctgacgacaagacagtagtagtagtgcgctgttctgttaagtaactgtaaggttagtgtttgacttcgagaaatagtaaatgtgtctgtaaaacctccaaatcgtgaggaaatccagagttccatcagatctaactctcttagatctgattatcatggattactctttccttctaatcattctcttactcacaatctctacttcatgttgtgctgctccttcttcttatgtggaagaacaattgagagacagaatcagtaacttacctggacaacctagtaatgtcgattttagacagtactcaggctatgtcactgtgcatgaagaacgtggaagagctttgttctactggttggtcgagtctccgttggcccgtgacccaaagtctagacctttggttctgtggctcaatggtggccctggttgttcttctgttgcttatggtgctgctgaagaaattggaccttttcgtgttggttctgatggcaagactcttcattccaaactttatgcttggaataaatgtaatatccatctttaactaaatctctcaccatatcttgctcttctcttcacgattccgattcagatttgttctttgtctctttctctcagtggcaaacttgctattcttggagtctccagctggagttggtttctcatattcaaacacaacttcagatctttacacaaccggtgatcagagaacaggttctgctttttgaatatatttgtctgaagtttattacctcaatcaggctatcttgagctttatttaatgtcttgtcttgatgaatctgtagctgaggattcgtacatatttcttgtcaactggtttgagaggtttccacaatacaagcatagggagttttacattgttggagaaagctatgcaggtttcagtttctaccttcaagctctcatcaatgacattaaaatggctgatgtcttagtcttgagtttctctattggacaggtcattttgttcctcaactgtctaaacttgtccatgaaaggaacaagggcttcaagaacccggctataaacctcaaaggttttatggtaaagattgaaacaatttcagactttttacaagtttgtgaactctgggatttttaaaagtctgcttattcaggtgggaaatgctgttacagatgactatcatgattatataggaacatttgaatactggtggaatcacggtctcatatccgattccacgtatcaccaactaaagaccgcgtgctactcagtatcatctcagcatccttcaatgcagtgtatggtggctctgagaaatgccgaattagagcaaggaaatatcgatccatatagcattttcaccaaaccttgcaacagtactgtggcacttaagagattcttaaagggtcgctacgtaagtttcacacatccgaaagaattttcaggttgtttgtttctatgtgctaatatgctgcaactttgtattggtaactcagccatggatgtcaagagcttatgatccttgtacagagagatattcgaatgtgtattttaaccgcttggacgttcagaaggctctccacgcaaatgtcactcgcttatcttacccctggaaagcatgcaggtcagctgaaaacaaagttttatttctggtttagaagtataaaaacttgatcgaaattttgatattttctttgtctcttgcagtgacattgtaggaagctattgggacgattctcctctgtctatgcttcctatatacaaagaattgattactgcaggtctcaaaatatgggtcttcaggtaccaattttgtattgaactttgtgatgttcacttgtagtaaatgaatgtttacagatgcgactagtgtagaagatgtatgtaaagtcttgattacaagtgaagattgcttgatcagtctgcctacattatatgcagtggggatacagatgctgttgttcctataaccgctacccgatactctgtagatgcactgaagctagcaaccatcacgaactggtacccgtggtacgaccatggcaaggtaaagaaacaagagctctctcatgttaatttccatgcataatattcagatattgatttgaggggtattgtacactttgtaggtaggtgggtggagtcaagtttacaaaggacttacattagtgacagtagcaggagctggtcatgaagtgcctctacaccgtccccggcaagcctttattcttttcagatcctttttagagagcaaaccaatgcctatgacttgagataaaaccttgaatggacctcttctccaacttcctgttctttcttcttcatcatcaataaaccaaagtgttttttcattcactgtcttcctcaatcctcagtgcatccaaattcaacagaagactgattagctgtctagtacaaatcataagcaactcttctttcttttttttgtgtaaaatctttctcaaacagtttctctatcttttctccattattgtatgctgcaaagcaaagtctttcaactacgaatcataatactataagatagtttatatagagttcgattccacaactaaacaaaagaccaaaccatgaacgtgtaatacaatgcagactcttgtcatttggttaagagtcactgaaagatctctacaaggtgctgccgtcacttgaagactctttctctttctctcttcgatttcccaagacgtggaacaaccacaggaccaccacgcactctttcaagggcaaaacttatcctcaacggtcgacccaataatccctgtaacagagagaatctcttcagaaaccattcataatgatagcaacacaaattcttttctttttttggttttacctttccatccatggcgtcttttgcagatagagcatcaccttcttctgcaaaatcaacaaaaccaaatcctcttgatctcccacttcctttgtcatacgcaatcctaactgagaacacatttatatttgacacattaaagaatctaaatgaaattgcaactcaagcacttcatgtgagagagtaagagctcttcaacccaaatcctataaactcatattaacacatcctacaaacgattagataaccaaaagtcataaccaaagactcgttcaggcttttcatcgaacacctggaagagtttagaaatgacaaataccttctgcaacctctccaaaggaagagaaagcgtctttgagagattgctcatccacagaccaggacaatcctgcatacttacgggtatcaaaaatcattcattatcatctacatatgtaaatgtgggtactttgttacaatactcttaacctccgatgaatagcttggaactgggcgatgcagaagaagaagtgcaaaattgaggaagaaaatggaagctagaagaaatagagtgttgaggtatcgctgaaactcgtctcactaatagctcaataccatttttcatcatgatcacaaaaacttgtttcttcaaatttaagctttgttttgggtttgaagttttttttatttatataagtgaccaccaaaaaataaggagccaaacaaaaaaaaaacttattttattattgaaatatctttgtggatgaggaaggagtaaccgaaaaggataaatcatttcttcttcttcttcctctgctttcttcctaaagcctactccttttcaatggcgacgttaggctttaacacaaggcgaatccagacaccatcacttccgagaatccctaaaccctcttcttttactaaacccatcaaaacccatcatctcttctcctccgaaactctgttgaaacgctgccgtttcgtctctagatcgttacctgagagctcactgtcgattacaaaagaacaagaggtagctaatgaagtagaagaagatgatccaacttcagagctgagctatctggatcctgaatccgatgcggatagcatcaaagagtgggaattggatttctgctcgaggcctattcttgattccagagggaaaaagatttgggagcttgtggtttgtgatgcttcactctcccttcaagtcactaaatacttccccaataacgtcattaatagtattactctcaaagacgccattgttaccatcactcaagacttgggtgttcctcttcctgagaagattcgcttcttcaggtacaaaagaaggagtattcttgttcttagtaaatagaaatgtaatctaatggtgaagttggtatttgcaggtcacagatgcaaaccattatcacaaaagcttgcaaagagcttgccataaaggcagtgcctagtaaacgggtgagtaacattttttttggtttacatgttttatttctgtgttagaagaacaagttgataaacaaaactaaatctctgcattacagtgtctgtctctgtttctgtggttgcaagaacgttatgacactgtgtacacgcgtcatcccggtttccaaaagggatcattgcctcttctgtctctcgacaatccctttccaatgaatcttccggagaacttgtttggggagaaatgggcatttgttcaattaccttactcagctgttagagaggagatctcagattttgatgagaagtttgtgtttggtgctagcttagacttggatttacttggcattgaagtggatgagaatactctgattcctggtctctctgttgctacttcacgtgccaaacctctagcaggtaactgtccggtttcttgctagaccatcttttggaacaagttagtgtcttgttgttatgtggtttttgatccttagtttatttacctgatcattatagcttggatgaatgggcttgaagtatgttcgattgaagcagacagttccaaaggatgtttgattctatcagttgggatcgctacaaggtatgtctacgcgacctataagaagacccctgtcactactgatgaagctgaagcttgggaatctgcaaagaaaacaagtggaggtttgcattttcttgcaattcaagatgacttagattctgatgactgtgttggcttttggcttcttattgatttgccaccaccccctgtttgatttcccttttgataaatgtttataccatattttgccatttagtaacagatttctgacatgcttgaatttgaacaaattgttacatgagtctgcaaaaactatggacctaggaagtgagtaagttacagggaacgaccaatcgagtcttaacaagatcatagctaccttcaacaccacaagtaatatctacacagtttggcactttccatcttactgataattaccaccagaaagagcttaaatagtataaaatgccccaacaatcaaatcttcttcatggctcgcatgcagaaagttagtgactaaagcgctgctcgatggtccaatcagctccttgacctcttttgcttttgcggtatgaagcggacactgtgcttcccaagttcaaatgtcttgatgcttccatcatctagagaaaccgacaatgtggatgtgtctccagaaacgtctgtcactgttcccttacgcctttaacagtaaatgtattattcattttagacatttagattaatggatgcaataagcaggccaaccacaagagctttattagttaagacgatcaaacttaccatgagttttgagatccatggacttcgactctctttcctattgaatctttacccaactttttcaaaatccagttagcatccatcatctcgtcgttccttgaattatcctgatgagaatgtgttgtagcttcaccgtcttctttcaatgaagccatgtccactaagcttgaaggtctctttctctttgatctttggccctttgcagaactcaatttttcatcttcagactgcgttgtaaccgaagatgtctgatctcctgaattaggtttcctgagtttaaatttcagcagaggtcttgcttctttctgtaatgctggtgagatggatgttttgtcatccacatgatttccttcacttgttgatgcagcagggaactgagtgactgacccaaatgtagctttacttccttcagattgagttttcccaaaccttccagagatcttcagggttcttacttccccagtctgatcaactttatcccctacagaaatacatcattagcagaaagttaaaaaaaactatagacttgtatatgttcaagagttttgtccagttaataagcatatgtaaaaagtctttaagtattctatgtggttgtgtattataaaaaagatcgcaacataccacccaaagtggactgatctttgtctctcgataaatgagaaacaacattggacttcgaagaaccactgacatttattttcctagcacccagattaataaccaacttctttgcctttacagatttttcctcccctgcattccttagggtatcctcgctatcagaatcatgaggcttgctacactttattctcactatccttgacggcttttcttcatcagtcaccataacatcatcaaccctcttgtgttttacaatcttaggttcatgtgttgagcaaattccagctacagaagaattaacgtccgattgttcgtttatctgaaaacccacattatcaattctaacaccacctagtcggcgtctctcagatccaatctcctgatgaacttcaggctccaacttagtgtgactaccttttttactagcatgctttttacttgaagagtgtttcccatactccttgcttttctttggggatttttccaccaaacctttaatcgaaaacttcagtgagcgcccagatacgggtccattttcttcatcatctgaaaatggaaatatcgaaaatatttcctcctctgttggcaaaccagcagcagcccttaaactagcaatcaactctttgtccaccacatcttttttcttccaaagttcttgaactgcatcctgaagatccttcacctgagaagccaaagatagaatttgagaaccaggaaaacttatatgatcaacacactagcaaattgtactattgaaccctctttccattccaaaggaaaaccccctgctcgacgagcaatacgtatatgacaataagaaccaagaagaatgatctgagtgactgagaagcgagggtactaataacagggtaacaggaacaggcatacctgataacactccccacggcatgtggcacatttatattgtagctttccatcaacttgaaactgcatatatttgtcatcactgcatgacagtttaaagaggcaaacaatttcagatttactataactcaaatacattatgcgatgcatacttaaaatatgactcaatctaattggtagtatatatcagatggcagatgcaacagagataactatgtttacaacaaaataatgaggacgaaccttattccatcacaatggcaatgcacccagcgttgacaaatatcgcagcataccattggggttgattccgaatccctatacacctatacaagataagcaaaacctggttaatgcaacactaaagaggcgttatgttttgctacggggatcaagcattaaaaaataaaggccatgataatgctattgctaagacttattttgcttaatataccttcaagcatacagggcaataatttcccttaacaaacaatctgccacaagcatcacagcaagtatatgataaaaaccacctgttacagtagaaaacaagaaagaacaaaagtgatcaacagacttttaatagggcaatctatctgcaaattcttaactagcaaaacaaagtataattgttctgctcacttgtaagaccaacctaccccgcaagagactaagaatgtatacctgacactcaggccatttccagggacagtagaatcacagctgtggcatcttgtatgctttgggcagagatatggcccagaactaacattctgtacggtcaggataaaataaataagccaattcactttactttaaaagatagtcacatgaagaggctatctgtcaggtaccttgtgtggaggatgttggcaataacaatggtaagcagcatcacaccttttgcagaacatgaacttgttaggatctcctgttctacggcagacctaaggagggtaaaagactcggtgaggcaggttcaaagatctaaggacactctatataacagttaggctaacacttttatatatgtttcattacttaagacaacttgtttcgttagtttaaaaaaaaacatatgttttatcaatcacttttcgaaaaattggcagtgctcagatgcaacagatatcacaaagaagaaaatgagaaactagaaagaaactacctcacaaacccggcaagagggacaactccatgaactccaatgaaataaatctgcaacttacatcaattagacccaaaacacagactttagcaagcgaagaaaaggacagcagcaaatagaatgtaaagtacctctatgttgagcccaagactttaaacaattcttgtggtacttctttccacagtctttacaagaaagcatcctccttgctctatcacttccttcaccttctcctaggaagcacattctgcacattatattcatgccggagtggcctaattcttcaccagcatgatcgtttgaggtaagctgtacaacaaacaaacaacaacaaaaaactcaatcaaagcgaagtcaatacagaaaaaaattaatatcatcttcataaaaaaaaaaactcacgtcattgacaccagattcaaacctccgagcataatcctcagcagcttcgacagtaacagcagcttgtctctgaagagcaacacgtttcttctgagcagaagcttcctccgccaattcatcaacaccagaaccaatagcaccatctccaacccccaaaatcgaaaccgtctgaggagcaggaacaaccttaggaaccctaacttgaacggtacctccaataaaaacattagaagaaacagcaggatccttgagaaactcctccactcgaataacctctttcaaaaacttatgtttcgcattggctccacggagatcccgagaaaaccctaaggagcaatggcaaatccgacgactacaacaaaagagagtcgattaaacagagaagaagataatagtgaagcgttaaaggaatagatagatagagataccatgtaattggacaagctacgtgaaaggccatcccatatatcctcaccccaacaaaaattattcctctcgcctccaaacggaaaaaaaaaaaaaaaaatcgagattttgatttttagagatcgcttctttctcttttttttttttatatttaatataataatataaggatcggtaatgttaataactctattagtattaatgaattaatcagtagtttctttgtgtagtagaaaaagggtcgtctcttttggtgagctctgtgagttttggtttggacgcagagataaggtgcttttctcatctcaaccttaatcaacgatgtttttaagatgcagccaaagaaaccgagtgcgtgttgcttcttccaatcaaaagcttccacgtcacatcacaattgtgttcttcactatacaatattggaatttttggatagacagctgttgcatttttaacccaaaactttcctaagtattttaccaaataatcatatatatatagaagagaaaaatctgtagagcaataaaaacttagaaatccaaaatctttgacttggtaaatttgttattgtctaaaaacaccgatggtgacattgtaacaatattttttacgaaatatgccatcacacagttttgcttatttgtgcacaacagaaaatttaatatgcaatttatctatttaatgatctaatgactacaaatgatcttgatttttttgccaaacataaatctccccgaaacgttagagtagccaagtcttcctttacgataataacaccaaatctaaaagaagacgagagggagaaactcaagtaagaatttgaattatagtatcaagaacctttctcgaccagccccactaaaacgagagagaagatgatcgaaaaacatttgttctccaaactggttttgggccaactttctatgatttaaaattgggctcaaaacttttatcaatgaaaggtaaaatgatacatttgggctccaaactagttttaggccagctttctatgaggtaaagtcccatacaaattattattttttgttgttggggttgattattcaatgtagacatcaatgtacaaactacccaactacaaagcatctttactttaaactcaactactctctcttatttaactaaaactactaaattaattgattagtatatcatagcttacaaaacatgtttttaggttttatattcccgagcaaaacacttgtctaatctagtgtgtgttattatggttacaacttacaacgagttaatctgatcaaaaataagagaaggcaagtgaaagctagacataaccattcgtaattaataattgcaacatggagcaatcgcggccgcatgggggcaaatgtatcgagtggataacataaatagatagaaaacgccaaggaccctacacaacacgtaatttagtgatgtgtttattctattattcagctgatagccacatgcattcgctgactataacaagcctatagtcataatattgcacatgcctctgattttgtatagatagagatattcatttaaaatgccaattattattggaaccagccaaaggcagaattgccaacgccttctcttcctccataattacctttgcatctgccgcaattcccgttattacgatcaacaaaaaaagagccaacaatctgatgatatcttgtgcaattcttatacgatcttgtcaagcataaacaatatgaaaaagaatctgattttgaatgtgcaattaactttatgccaaagtaaatgatactttaataactcggtaatcgttattaataatatacgtgtgttttatagatgctgccgcctgccgcctatatgtgacttggttgttcattaccgatgttttgagatttataaactaagttagtggtatattttgtgtttttttacatgttagaccagttcttttttaaaacgcttatatgatgaggtagagtatatttactataatgtagtagtttaatattgaagtcttgagaatatttgctctgtttagttagcacatcgataatttttgacatcagccatatctctacgcatactaagtatcatttccaagatagtttaccatcaaagacgacaaaattcccactagctttgttatgaggaaacaataactctatgtatatgcatgcatgaaaacatttttagatttatgtagtaaaatttcaatatctctacagtaacaagcatatatcaataacactaaccaaggaaaactcattctctaattatctcctctcatctttgatcttctcaatattgtctcatttagctaactttagttcctctcaatttctcttattaccatacaaaatttactaattactgtacaaaaattaccaaataaaaggccacaaatatcttaggaagaaatgaagcaaggcacaagtgccaatacgagattagagagcatgaattaaggagaaaagtcggtttcggttcagtaagacagacagacaaaatccatcgttggggtccagtcacattacctctttctacgtgatttcctctctctccactcgcttttaatcctttcacttgtataaagtcgtagcatctcgagatcgtcttcctctcacaatctcaaattcttcggaccttttctctctcccctgaagctcccctcactcactcttctccgaggaagaacaacagagacaatggcggttcccaaagccattattctacctatcttgctactcatctgtggtgctgctctcggagctcctgcttctgaaggtaaatcgcgcgcacacacacacacactcactgtctatggtttgcactggtttgctctgttttgcttttgacaagttttcgattctggaagatgggtcttctctacttgtgattctaaagcaagatttggtgtttttggaagaaaaagattcaatcttagtctctagatctaagatttatctctctgtttacttcttcaggttatcttcgtaatggaaacttcgaagagtcaccaaagaaaaccgacatgaagaaaacagttctactaggcaaaaacgccttgcccgaatgggaaaccaccggtttcgtcgagtacatcgccggcggtcctcagccaggaggcatgtacttcccagtggctcatggagtccacgccgtgaggctcggaaacgaagctacaatctctcagaagttagaagtgaagccaggttctctctacgcactcacgtttggtgcgtcgagaacttgtgcacaagacgaagttcttagagtctctgtaccttctcagtccggtgacttgccacttcaaacactttacaacagtttcggaggtgacgtgtacgcttgggccttcgtcgccaagacttctcaagttactgtgactttccacaatcctggagttcaagaagatcctgcttgtggtcctttgttggacgctgtcgccattaaagagcttgttcatccaatctacaccagaggtaattattggaagctttggtttggttctggttcaatttcctagggttttagtttccggtttaaccgaactcaattaaaataccatggttcagttttgcttttggtttagattcggttcgattttagataaatatttgaaaaatcatacatattatatacacgacgatattgttaatcctatagaaataattcgtatgtaatgaattgtccaattttggttcaatcctgtttttggttcactttggttcggtttggtataatgcttattaccagtcccggttttatctgttgaagaatttggtttcataattcgatttttctgacatgtagggaacttggtgaagaatggagggttcgaagaaggtcctcaccgtctagtgaactccacacaaggagtcctactcccacctaaacaagaagatctcacatcacctttacctggttggatcatagagtcactcaaggcagtgaaattcatagactctaagtactttaatgtcccctttggacatgctgcgatcgagctagttgcaggcaaagaaagtgccattgcacaagtcattagaacctctcctggtcaaacttacaccctctccttcgtcgttggagatgctaagaatgactgccatggttccatgatggttgaagcttttgcagccagagatacactcaaagtaccacacacttccgttggtggaggtcatgtcaagaccgcgagtttcaagttcaaggcggttgaggcaagaactagaattactttcttcagtggtttttaccataccaagaagactgatactgtatctttatgtggtcctgtcattgacgagattgtggtttctcatgtcgcttagattaagtttactctttatgacaactgcacttgtgttcttagactggtcatggacttggtgccttgctttgtatgtcttggctccttttggaattgagttattgtcatcaagttaaaatgaatgatatattattgtaatatgaaatgttttgagttaaacgaataccaagaagtataatctaggacattccaaaaagtgcaaggaaattaatacctataaagtataattatttgttaatcacaagttgaaaatttgaattaaagtgtaaattttggattcattaaaaacagtcttaagatttgaagtacatagttgaaaaactttagaaaacacttttagaagtgaaacttattaaaatacatagaaattgagtaagaacaaatctaatggttcaattaattaaaatctgagcctaattttggctcttaactaaggaaataactgtggtcagattttctttagtaaaaggataagatccagcttttttttcttacattttttttaaccaacaccaaatcgacacttggacaccggatatctttgaaccatctagtctagctgaaacatactcatacagaatattctatttgggtagaaaagccagtgagggcagagggctccatattttaatgacttaaaaatatgcattatttatgtgaaactgataatatgataacggtctctcgaacaaaatgttgaaaaacaaacacaagaaccataaacaaaaacgaagaaggaagaagagatgcaactcgttataaataaactaagtcctaggaagatgaagaggatgatcgtccacgcaagaacctccacggtccagttcctgtcgccatcctgcataaattcaaacactcagtcaaatactgcttctactatagtgggctatagtaaaggcccaatttaaatacctggcaattccagtaatagcccggagagccatatagattgtaagagctatccatattcctatgaaaccattggtctttgccatatatattactgctgcaatgcttatggccgccactcccacctgatttatcataattggattacaagaaaaaaagatagacaaagtttaagtcatttcaaaaaaaaaaaaaggaattttaatcatttcatagtatatatagtgtgcataccatggagtatgcagtgtaagcaaaatcagatgctccaaaattgactccatccaatacaaaggcgagagagtttattggctgcgttgctgctataaactgcataaatatatataacctcttctcattagtaaaattcttttaaaatgatttttatactatagtaattattatttgattattagttaccggtattccgatggccatgaggtgaataacagcagggtccttggagaaaactccggcaccaaagtagagacctagtccaacaaaaacggacagtccaagtcctaacacaaaacccatctgcgtatcaaattcatttctgttttagttacacaattattttatttttaaagaaaggtttggtaatgtgatttttggaccgaacctgtagaacacgggatgcaacagcagtcactttgttatagtccttctcagcaaacgaacaagccagaatcgcctgcaacgtattgaatgatcattttctacatacaacttgatcaaccatataaactatacataaattaatacaacgagaaaacatgattacctgaccagcaacggcaagaccatcattgagaagagaagaagttaaccatacttgtaaacaaatctgaaaagcagccattggtgttgtacccagccgcgccgccattgctgctgctaaggtctgacaaaacgtcactgctatggtcctcgccagcaatagtagccctttcatttttaatactatacttgttagacatatatccacatttctcattttcttaactatatatttcaaaatattcaatattttaaatatagaccttatttgattgaattctattattatatagataaattttttgttaatttatttttggactctgtgcattagctcctacgacggatcttgtttttaaaaaaaaatattattgcaagaaccacaacttttaataaatatgcatccatacgtaccatttttaaggaaccttccaaactgcaaatccccgaagtttggtggaatcaaattaactttctttgcgaggaagacgaacaatattagagtcatgaagtaccttcacgtacacaaacaaatcatttgtttttgtttgaggttatgacttcacaagtctatttatagctgtagaaaaacaagagtgcgcctagcgattttgttcaataatgatcacttttgcatgtgtggaatttttttagtgatttctcttactgagaaatgacatgggcaatggctgcaccgatgatccctagacgaagcacaaaaatgaagatggggtcgagaactatgttgataacatctgctacgactgtttcacgcattaaggcaaaatattataagaagtaaggagagtgatcattaaagatgatctaagttaacaacttaattaccagtggcaaagagaggagttttggtgtccttgaatccacgaaagatgccttgcatagcaagagatagaagcaatgcaggagcccccaaagctcgtatgctcaagtacttgtgtgctggtgataacattggtgaattctgttatccaaattcaactcaaattagtcaaaacattttatgctatagatcccaacaaaatatgtatatttctgaaaacttactggtttcactcccatgacgcctagaagcaactttgaactgaaaatcaagaaaatagcttgcacaaggccaaggattaaccccaagatcatagctgttgatgctgttctaatggtcctcttctcctttttattcgatttgtttccgctatttgactttgtatccggagctaagtttaatacaaccaaaaaaacaacaaattgaaacaaaagagatcgagagaagaaaccaacagtaaaaaaacaatcgaaactttaataaaagttatcaatgtcgagtgagatatgcggaatttacctggaggttgctgtggctggttggtatcgttacttgtaggtgaagaaatgcccttttccaaagaatcttgaacaagtatagtttctgcatgaacaagattggctttgtttgcttcttctttcatcttctccatcgtgtcttcctctgccacaaatgaagttgtgaggctcacaagtgggaatatcgtaattctagaagcttgattgaatatggcaatggaaactccaaccgccgctagctgaaccgctcctaaacgcccgacaaaagcggtatcaatcagagaagcgattggatcagcagctaaagccaaagctgctggaaacgcgatgcctagaatctctcgcccagttgtgtccctactgaatacatgtctgcaattttacataaataaactaatgttatgcatcacttctttcaaaaatttcatcaccatttcatgaatacataaacacacaccttaaatctttgaagataacgagaaatgggattggcttcttcaccgtagcaagatcatcaccagtttccgtcatagatctttttcctctgtaactgtctctgtaattaatttgttgtgtctgaagatatcaataagtgtttcgaagaatcggggaagcaaaaggaacgtttatagtagatgctatgtacaaacgtgtttttatttatagacacgtaatgagcatgcatatctttgcttatttaatatctaaatcaataaaagaaattattttctataattattgaagaaaacaaaggtttccttccctaacttttttgctgctctttatttccgtccaaacttaagacaccaatattatggaatttctcttctcattgagggaaaataggtacgcataaacatcgtaatatatatacttctattaagtaaatcccacactagaagtttttggcttgcccttgttgattattttaacttctatgatttctttaatcaataggaaaatatggttttcgtgaacttttactcgtgaaagataaagagtcttctatttttatattgagtaaataagttttcttttcatgaaagttttcttacatgtattcatcatagtgggaaagagtttattttcatataaacttctcatttttctttgatattttccactaaaaaagtgaatcattttgcgtaattggaattc

SEQ ID NO: 1280 - DNA, 90721 bp, Arabidopsis thaliana
gaattcctcagcatcaacgcaagcaaagcagacttccttccatgtctttgcactgtttgctttccttgcagcatcaacagcaccttggaactgttgcaacttcacaagtgtgacggctaacttgccccagtttgatatgaacgcatagattatttttgcagcctcatagagagcttcgtcatacagacgatcaccaacatgttgtagattagcaacgtttggcatcagaatgaattcttcaatctcacctaaccgatcaatctttgcatatgcatagatgagctcactatcaaccttgggttccttcaccttctgtctaaccatcagaaggtatttgaccaagtcatcatagacatcagtatcttcagagacacgtatgacctccaagaaatgagtggcatcatcagcacggataaaggactcaattgcatcactgactagtccttccctgagttgcgccttagcgacttggctccaaacagaatcttcttcgacccggaatgcaaactcaactgcacgctcaatgctcctgacattatccagcaatacattgacagcctgaacatttaagttgaacttcttgaagatagcaaatgcttcctcatataattgggcttcaactgcgacttctccaactgcaggtccatcaaagttgtccagcctgttgatgtaatccataactctagacggatctgccttaatagctgtcaatataagcagattttgcagattgaagtttccactgaaggcagaattttgtagaacaatcttttcaagaagctcaataagctcgtgcggcaaatcagcagtcatgaatgctttaacagctgcagaaacttgctctgggctcttgctttcaggtaaagcagtagacacaacttggtcaataagctgtcttctataatcattgttttcatcgagaaccttatcccacagatcaccatccatcctctccactacatacctacaattgaaaacttgtgtattaacaaactacaaagtcaccattgtgagagtaacaagaattttcgtaagtaatgataaaatacctggcttgtaacttaaacaaagagtttttgttagtgacattgatgagttcctcgtcacattgtcctcttctgtatgccacaactgctagggtaggatcacgtttctcgcagtacttacccacaaccttagagtcgtagtaagggttggtggtcaggaaatgctcagggttgttgttactgtctatgataattttacccaaggcattatggacatgcacatcttggcttccctcactaactaaatgctccaagaactgagtgaggagacggagtcgatttctgaaaaagcagaaacatattagagtttccagaactaaacagacataattatgaacgcaaaccaggatgaccaaaaggattcacctcttctcacattcctcgacaagtggttcaacaggaagcaatgaacgaacagagagaatgaggccttttataaaatcttcagggcattcatcatcaagcaactgcccgacaactaagggagcattcccagggttcacctttgacagaatcaaacgtataaatatttcataaaaaaaaactgaactccaacgcattaaaagtagtcccaggaaaccttataccttctgcacgtagccttcaatgtaacgaagcatgttgtttgtgtagaggtaatgagtaagatcaggcacaaagctgaaacgatcacagacatttatcaaaggtcgtgcatcaggcagcttagcttccatcaaaaagttcttcgtcttttcagcatcatagaagttagactctctagttacacgctcaacctcctttatttgaccagtcttggcagctgcttcaatgtacttgaaatggatctcaggatcctcactatcgcacagagagaaacattgtaaacataagcatataaatacaagaatcgtgcttgtttacagaaacgagatcagattttatctatatcacctcatactcaaatatgaacctaggaaaaagtatagcccttcatatgacttgaactgctcaaagagcttaatacatgcatcaacaccaagttgctcacagtactccttgcaagcctgaaattgtatggacaccgttagtgtcaaaataaccaataagattcatcatatcatacaccacttgcctgaacaattatctgcagattgcctctcaggttgaccagcaacagatccttcatgcactccatagcccactcgctagaaagagtgccaaaaaactcaacaagagcctgcatatggagcagagtgttatgcaacaacttgaccacttagtaggtttaacaaccaaaatatatttcagaggcactacctgtggctcgatagcatgtgtgtttacaattacacgttttatatcaggtaactctgagtaatgctgcacaaatcaaaaggaaaagaagttggaaggtgagaagatgataaatctatttggccggtaaaaatggtaaaaaacatgtaccaaccttcaaggattggatataaagtccagccttttcacaaagttgagcaatgcgaggccggtcatagtgggtgaacatcccatttgctaataccgcatcagccacattaggaaaagttaccaaatttatctccagaacctgtgttgaaaaatgatttaaacagtctggggaaagaaggtgagtagagaaaaaaacggagagatacaaggtggcaactattttcaaccttagtttgcagaaaagcatgctcaggtaaatttggctttagcacatccagaaggaaagaagtcgcttcacggatcagatttctctgaatatgcacaaatagacaaataagcacatgataatttacatctactgtatacaattctgtatataggagtagaacaagtaatgagctacaaatattggtgcatacagaatatattgacctacctgaagaaaaagatcagtgatggtgttgtagtcaactggagaacctccttccatttgagacatcattaatgcaaaatttactgctccctgcaaataaaaattaaaagactattgatattaatacggtgggaaaaagattcttcattctatataacatcaggtcaaattattcaacaagttagttgattcataactcttccagtgcttacgccacatatattcagtaaagtcctttcatagtttagtatgttgcaagtatcaagagtgcaccacactaacctgaggatctgtacggagtatggtttgcagaagaaacaggtaatcaggtgtgtacccaacctgaagtcacaatatgaaacaatggtaattcatgagacaacagaactttagggtaaaaataatagaagaggttatactatagatcttattgcttacctgctttgagtaaatcagtattttgtcaaactcccttctttctgcaaaagctgctacaacttttggagtcgcccgagctttgatgtatattttcagagcgagatcattatccacagtctggaacagaaaggtttatcgtcacaacacaccataggagacatatcacacattttgaataaaatcgtccatttcaagattaccttcacaaggtctccaagttcttcactgcattctagtttatcctctgccaaccagttttccaggaggttcttcttgttttggttcacaaccagccgagatagttccagtgactcatatgaattgagtttccctctagtcaaaagagtcccaaaatactgtaacaatggaggagtttgtccagcttgtacaggaacactctgcaaaattatagagttgaaaaattggtgttaccaacatttcatcataaataaacatgtttacacatagttgcttggatatgaaatagacacctggaatttggccactgtatcaggtgtccttagaattccttgaggagattcagcagcaagctcagcagcctccttgtactttgtttgagcgaacaactcctggaaccgctggacaacctacaacatccgagcagaatatgagaaacttcacaataccaaatgacattttttttcttcaagctgccatttaacaactatataattacttcaccgagacaacagatccatgataaacatcgcataccagattttctgcacctgggaggtttcctcttttagcaagattgacagcaagctccaaattgttcaactgtgatacaaaagcatagatttcttagcatgacatgatgaaaagggtaggttataacgggaaaatagcataaaagattagcatacttggccactaataaaaggtataatggtagcctcgtttactgtagccaaaagaacttgtcctcgcctattaatggcatagaaacccccaactgaggaagcttcagaagtcaagaaaattgggtctggactaatccgatttctgtagatagcagaagcagtctctagatcgtacacaaacaacaggccaagtttggtgataacatatatcaagttaaatttgtgagagacctgtcaggaaaatgagaaattagtgccagaaattgtcactaactacttacacatataactgaaattctaatgcaatagcaaacctgcatggcaacaggaaaatcatcagcaaaatcagggggaaaaaagagatctgcttgtttttttgtaaatgatggttttcctgcaaaaaaatcgccaacctttaaagatcagatgaatacaacctagaaaacgtaaccaattatattaaataacagtgaagatatagttttgcgtcggggagctaaccaggttgggcaccaagctcaatgacatgcaactttgatgttatctgcccagcattaaagctcttgcttgcaaatgatataagaatagaaggattctcattcccaggaacctaatattaatagtgttgcaagtcaaactacagttcaagattagaccatagatgaactcaccaaagaacaaagacgttaccttaaactgcgcaaacgatgcagcatgtgcctcaagggcctgactccgctgttgatccacagagaaaagctgcatatttccttttaccaattgttgtctctacagaaaacagataataatgacaagatcagtcaagaatctacaacatgaaagcagttttgatgtctttttttgacctaatatgtggcgcagtaaacttacctcaggagagccaggagcaattccaattaaaaccaaccacttctcattaggagagcacttatagtttataatttgattgttggccaaattggctgttctatcaaacatcttaactggctcagaatcacctataaaacccgaaggaaaattagaaacgaaaacacaagatatgaagaaaatgacagtaggctgaaatatacaaccttcaattgaccaatgatagacggaattctgtgtgaccagccccaacatctttggtgtaatccacttccaaaagacaacctgtaaaaacatgaaacattattatccaaaaaaaaacccgactgaaaaattcagagttatacgaagtgtatagcaggaacgataatggagttcaaatatatttgcatcaacactcacctgctcaggcatctgatgtgatttcaactttgctttggcttcaatgttaaatatctgtagatgatcctgagtagttcctggaacttgagctacataaatattgaagtaaaaagtgaacatcaagataagtggattatgaactacgaattcgaggaaaccgttatgggttttagatcaaaggaaaaaatcaagtacctttcaaggcaaggatcttcgagtttgggttcataagagcagagtctgcagtaataggcctcctaagaggctgcatcggcatattcatatctataattacaacactgttttgcggtgacgtctctcgtacacagatatacttgtcagactccatagtaacatttgtaaacgtgatgaattgctgattgatcccgatgctcggaagctggaaaaatcaagatgaagcgttacgtcaaatagttcatttatttagttatgagatccgagtacataagcacattgctacagacaacaacttgaaattcggcattgatatattaacgaaacacagatctgagcatagttagagaaatctgatcagaaacatgcattcccaaacaagcgatccggaaaaactagagagtaacacaacgatcgagcagaattcagatcagtaggaaactggaatcaatcaatcaagagactgaacagagcttaatcgtagaaaatcacggtcgattccaggagatacacatctaaatattcaaagataagagtgaagagtaaggagaactcaccgtcaggacctccttcatcgtgatgggggcgttggcagccgccatgtttgacctcagatcacagcaagagtaaatccggggacggaatcaaatatacggctgagaagtcctgaccgccaatggccaggagatagaaccgagacgagagaaagactggagaagaaatgaaatcgctgccagatctgaagcaagtgaacgagaaaggtgatggaaagagaaagaaaattgagaaaagaagaataacaaatatatatgggtaagtaatgacgaacagcgatccaattagagtcttacatttataaccaggtccggcccatatcggtccttactgggctctaagcatccgaatttctaatgagacgacacgtgaaatattttaattggtgcttttaaatgaaggtaccttaggtgaaacaacaataaatgacttaataattaagatttgatccaagaaaaaaacttaataattaagaatggaagaagtgtcatgacttttaataattttttttaaaaaacttaataattaaagatttgatacaagaaaaaaaaaacttaataattaagaatggaagaagtgtcatgacttaataattagaaacaaaacttaattaatctgatccaaaagaagaaggaatattatgtcatagagtatcactgatgattgcaggttgcaattgtatgttgcatcaagtcatccgtcttggttccattcagttttctgtgatgaaagagtcatttcccctggttgaattggttttttttttgttatatggctctgttgttttgtataggttattgttgttattagcttatagtggcttagtgtgtggagatttgtttctccctgtgtaattgcttctgttctttgtgttggtacatgtttccaatctatcaattcaaatccagttgagaaagattaagaaaaaaaatggaagaaaatctcccaatttttatacataataaaatgagatgaattgataatcaattagatttagttagtaaagtttaattttaccgatgagatctcagacgaccaaaacacgaaaataaaataaaaagaaagatctcagaatcgcgtctttcttcttcttcttcgtcttcttcctccgaaacttttttttgtttttcaaagtggtggagctaaccatgaaatcgactcaccatcacagagctccactaatatctgcttcttcctcatcttcatcttcttcccaaaaccattcattcgtctctaggctcctccttctccttactctacttccagtttcccttgcttgtctcgcctttatcctccaatggcgaggcggtggtctcgccgatcctgcctctgcttctgttcgttcctctacgtcggttcctggcggctccgatctcaatcacgaggtctttcccggcatggagactgtttcatctgtctccccaaagtctcaccaatcctcctccgactgctcaaatctagctcgcagctcttctccttcttttccttactatgctgattggaagtttggtgttgatactagcttaaagcctaaggttactactttcaattcccctgatttcaagtctttggatcgatctacacttccaaattccttttttttttcttaaatcttactacaatgtctaatctgaaatatcaagttgttctttttttattggattatagagatttgagaaataccaaagttcattttttgatcagatctgtctttgtaaagtcacctcactttttgtgctccatgttgtatatgattcttgacattgttactgtttacagatatgtatcacgactagcacatcagctggattggatcagattctaccatggatgttctaccataaggttctaggcgtctcaacattcttccttttcgttgaagggaaagctgctactccgagtatttctaaagtgctcgagtctattcctgtgagttgaactacctctcttcgcgtccactgtttattttgttttggctgtatatctctagctctttagtcctgtaggtataaatttgtatttaaggtatgcagttttcgataaatgtagtcccatgtctcttgcagggtgttaaagtaatatacaggacgaaagagcttgaggagaagcaagcgaagaggttagttagttatcccattgcatatttgcgacaaagctatagctcttcaaggcactaaacacatgttttgttgtatattctgaaattgtagcattgttttgttgtattttctactactgatcattttactgtcattcttttttgttttgtttcatcagccggatttggaatgagacctggctttcgtctttcttttataagccctgcaattatgagttatttgtcaaacaatctctcaacatggaaatggctattgtcatggctagggtaagtatttcttttagaccttatttggttcagttttgactcatgtctcatgttacattctcatttttcttgttcttactaaatatcaggatgcgggcatggattggatacttcatcttgacactgatgagctgatatacccagcaggtgctcgtgagtactcactaagacggttgctgcttgatgttcctccaaatgtggatatggttatatttccaaattacgtgagtgatatctcattcacacttcttgcattgcttattttcagctagttttgtgagtctaaagtttcttttatgatctggcctttgctatgaataatgcttttggattttgttgtttaggaaagcagcgtagaaagagatgatatcaaggatccttttacagaggtataattcagtttattactgtctttacgtaagagagtaggtttattaatatttgtttgttatgttagtattacttctgagatatgtgtggtgcaagcaggtgtcaatgttcaagaagaattatgatcatcttccaaaagatacatattttggaatgtacaaagaagcaacacgaaataatccaaattactttttgacttatggtaacggcaaatcagttgctcgggttcaagatcaccttcgtccaaatggagcacacagatggcataattacatgaaaactcccaagtatgtctatcatatattcaaacataactaaattttctattggttgaggaacatgataggactttgttgttactctaatatagaaccatgtaactatcttaaaggagttagcagtggagtggagttccggttaacagcgtagttaattttttctgtttgtgaagccaatttttttttggaaatactaacctgatgattcttgctagtgagatcaaattggaggaggctgctgtcctacactacacatattcaaaattttctgacttaacatccaggcgtgatcgatgtggctgtaagcctacaaaagaagacgtgaaaagatgctttatgttggactttgacagatctgtgagcatcttttcttaaaatctctaaaagtccttagtcatttcttaaaatctctatatttcacttcctcttacccttttatgatgctgtatggatcaacattgtaggcatttataattgcgtcaacagcaactgacgaagaaatgctaagctggtaagagccttagcatcgttcttggttacttgtgaaatagataacttctgacactctttgaacaagtttggtcctattgtgattacaaaaatatctggtcttgatcaaaaagtaatctaccctgtgtaggtaccgtgaacacgttgtgtggggtgacaaagacgtgaagacgaaactccttaggaagggtattctgactcgcatctattcaccaatggtaagaacatactctgcaattcattatacaaaattccaaacacaagtcctggaatgttgagttcttgcaagtcaattgtaaaatattatatacatttgtggtaaaatgcaggttgttatacaagcattgaaagaatctggtgtcttcagctcggttgtctcatcagcttctacaaatctgtcaaagaaaaagttcttatcatcaattcacaaaagcaactcatccaggtctactgcatctgagtcccttccatcaaaggaaagcaagtctgagggcatctctgcaaggcaccttcttgaggctgaatcagccatccctcctttatcgccacctgggatggaacaagctagattttttacagaggattaacaggttttagcacggagctgatgcattcgcttttactgatattgatactggttgcaatatgagtgctgtgtagctttaggatggcaaatgaagtggaacaaagaagagtgaagaaagcggctttgtgtgattcttcctaatcatattgaaaagtcatcgattctcttgtctcattttgctctccctctgcaacttatgatagatgagtttgcagcatttttctgttgtcattgttacttctatgtaagtttattactatgtacagaacttcaaagcacagagccttggactcatttttctacttacatcgatcgccttataactacaccactactgtcatggcctcttcatgggcaagagtaataccaaccttattaattcaagtttaatacaaatcgattaacatgcacctaaccggtaatgactcaacacgtatgttatcatgaggatgacacaatctaggattccaaaaaaaggtatgaagaaagagtcaatggtccataaacgaagatttggcaccaaaaagcggagactcctcaagttatatataaaaagcagagtaagaaggaggttttgatgtgatgattgttgtctgagagagagagaagaagaagatgaacgatgcggatgtgtcaaagcagatacagcagatggtccggttcatccggcaagaagcagaagagaaagcaaacgagatctccatctccgccgaggaggaattcaacatagaaagacttcagcttctcgagtctgccaagcgtaagctccgtcaagactatgaccgcaagctcaagcaggttgatatccgcaagcgaatgtcagccatctcccctccccttccttcatctatctccttctccttttgctatggcttttaattcattccatatatgtttctcttcagcgactactccacacaactgaatgcaagtaggattaagtaccttcaagctcaagatgacgttgtcactgccatgaaagactccgcagctaaggatcttctccgtgtctccaacgacaagaacaattacaagaagcttcttaagagtctcatcattgaggtttgtatatatgtttatcatttctcccctcaatatccacacgtccttaccattgtataacattactacagagtttgctgcgcctgaaagagccatcagtgctgctgagatgcagagaaatggacaagaaggttgttgaatcggtcattgaagatgctaaaagacagtacgcggaaaaagccaaagtcgggtctcctaagatcaccatcgacgaaaaggtcttcctccctccacctcctaatccgaagctccctgattcccacgaccctcactggtatacttctttccaatgtttttaaaaccgacccagacagtgaaccggattaccttctgggtcaaccgggttgaaccacggaccaattgattaaaatttatttaataaatttaatattaatagagattttatagtgtttataaatagaaaacaaaataatcatatcatgtttaatagaaaacaaaataatcatatcatgtttaataaaaaaatataaaatcatattatgtttgataaaatataaaatcatttacaccaaaaaaacatatatatatatatatatcaaacaataataagaaagtgattaaaaattttaaattcaactaaatgtctaacatcgtaataaatataatagaagatcaccaatgatagaaacaaactaatgaaacatcgtgaattcaaacaactaatctcgtttccatatatcaccattcgattcatttttaaggccgcattgtgaaaacttcaccaaaatctaaaacatcaaatgagtttaagaactaaaaaaacttataaaaataattgaagaaagtttaaaatcccacattttattccaaaatgaagagaattttgtaaaacccacatccggccggttcaaccggttcaccgggtcatgggttaatagcgagttttttgggttttttcggttttgaatttgtcgggttttagcactaaactcaaaccggaaaagtgttcgggtcacaagttaaccggtcggaccgggtggttcgggtcgggcgtgaaaacactgcttctttctcaatctttctcctctctctcgtttttttcaccatatatatatgaacaatggttttgtctgaatggtgaagctcgggtggggtggtgctggcctctcaagacggcaagattgtctgcgagaacactttagacgcacgccttgacgtcgccttcagacagaagcttccccaggttcggtcttttcgattaggaatgtttttcttttctcttcattcccaatctctcccattaactcttcttctcatctctgcagatccggacgcgcctcgttggagctcctgaaacctccagagcatgatcccagcaccccaagtttaaaatattttgccaagggctcaataagtgacacattttggccttgtcacactctcaaggattgttacttttttagtagagatcaactgttttttgtttgtcgcatccttttcaaatttacaatattgtcaagagagaataattgctgaaaaaaatgatacataaaaactgcagagaagctattgagttatgccctttttaactcaatttcctctaaaatatttttgagtaatcgcaatgcaatacttgcaagatttttcataagatatagaatactcaagaaccaccccattttgttgagaatgcatatgatatttacatgttctaagctacctaaaacatagactctggtcggctcctaacggtttttctctccaaccttgacttggatttgcggttagcattccgcagcttcccttctgtaggtcctccaccaaatatcgaaatcctcccaatccctttggaaagtgaggtcagcaatgttccaccatgacctgacttctccatcatcccctgtttcatcaaaatctgctccttctccaactcagtcagcctcactctcacccttgaaatctccagcttcagctctctattctccctcctcagtgaggcataagtgtctctcggagacacagctcggctcgggttctcgctactatgtttctgagaagacagcaatagcccttcccctgactctccggacattacattcttcatacgcagctgttctgagtagaggactcggaccaccatctgcatcggcagccgatcgttctgagccacatggttgcatgcttcttgtgaaagtttctgagtgtctatgaatttgcagagactcttacattcttgttcgttcagcgacggatgcccctaaccagagacacaaagaacattgacactctatcaatacaaaatgttgcaaaaacagagacacagcctccatattaagggatagaagaacaactttacctttagaaacatatcaatggctctgtatagcccatcatccatgacacgtgcgtaatcaggcaatatctctatcaaagccatgaacttgtgaagactcagacacgggtctggtgcaatctctgccaagtatgcatccatgatccgacccactttcagcaatgaactgtggcacatagaaccagtaagattctcggtctcgttctcgtaacagcaatcttcatcatattcttcttcctcctctattttcttcagaaagcagacgagtattctatggacagtgtctacatcgtacatggaatctccgtctcggacaacaggtatgagtagatcatcgagggagactgtttccagctgctgagcgattctccgctcgagctcgagcctgcaagagatggctacgtttatggtaatcccgaccctcaacattccaaagaggaaactcagagggacattgtcatttgggaaaagactaacaatggcttcaaggacgttcctctgttcattctcaaaagtacccgaatcgagcttggttcgctccttgcagtttcgaatacctttcaacgattcttgagcgtaatgcatcaaagacgttatgatactctctgaccgcaagcctgttctagccatcgcagagacaactcgtgcgtaatagtcaatcctcagagcagagaggtcttcaatccaccactcaggactatctcctcgcttgagttcccctgactcggtgcctcggttcagccgtgacagccctaacactaactgttctctgcaagcattcacagcgatagcctccacacatctatcaggaatgtgagcagtttcagcaatgtcttgaggataaagcgtctcacaggaacagaggacttccacagacttctcaagactgcgaaacgcgacttgctcgaggtaagtctcggtccgcgcaatcaaattctcttctttgaagtcctctgtcatctcaagataaccagctgcgcaacggatagcaaccacgttggagatagtgatctcgaagttgatgccgtagcagaacttcatggcgagttcaaacgtcttagacccacctggaaagtctcggagctctgtatgcgagagatttgaagatgattctttcatctctgccaccattttcctaatctttccacaccgagccactaaaggaaactgcaaaataattcaaacatcgtaaattgaaattccgtcgaacactttgtgtgggcaaaaaaaaaaaacagatcactaaccttgtggagtaaaaaggactctccatcaacaacaattgtgatgtctcccgcaacatctgagaatatgctgcaatttatatatggtaaaaacgaatcctttatgcatcggataagtaagaaatctatacgtgattgcataaaaggaacaaactttgacatgtttgaacgaaagagagacagagaacagaccgagtggcaaaggagctggagaagatggaaggagcaggggcagaggaagacgagtgagattgagcattgtccgatataatacccattgtgaccttgagtatgaatttgaggaggagcctttcagaaacatataggctttgaacactttccttttcttgctcggattttttaaaaactctctaatagactttataatgcactttcaatttcgtaatcttgactccaaaaaaaaaaagaagagatgctttttttggtgatgtatgattcagagcacgtgagaaaagccgagagggggttgtgtgtggcacggagctccataaagactcaattatagtctcttgggggcacactttcactttactaattgaggtctctattacaacctccactctcagtttctatctaatctctcttttatactaaccaaccacctatgaaccctactttgtcaccactacttttgctctattttgtttcaccaaacaattgacatggtgatttgagatgtgaaatccttgtcggatcaaaatccttccaatagcagcagacaaatggcaaaatgacagatccttttaaatatctctagatccttaatcactaatacatcactattttaatttatttcaaagctttcagaaacaccttttgttaactcaaatatctgtttggtgtcttcttattggaagttttcttgatttctatcaatgttcataattccaaactgatgtgcaactctatgactctgttccacaaaaataattcagagatgggtgatgctaaagggcgatttgcatagtagatttttcactctcattttccatgttttatgcatgttaaccgagctctatgcattcgctctctcattactactgatatagacataggtgcaatatgagggatatgaagagtgaaatattgacatgcaatatataagtgatattctcaacaatgagtttgcaacatttctttcatcattgttgctacagtttaagttcactacttcgtacaaaacttctaagttacacaggtttggatgcgtgcatttttttaacttatagcctgaactagattgtagatactacctaagataacgaaatcaatattgcaagttgattaagactataaataacatggtaatcagataaaaaagaagaatttatttcataaatccaaaattctttaaaatcgaagagtctaacaaactctctcaaacatgaattattccataagtaaaaaaagttggcgtcagaacgatataaaatttggtttagggcacatgcctccctaagtcttaagcaaaaaaaatttcatcaacatctcagtttattgcgggccttaaaaccgcaattaaaatcgaaaaaaggaggaagaagcaatgcttaggcacctcctgatccgtacttcttaccgaagacaatcagctgcaatttgtcgtaaccggaaagcacaccagcacctgcaacagcacgcagaatgttggcaccagctcccttgaagagtgacttggctccttcattcttgaggatctgcttgaaggcgtccaaagaactcttgtacttgacagcttcaccagacgtcatcatcattcttctgcggacagtgtcaatggggtaggatgcaagacccgcaccattggtaataacccatccaagagcgaaactagcgaagaaactgtcctgaaataaccaaaagagaacgaccacaacatgtcaatatcaaccaatgataggcaagagagcacacagatcagagagaaagacaacaagacatacctgtaagtcaccagtgaggagaacaggcttcacagagtcatagagtccaaagtacagaccacggtagacaatgataccaacacatgagatgttgaatccacggtacagaccagcaataccatcagtcttaagtgtctttctgtagacatcaacaagaccatcaaactgtcttccaccacctcctttctttgcagccttggcatcattagctagacgggtacgggcatagtcaagggagtacacaaacagaagggaagaggcaccagctgctcctccagatgccaagttaccagcaaaccacttccagtaaccatctctgtccttcttaaagttgaaaagtcttttgaagtaatctttgaaggcaaagttcaaggcctacaatagacaaaaaagaaggttagcagaaaattatgttttttcaaaagctataacaagaaagagtatgaaactcaacaaacctgagtggggaaataacggataacattggcagtgtttcctctccatagagaaccaaaaccttcatccttaatcgtcctgccgaaacagtcaccaatacccttgtagggttcagaaagcctgccagctttaatcatctcatcctggttctggatcaaaagcttaacacgttcaataggagcagcagcagtcttggagacggcagcagaaacaccacccatcagaaagtcaagggcaaagttagtgaaccccttctctcctggggtttggacaaacacgggagaagcagttgttgccaacatccgggatgtcggaggaaattgaaatgcagcattggagtagtttccgtaggttgcatgtctttgatacatagaaggcctctggtaacccacttgaacgtccttggaaacacttgaacgcatgaactgcccggcagctttctgcgcaatagtggggtgctgaacttgatcaaccattttgaactctgcaaaatcacataatcattgatgagaaaccagacgtgaataacatactacaaaccagccaaggaaattcagagaattcttatccaacacaagacatggtcgtatcacagaacgctatccaaccaaacaaaccaagtttattggaaaacagtgaaccatgaaccaagatctaccatgtcatattataacgcaaagatcatataaatttaagaacagcaacttaaatcaggattacaacaataacaacttccaataatgaagcctcgacatcagatcggatacattttaaactaaagtcaacagatccaaacgattttgatcactagaagattatcagatcaacgaaacgcacaaaaagaagcagatctatgaaaccgatacatcagatattcgacaatgagcacaaaacattccgatcggactttaagcaaagcagataacataatctatcaatataacaatcagatctacagatcgaaacgtctcatttaccttacagatctaaaaaacacagatcgaagaaacgaatataacaatgatttgaagaacgacgagattataaagaatcacagatctgagagaaacgagtcatacctaagaatcgatggatgagcaaaataactggagagagactccgcctttatctcacaggaaatgagagggcgaagcagagaagagagacgaagttttctctgtggtgaagaggcgagctttgaaaagagcgattgtttgcccttttatcgtctcgaaaaatagggtcacagagtctcggtcgtcactcgccagtggggacgagttattatctgctgcaaaaaaactatttgggccttgcaatttaatatccgttggatcttactgatttaaccctaagaacttgttaaccgttggttatgtttactttgtgaaagaattgttattctttctgatggtacgactttacttgctaaccgttagatcttgccctaggaatctggaccgttatttggtaacgttgagggcaaatagtgaatggacggctggaagggtagcgtggaaaattattttgtcgaccataccgaaccagatcaatttgcaaatatcttatgccaaaattattattatgaaaggaaataaattgaagtgttcaattttattttaaatgccagatttttacaactttgtttattttcttctatatgaatatgatatttgtgaatatacaaaaaaaaaaaaagtaataataaactgatctagtatttttcacaaatagtgatatttttctaaatcaacttggttacaaagataatttttctatatgctacgtttcttttcaactttctctattgttctcccatgtgttacgaatgttcagcaactgcccttaaagtctcatacctttaactttacatgaaaggtttcttttatttaattcgtttagttatttggagaacattttttaatgaagttatgttttggcgaaatagataaatcaaatttagtctgtgaattgaacaacatcgtgagagggccggcgagtatacagtatggctcccaaaaaatcacgagccttattagagagcggtgaaaatagtaacttaaaagagaatcagagtctatagaggctcaggtgggacttttaaaaagaactacaacaacaagaatcatcacttctcgacgacttcgatcagacttgtctcatagtcactcggggccacaaatccatggaggttcatcactgtcgcagctacatttgcaagcccaggtgtctcgatatcctgtctaaacctaactcctgctgacaagccaggacctcctatggcaattggcacctgcacacacacatcatgtccaaatttcatataagatacaccaaccacttctggtattacaacccctcatgcttaatctatgctcagttgcaatggtcataacacgaactgttttagtagtgctagaacttactggtttaagggtgtgagaggtaagaatctgaaggttcccttccttatcgagagcaggcttgccggatttgtcccttttaaccatgtcctcagcatttccgtgatctgcagtcacaacgtatatccctccgacctgttctatggcatcaaggattgtctgcaaaccaggacaccaaaactaagtgagtcattgctactaagaacggtttctaacattcccatgtcacaaatttattgaaatcataccctcacagcacgatcagcagcttcacaggcaacaacagttgcttcaatatcaccagtatgccccaccatatctccatttggcaggtttacacgcacctgaaaatccattggcaccaaactcagaagccaattgttttaatgggttgatacaatgtgataagagaatacaccttacctggtcaaacttgccactaaggatagcatcccttgctttctcggcaatttccagtgctttcatctttggctggacattgaatgatattccactatcacttggaatctcaacgtactcttctaacttttcattgaaatatccagagcggttgccattccagaagaaggttacatggccaaacttcacagtctcactgtttcagtgaaataaaattttaataggttaatagctgagaattcattcattatatgtaactaaccatcaacggtataatctcatcaagaaaaagtgagctaggagatttcactagttttaatcaacaaacaacccccaatcataaattagacctctaccgagcaagtaaagaagactggattactcttatcacagtttcaattatgaatccaattccagcaaataaataaaccaggaagcagcaatagaagaaaatggcaaagacaataactaaagatttgagagattctaaaagttaacctgcaagcaaaagtacgaacgccattgtgtgccagatattcaccagaagttctgtcaatcaatggtggagaaacaagatagcggctaggaagcttaagctctccatcatattggagcattcctgcataacgtatatcagggacacgtacgcgatcaaacttgtcgaaatctttgtattcgagggcctttgcatgcatgaccattcgatcagcacggaaattgaatgtaacaactgcgtcaccatcaacaattggacccacagcctttccattatcatcaacaataacaaacgaaggcaaatactggtcattggcaccaggttctgccctcagtgtcttaactgcttcaagagcgcttttaaatttgtggggagcttccccaaggacttgtgcatcccaacctcgtttaacaacactccaatcattctgcaaggaaggaaagcaaaaattggattcatttctaaactagactagacaaggcatgacattcatacaagatctcacaagcattgcctacctcataacggtccattgtgacatacattcgacctccaccagatgcaacctgagcatcaacacctttcgcacgtaaagcagctaggtcagcttcaagagtttcaacaaatccgacactagaaccatccaaaacatcacgaccatcagtaagaatatggacgcggattctcttagcaccacgttctgcaaaacccttaagcagcaactgcaccaaacagaaccaaattaaagaaaattaacaaacgccaacgtttcaaaagaaatgtgtaacagatgagaattaagtacctggacttgatccaaacgagagtgaactccaccatcgcttagaagaccaataaggtgcacagtgcctttctcaaaagattgagagatgtatttgaaaccttcatcttcatagattttccctgaagcaagggcgagatcaacaagcttagcaccttgagcgtaaattcgaccagctccaagagcattgtggccaacttcactgtttcccatgtcgtcttcgctggggagaccaacggcggtaccatgagctttgatcaacctccatgtgtcgggcttcccctgtgaagaataaaatcgaaccgttgaagtccataatcggaatccagcgaaatcatcgaggaaagaagtggatataaacaaaaaaggaaacatacgtctttaagggaatccatggcaggagttggagctttatggatgcaattgtattgatcgggatcagattcaccccatccatcgagaacaatcaaaccgatagttttgcctttgggaagcttggggtggtccgcaagtttccagttaacgtcgccggagctacccataactgtggattcagatccactcgtcggtgagaaattaaaggtttaaggaacagatctgagaagcgagagagagagagataacggaagcttaccagcggagaaacagaggaaagcttctcaaagagtcttatggagattcgcagagacagaagtggttatgtggtgaagtatggtaggttgagagctatcactgacataatatgagacttttatagaaacatagaaatggaaaagttagcgatgacgtggtaccaatttaatgggctttactttgggctcaagtaaacattgtgaagcccccaaaaaaatggaaggagacgaatgttctagttttagctgctatgaacgaatgttctggatcatgccgtttgtaatagtcatggtgtgcgccatgtaaaaaaaattgtatatacctttttattttggtcaacgtaaaaaatagcatacagaaaaggtcaaaccggagttaacttaatagtttatacggtatttgaaccagaatttgatcaaaaatgggtaagttttagtaactgggattacattaatttctgttgacagtaacttttttttatctaaatcattatttaaaccttgagattgcattaaatcaaactgaaattacacgaaaaccaaaccgaaaactcatgtaagaaattcagggttgtgcacatttatttattcaatatcatcataatattaactgggaaccttcaaaaggttggtagaaggctaaaaaacaatttctaatgggccaaagacaaaaagttgagttcctatatattgggcttaaaaagcctgaaactagatgagacgtggttcatagtcagataaatgggccaaggataaggaaagacaaaaacaaaagtagaaaagaatcatacagtatacatatatgggaaatatacagagagagatacagataacacaataagaggtagacggacaactgttacggcgaaattgaatgccgcaatgtatcaatatgattggtcgaaaaggaaagtaaaaaaaacaaacaaaatattaaatttttgttaatgtgtaaagggagaaaaaatcagatgaacaggctgtatcatttttttttttgtgaacaaatgggactgacgacaacactcttcttctcctttttgtccttttggctctctccttctctcctttctctctctctctcttttccaccggcgaccattcattctctctcctcctcctcctcctcctcctcctcagcttcctccattgctccttaaccctcattcctcgatttgttcttctcttcaccatttcccctttttaccctttttctactcagacgtgacggcgactttttattcctgtgtctcccacctttgactcgccctggggggatttttttttgctccagaggcgaaagaaacaaaaaaaagcaatggggtttctccgttgtctccagctgctgctgcttctgtttctatctcttcgtctacaaaagctctctgctcaatcttcttcacccaatgcttcttcttcttcttcactcgatgctcttcttcaagattactcttttagagccttgcttcgtcctcgtaccggcattctctacgaggctactactgttccttccaatttgactgggatcaaactcgctgctatgagactcagaagcggaagctttagaaaacgtggagtcactccttttaatgagttctcaattcccagcggcgttatcgtcaagccgtatgtgacaaggcttgttttggtttatcaaaacctagctaatttctctcacttgtattaccctttgtctggttatgattatgtcgctcctgtcttgggtcttctcgcttacgatgctaagaatctctctgcgcttaatttgcctcagcttgatttaagggtgtctaatgatcctatcagaatcgatttctctgatctggaacgaatcccgcaagggtctagtgctaagtgtgttagattcgattctaaaggtgaagcgagtttcagcgattcgattcagcctggaaacacatgcgagactgagcatcagggacatttctctgtggtggtgaaatctgtggcttctgctccgagtctagctcctcctgggattgagagtaagaagaagaagaagagctctgattccaattccaagacttggatcattgttgggtcggtggttggtggattgatactgttggggcttttactgtttctggttttgagatgtcgaaattacaagaagcaagagaaaatgagggagatggagagagctggagagacaggggaagctctgaggatgactcaggttggtgaaacaagagcaccaactgctactacgactcgtacacaaccaatgcttgaaaccgaatacgcagcttaggatacttttgtgtacatcatcatcatcatcacatcttcttgatcatctgttactgtctttttctttttttcttctacaattattcttcttttggtaaagtgtttctttttctgattattttttctttgtggtaagcaagttgatacttccacattcatcttgtttctctgctggtgataaggaaataagtaatattgttttcttcttgtgctctcaaattaacaaactttggtggtctctccatgagaatgaaaagagttggattgtttctggagtgcactcactttgttttcttctaactacttttgctgtaaagctttgccctttttgtaataatttcaacatctttttgtctgagaagcagacagttgaagaagatgtatatcatcctatcatccatactcaactttgttacattgagcttagcattcttcaaaaggaactagtgtgttcttgagatttgttgagttttaacattttttgcagctatctgcttcatgcaacttgttgaccctcacatttatattagaagatcaccgatgaaccaatagattttggaaccaaagaggttagaatccggtaggatatgtagaagatgatttgcacttggcaatgttacaacgtttatgtttacatctaggattgtcttgtttgcttaccttatatgaaaagtcatctcgttcatatggattttttgcattctacattttagaaaagcaccgtttgccacttcaggtatgtaacaatgtgcacagctacaaatctttgcactgaacagatttggaataaagtttgagttaaagtgaatacatgacttggttaatcctggcttgggccatcttgtggcctcttgctcatatcaagtaaaatgccatgacaacaacgttaatggctaagttagcattgcagcatctcctctgacttctgcagataccaggagattttttgtctcatcattccaaaatcttaaggttgaaaaagagatgaagtaaaatgtataaatgcggtattaattgtgtttcaaggacacacaaataattgccagtttttgtcaaaaggaaactatagttgtagaatattcgtctcttttcttctttttctgttatctgttctattagaaagctaaagaaatacatcaaagtcaggtctcaacggtaaaatgaaaacaagcttctttttcactaaagagtaaaagagattcctctcaacattggtctttcatatttttcctagctcatattctggtgtggttgatcgaatcttaatgaaccggagaaaataaaagatttgattatgtaatttatcataatcaagagcttgtttgtgaacacatgaaaaagtaaaggaaagaagaagaactctctctgcctgaggagttgtaatttttggcagaagctggtgtcgttttaaagagaaattagaagtgaatctatgtagttgtgttggttggtaagatcgatttagttacattaaataaaaaatattcctttgagcaaaaacaattaaaaaagataggtttcgtcacaaggtggaccatttcgaagaagaattaagagacgagcccacttgaaagagacatagcgaggggaccccatgtgaatctgcaagcagagacagaggctttgaccgttctcattcatcaaccatcctccattattagccagagtcataaaccatgtgattcatcatcacaaggcttcattggactctctcatgcatattcacaatctccacttccatcttatacaattccagttcctacccgcaacaaatccaacacctgaagatgatactgatgcttttgaaagtataactaggaatgagagaagtactaggatgagccatctttccagatattcatttattcactcacacagcaagagagtagttcagtgtatcatgcaacttaaaagcatacaaaatatcacgaatagagaaatattgataaaccaaatgttattgaggtctgatttctgaaagctttaatatgtccaaggaaaatcaaatgggaatgaaagtactagatcccccagcttcttcttcttctggaatgcactttatttgtcaccacaagtggtcaccttaagcccctacatcacatcaccatattactctcagagttaacatcgcaagccagaggagaagaaaagaaagtagtgagaggatttcgcatgcagagaagaaagaacatcactgtcctagagcttcacattacaaaaaataaaaacagctccaaaagattatcaataaaccaaccataaccaggacctcaatcattcctagacagggcaaaaacaaataaaacaaaccaccatccagaagcttccagtggtaaaacaaaaactaagcagaagtgcctaggataatttatcgagtacccaaaactcaggatatgattcatttctctacacagaatagcaaccaaaccaggaaccctgaagcctcaaactgacagagaagagaactaagtagtaacaaatctgcttgttgcttaagaatacttatacactagctatatccacagggcctctcttataaagctctgaaagcatatccattttcaaatttcaagaaccaaaaacacaaatgatcacacatttgaacctttaccggcacactaattagcttatgaaacaacaaaaccaatatactgatttgcatatgaaatttgactcgtgggagcaacaaaagaaggtgtctttgggggattttccaatatacaagcagtatcatggctatcgaagaggactaaactaagaaagagctcagagaaagcggaacgaataattaaggagagaatgagcacacacctgaggaacacaaaagagataaagcgaatcatgaggaaggagctgcagctttctcgacgactttcttgtcgcgtctttccatagcaacatcccattcatcgtggccgatgtgcttaggctgcccaatcacaaattcaaatcaaatcatcaaccaaatgttcaatagagtacccaaatttgtataaaccggatcaaatcgagcaaaccctaggagagagagagagcaatgaatcgaaaaggggggaaattcatacacggccatgataagctttgtggatgtagtactgagaattgcccatgatacagagcatcccaccgatgattccgagaggcaacatcgcttccaaccataccaacgacatcttcgtcttctcctttcttccgattgtgcttcttctctgtgttaagatccaagttaaagatttgggatcagagaccactctagtcaattggataataatgggcttttgggcttcatttttaatgaaacgtaaatctcaaagcccaatacatccaaatgaaatgtttttgactttttcatggattggatggatacatggtcacggacggtggtaataactagataacctacttggtagtactagtgttatgacttatgaccccaagttagtacatgtaagctttccctagtaatcaaattttatcccacaaccgtatgaagctggatgatgaagacagtatacacttggaagtaatgttttcttatagaagatattaaacacgatcgattaaaaggcgagtaccgagtaagaaatgaaatatgtcaaactaagcaagtaaacgagaatctacggatatttaagacacgagatacacaaataaattagtaaataaagaaaatctacggacagttatatcagattgacacgttacaaattaaaatctctgtttattaatgatatattttcttgtttgacacgatttatatatatcagacgttaaaacttatatttagtacgataaagtaacaccgtgaaccggaagttacggccataaaaacgcaaaaaggaaatgtagggttttagttgctaaaaaagatacttaaaggttagattttttttttaaagtaattaaaagggagtaaaaaggttaaatgataagtctcatatttaccctagcattctactaaacactaaagactttaactgataaaatgatagcaaagaacatagggttgaatgacaatcatggtaaagataagaattcaaaagatgttttgacaaaatccgaatatagtcttcggtaagtttctcttttttgttaaaaaaaaaagtttctcttttcattttcttttttttcctgttctcttatttatacacacaaaaaaccctccttgagtcgaaatgctactgtgacgactctgtttgcttctcttccttttcttcctcggcaacaacaacacccttcctctcctcactccctatccgccaaaatctcttcttcttcctttttcttattttcctttcaatatctgatagctgcaaaacagaacccaccatgtctggtctgtataattataataacttctcaccttctagagccgcttctcctcagattagaaccccttcctccgatgttgacaggtgtttctctttcgacttatcctccctctctaatggcttctttgatgaaatctcttatctctttgttttttgctcgttttctgcagtcaatacatatctcagttgttagcagagcatcaaaagcttggacctttcatgcaagtcttacccatttgtagccgactcttaaatcaaggtcccactcttctcatttcttccttcttagatctgaattttttttggtgaagttgatgtttcctgtatatttgtcttgattatgcagcatttctctctttgatgacttgtcctaatactcattgtctgaatcacataattggatcttcgctcatatagtcatatttaatctcagagtactttattagctcttaattcttcatgcttttgatgcttttgagtcttgttagttgattagttcagttaatgatagtatcgtctccgtggtcagttaatgaagattggttggggctttttgtggctatgctttgatggcgtatgtggtttggtagcaaagcttccagatttgttagctatattgattggtatcattgacattctcttctttgttttctttttattgtgcagaaattttccggatcaccggaatgatgcccaaccaaggatttaccgattttgataggttacggcatcgaagtcctagtccaatggcttcaccaaatcttatgtctaatgtttccggtggtggattaggtggttggaatggtcttccaccagaggtagccattttgcttacaaactgtgtttcgttagagcttttttcttcatgtctttgttgaagaagctaccttttcatccctgattatcttaatagaacatagaaagtttcttaacagaatattgtggttgaaacccacttgcacatgaaaatatttatggatggctcatgtattcttttcttggagcagcctaatattcctagtgcaaggaatataaggtatgagtttagctctccatctccttgtttgaatatgtggtgccatctgtagcctatagatcgttgcatgttcaagagttagaagtttcggtctttgtatacccgataagaagtctcgactgtttaggtaattcctcatagaaaatctatctagagcttcaactagaacctttttatctcttgtagagataccctttaagcccttcttctaggagatgatgtttcattgccattttactcatttcagaactgtaataaaaatgtagcctttttatttctcgtagagaattggtggtcctcatggaatggcaatggagtggcaaggtgcgccagctagcccaagttcatacccagtgaagcgtattttgcgtttagatcttccagttgatacctatccgaatgtaagtttcgctgtattgttttctttgcgacaatgaagttcaggtgaattaaccattcttctgcttttggttgttagttcaattttgttggaaggcttctgggtcctagagggaattcattaaagcgtgtggaagcaactacgggttgccgtgtgtatattagagggaaaggatcaattaaggatcctgaaaaagtaagacatgtttacatttttttctgtttccaaccatctttttaccaaactatgctcatattttgcattgatatgtttgttgctaggaagagaaactgaaagggaagcctggctatgagcatctcaatgagcagttgcatatcctcattgaggctgatcttccaattgatattgtggatataaagctgcggcaggcccaagaaataatcgaggagttggtcaagcctgtggtgcgtgttgtaacatactttttctcattttatttttgagagccacattgctttgaagttttgcaacaagttcatcaatgttctttttgttatttgcatgttttaagtcttagttaggcaaggtgggagttccgtagtaaaggagtctcagttttgggttagtctgtagtaacaagcagcaggtggtaagtggtaacagaccttacgccagttagttgagaactgatagtcttaaaggagggctaggagaattcatttgggaattatggattggtttaggatcttggtttgtgcattggtcgagagtcaagagacttttctcctgaactatcagataacttaaggttactcacataacatgctttgtattcttttcacaggatgagtcgcaggattacatcaagaggcagcagttgcgagagctagcgttgctgaattcaaacttgagagaaaacagcccaggaccaagcggtagtgtctctcctttcaattcaaatgcaatgaaacgcccaaaaacagggcgttaagagcttgagagatcctagataaaaattatgtgcatatgtgtataactggcctaatggtgttggttgagtctgctcttggttcttctgcttaccctctgatccacacactgatgcttatacacaaagcaccaagagaacagtttcctccttgaccggggtttgatgcattgtaaccatcaaagatattagataatttggatttattcatgtgttgaagtagttgtattcttgactttggaatggagatctagttacatgtatatgtggatagatagataccttaccaatggagtttatgattttgcttctttcttgtaactttccggttttaggcaaattgtgtgttatgaatcggccaaggtggttggtgaagtagttgactatgatgacacgtggggctcagacacagctttaggtttcacagctgggaaatgggcccgattgattatttattgtttgtttcgtaagaaaaccaaaaaaagggtttttaaagttggacgaggttcccaactttttcaccactggctcctctgtgattgattccattcccgtctaaaatatctcagatctcagatttcagatctctcagttcaactttctcattcatcacagatcatagtgtacgaagatggcggctatggcggcgaagcttcatatatcgacgaaatcggatcagagcaatgtgcgattgcctagactgatcaacctgtcgcgtgatccaaccgctagagtcttgtttccacgaaacggatcagtttcttcgctccacaccaacttctcttctccaaatataatggttccatgcgccggaggtggtggtggtggaagcatcggtaatcacggcggtggaagtggaagcggaggaggtggtggtggttatggaggttcagaagaagaagaatcgtctccatggggaccattagggttatttatccaaggatggagatcacgagttgcagctgattctcaattccctttcaaggtactaatggaaatgcttgttggtgttagcgccaatgtacttggcgacatggcttcacgccctaatttcggattgaacgagctagatttcgtcttctccactctcgttgtaggttcgattctcaatttcacactcatgtacctcttagctccttctgcaatatctcatggatcctccaatttgttgcctggaatctttagaagctgtccttcgagccatatgtttgaacagggtaacttcacccttatgaaccgttttgggactcttgtgtacaaaggaatggtttttgctaccgtgggattagctgcaggtcttgttggaaccgctatctctaacgggttgatcatgctgaggaaaaagattgatccgagcttcgaaacgccgaacaaaccaccacctacgctgctgaattctttaacttgggcaacgcatatgggagtgagcgccaatgtgaggtaccaaacgttgaatggggctgaattcttgctggaaaagtcattgccgccattggtgtttaaaacaagtgtgattgctttgagggttgtgaacaatgttttgggaggaatgtcgtttgttacattggcgaggatgactggatcacagtcggtggaggaggagaagaagatagagatgtcagagatatcagagaaggagaaagaggattgaatctcttagagagtttctttttttgttcctatgttgtttctgttgttcataggtagaaggcacaagaggcatcacttcttgagttgaaacctttttacacgttcttacaaaagcaaaagacatttgttctggtgtgtgtccatcctagtactcctatgtcattggtagggtcaaatttgttgttttctgtatcaacataaccaataaaataaatccaatcacaagttctgattcagaaatgaagattgaatgatttacttataggacatgtaagcttacttctgacgagtgatccatttatgactagagtatagctaagagtcgaacatatgaacaaagaataaatttaaaagcagtggaagaagaagtaatcagaacatcccaagtttcatcaataggcatgaacactagttaagcaataagcaccaagagaggcctaacagtttctcatttctaaagagagagagaggaaaatgtcacatacaaaaagaatgtcaaaatagcggtcataagagaaaaaccttcataaaaaaattagcggtcttagatggttggtgcattgcaaatttgcaaaccattgaaagatacattctttggaattattcatgtgttgaacttgtggtattatacatatatgtagaaagcttccaatttggcgatcacagttgtgtctttcaactaaaaaaagacatttgaaagttcaatgcttttgtccgaatcctactatataaaaaaatcaacaatggtggtgggtcagctcaacatgcttagttggtgtcttggtgaagtagttgagtgttatgggcacgtgggagctcaaaaacagcttaagtttcgcacgtgggaaatgggccgattgattttgattgtttgtaaaaactagggttttaaagcaaagatcaggtttcgatttcaccaaaaaccaaacactgtgtcttccatcctaaagattgtaaagggaaaccgttttcgattttcagagaagatcacacatctttcgtcccttcactgccatacgtgtcgataaagatggcggctatggcggcgaagcttcagttatcggcgaaatctgatcaaagcagtgtgcgattaccgagagtgatcaacctctcccgcgatccaacgactagagtctcgtttccgcgaaatggatcagtttgttccctccacaccaatttctcttctccacatctcgcgaaaccttgcgccggaggtggtggtggtggaagcaccggtaataacggcggcggaagcggaagcggaggaggaggtggtggttttggaggttcagggggtgaagcaagtgaagaatcatctccatggggaccaatagggttattcatccaaggatggagatcaagagttgcagctgatcctcagttcccttttaaggtactaatggaagagatcgtaggacttagcgcttgtgttctcggtgacatggcttcacgacctaatttcggattaaacgagctagatttcgtcttctccacgctcgttgtaggttcgattctcaatttcgtactcatgtacatgttagctcctactgcagcaactcttggctcctctcagactttgcctggaatctttagaaactgtccatcaagccatatgtttgaacagggtagcttcaccgttatgaaccgtttcgggactcttgtgtacaaaggaatggtttttgctagtgtaggattagctgcaggtcttgtaggtactgccatttctaatgggttgattatgctgaggaagaagatggacccgagcttcgaaacgccaaacaaaccgccaccgactgtgcttaattctttaacttgggcaactcatatgggagtgagtgcgaatgcaaggtaccaaacgttgaatgggattgagttcttgctggcaaaggtgttgcccccattggtgtttaagacaagtgtgatagttttgaggtgtgcaaacaatgttgctggaggaatgtcgtttgttttgttggcaaggatgacgggatcacagtcggtggaggagaagacagagatttcagagaaagagaaggatgattgaatctcatcctagtctttcaaggtttttgttcctgtgtgtttttcgccagttcataggcttcttgagttgaaaccatttgtgttggaataaataagatgaatcccttcttaggtccatcctattggatgtcattgttaggccaagtttgttgttttctttttcagttaccatgaatataataactcaataaaaaggttataaattacaaataaagatcgaatgatttacttatcgaatatgtgaaaaacttcattctgttgtggtgctctctatttattgtttaataaaaacctgattgaagcaaattatgtaggtgacgattgtgattgttggtagaaaaattcaaggtcaaaataaacacaagaattagatttgatcagttttgaaggattacgtaactaatgatgcgttggccccttacagtaattcgtccccctcattacacaaacaatctattgtcaaaagtgttgttttgttgttagatcccagtagattagagctagaaaaagccccatctacttgatctgtacccaatcatatatccaaattaagagtacaagacatcctcttttccattcaaccaatcatccgacaagtttgtatagacacgagttaagtcagggtattgaagtatacatatcttacaacatggaataagagaatgtgtgtgtgtgttcacaaggagtcatcacctaacagcctcaggtgcagaattgcagtagggtgtgtgcaagcacacaagtctcgtgaaagtcagacacacaaccgcacacgctagtcccagcaccatccccacactgcctttccttctctctaacctcactgctctcttaatcacctgccagaagctgggtagtaatccaccgcacgccaccaccatcacgtggtccagtccgctgtaatctatccctgctaatatggatcctatggccgatatgggtcccacaaatcctatcaaagctgctgctgcaagagctgcgtgccaactgtctgtagccccaaagacacagcttgcaaccgctgtccctcttgggagcccgtgtagggaaaccgggagaaccatatgtcggccaaggccataagcatttggagcagccaccccgagagcaagcccctcggctaatgcatggaacccaaccgctccacacgctaataatgattggagtgttatcacactggttggaaaattggttactgggtttattaaactgccagcccgggactttttccgaccagttacattcaggatggttgagctagtgaaatggctcagtccagctccaattgcaagtagactaaccagagggattaatcccatttttgcggatagcagcagttgaagtgggcgccagagaccaaggacaaaagcaatgcctgaggcaactcccatgagaagggcgtgctggagacggaaggtgactgccgatgcaaccagaaatactcccccaagcaatggacccagaccaaagaggagtgaaacgaagaagccagaagcatcctctgagctgcagattggaaaaaatgaagccttagtaaaatttaagaaccaatcaaatggagcagcatataacttttactagaactctgtagttttacttgtaatcatgtgtgaaactctcgaaaagagtgctaagagcttccatggatgctactgatatggtggctgcagatgccacttgcgaaggagacgcttcctgttgtggttacaatgaacagaatttaattaagtatactaagtgaatttcgcatctttctcaaataaaaatattaaatcaccacatgcaattcaccttaaaagcatcaggaagcacttcagcaataaccatccaaatcatgcatccggcagcaaatccagtgcaaaaaggcaaaaacttgctgaacgcatcagcgcataaaaaagctggcacggcgacgagaggctggtaaagaatgcaaagaaaacaataatcagtatcctgttatgcaaacaaagaaatcagatcacagaacatcatatgattacctgaggtaaggatgttattatactccagagcatggcattttgtggagagacaccccttgatgccaacaccatgctaacagccaacccttctggaatgttatgaacagctatggccaaagtgaccagaagcccttggctaaaaccttttgagccagcgaatgatacaccaacccctgatccttccccgaaagaatgaagtgtcataattcctatgacgagaacaactttagttgcatctgcgcctttaatatccagcatactaacttcaccatattgttcaagaatctgtccaaaatacatggttaattaataagtgataggtttctgtcaactgtcaacacatgagatttaaattcaaaatactatgcaaataagtaactaggtgattgacagacgaacattcagttgcttacctgcttacagagccaaatgaacaaagcaccggctaggatcccagtaacaacccagtttccagagccatgttcctgcccttccttaacaagatcaaagctagcggccaacatcacaccagcagccatgccattgcaaattccagcccattgaggatcaagctcaacaaagaagaagggcacagcacctaacccagtggcagcagccatagccaaggtgaacaacgcaactgttgagactgaaactttgttgtgagtgcctctcttttcacccattccaatgtcatgtaatgttttctctacaccacttccgtcaataacattacgtcccatgttttcatggggagaagctcttactttatgtgaaacctcccactgagcattcgcatcggtgtttccaatgaatacaacgacaaataagaatagaagcagcacaagtcctttgcagcttgaatgcatcattttgatctccaagcaagttttctccttacaagagattagagaaaaccaaattatctctgaggctttgaagaatcaaaactgaatcaagaggaggtttcctgtttaacaaagatcacaagaacaaatttcaaaaaagaaactgtaacgaagaacaacaaagcaacaatcctcgcaatataacaaatagttcgtacagaatcgttcctattctcctttcaatggacaaaagcgtttaaaaaacgctaatttctagcaattcgttttaccaggttacaatttgcgaactcaatttcagaaattaacgatttgatctaccgttctacacaatttaccccatccagattaatgctagaacaaaaagaacgggatcgcagaacttaccagcacagtaaaaatcagagcacgaagaatgttggatcggacgaacatgagcaaaattggaggcgaatgaagaagattttcaggagatatgatgaaaaaatttgaaacccaaaaaaaaaagaaaaggaaacctagtgcgacgaccggatcccttctcgccttaggagactttgggataaatcatggaagccaaattttatcaaaggaatatccactgacatttatttatttttacatttaaaaaaaaaaaaaaaaactcacatttaaaatatttgtgataaagaccctcaagtttgctaatctacccaaaagagtctgaattatgtaaaattattattgacgtccataatgttaggttcatggcatcgtatctttaattttataggccacgtaggataatattacatcgtttacatatgagttcatcgtgagttcacgtctgctgacttatttttgtaattatttatcttcttaacaaaaaaaacaggtttatcattacatggatatagacttatagtcgacaatatttgacactcaagctgaaagaacatgctacaaaacatgttgtgtggacatttatcgtatcttagttgatattatgagagtttttaagatgtttgttggctcttgtgattaagaatccagtatactgaactaagcacacaacatcaacaatgcttataataagaaaacaataaagataaatacataaagcataccaccaaatcgatcgatcaataaattccatctattagaagctatagcgatggttatacctacgatatatgtggcaccgatcctatgtcccagacaacttgataaatgagttactgtactcttttgtataatactagatttttgtggtacagaaaactacacatcaaccttggctcatgaacatgtatatgaatgaaaagcaagagaggctacaataagaacataccaaaacaaacacagcgatgcgcattaagtgattaaataaactttagagatctctcccaaaagtatatactttaactttgtcctttgctatttgtttgttcatcttttatttggtgggttttgatatgacatcgacttcatttctcagttctcaatccattttattttaactaaaaatgggttaaagtcttgcttgaacaagtttggacaaacttcaaccaaactatgtatagtgttttattgtatttatggtttaacgtgttgttgctttaaatttgttattagatcataacccgtgctatacagtacgggcattaatattttgaataaattaaattgtatactttgttatgtttgctatgtttgtcaaaattaattgttatatttgtcaaactttagtaaaatatattcaaatataattaaatttattaaaacttaataaatttaaaagttttttttgtttggagacgcactatctacatacaaaatacccgtttctattttttgagtatttttagggcctgaaactttttatccaaactgacctaaacccaactggacgcgacccgaaccgaatatttagaattattctattaggtagtaaatcatatacccattaatcccaaacccgaacgggttctacccgaactcgaatggattactcatatgcccagccctattctctgatttaattatctaaaaaatcccaataaaacatatgttttggtgactactttttattcaaaaaaatttacatcctcttctgccaaaatcatttcataagacatcccaaaacccttggaataatgattccatgaatgaagaattcttatcccaaaacccttggaataatgatttcatgaatgaagaatcctaatttgaatataccagaggttttgaaaggttttaagtttttgataggtgtgtatctgagaaggtacatccatcgtgatggtaatctgcttatttataattttaacttgcattatacagcaggtagtcttatattttagttaaactaaaaacttttattgtaaagttgattataaatatatgatattattttatttgattttaaatgtatagtaaactgcgagttgtatatgttttgttgatattatttatattgtttagtgtttaaaatgatatacttgtattttgattgttaattttagagtttcacatgtagtatatcatcttgtattaatattgatttaaacccgtcaattataggatttttcagcttgtattaaaaattgaatcacatcatacacattaaaaaatctaatatgttattaattattatagtatataagattataaattttaaaataatatgtatgaaattgaatataaatattcaaattatgacacaatactcagtaaagttttttcttaaatctacttttgacccgttatagtatttttcatgtattgaacaatttatatttgtttttaaaaattcaaattgtggcatatgcgaaaaaactctaattatttttttataacgatgatattattttttcgcaaaaatagaatcatataaagatgagaggtgaattataataattattaaaaaattaatatgataatttaggtatcaaatctaatttgttgattataattggttacttttttggaaattaataatgtatttcgtttttgagttaaatttaattaattaaattagtatttgattttttaatttttaaagaaatgaattaatttactttttaaaattttatttctaatggcatacctatgtaattacttacaaaaaataaggttacattttaaaaattaatatgataatttagatatcaaatctaatttgttgattttaattggttagttttttggaaattaataatgtatttcgtttttgagttaaatttaattaattaaattagtatttgactatttaatttttaaagaaatgaattaatttactctttaaaatttaatttctaatggcatacctatataattatttacaaaaaataagattatatttaaaatgtatttccgaaataatatagtaggataataaaaatggagatgcagtgaagggaatgtgtacgttcccaagatacaaaaatagtggagtctttatggagttccgtgccacatcctgttttttttttctcacgtgccctgaatcatatgtgtcatgattttggtttttggacgtagttgaaaatgcatcaagcatcaagaccactagcatgtgaaacgagacggtccggtctagagctgagcactgagtccaaaaagaccgagtgtccgaccaatatgtagtttgaaattggtcctggtttaaatgagtttcgactaggaatgaacccgcttaaaaaatttgtaacacatggataaataaaaaagtttttgaaaagttgagaacaaatttttttttttacctttatacagctagtaatccgataggattatatatagagtgatgagagatttgtgatatttttacgattgttcaacttaataaaactaacatatatatatatatatatatatatatatatatatatatatatatatatatatattcacgtttccttaaaacaatagtagtttttatgggtttattaggaacagaatcaattagtttattttttacatccgatttaggaaagtaaatacactaaatagttttcaaaaaataaagatgacaaaaatataagggcagaaaatattaccgccgtaacataatgctttttgaataaagcttctcctcttgagcactcgagaatctttattctccgttactttcttatttctcaagaatgcattagcgtctttgtctgcacacaaagcaaaagcagagagatagggattggtctgtaattcccaagactctattttcagtactatcgattctcccggcgatctggtgagtgagatagagattcacgatgggctcagacagcactttgtctctcccttcttcatctcctccttgtaacaatcgctcctctgttcctccaactttcaccactcggtctgtcttctttctctatctctcccccgagttctgtattaatctctgttaagcttatctgtattcacttgttattatgaatgtaatggtttgagttttgtttttatgaaaattacagcatattctctgatgttgcgggtgacatcattgttgttgtcgatggagaatcatttctacttcacaaggttagtgcacacttttctggtttgagtttttttttttttttctttacagtttttagatcaaacgcatcagagaataataataaacattgcagtttccgttagtagctaggagtggaaagatgaggaagatggtgagagatctcaaggactcttcttctatgattgagcttagagatttccctggtggaccttcgacgtttgaactcaccatgaaattttgctacggcattaatttcgatatcactgcctttaacgtggtctctctccgttgcgctgctggttatcttgagatgactgaggactacaaagaacagaacttgatctttcgagccgagaattacctcgaccagatcgtttttcgcagttttcatgaatctgtcctagtactttgctcctgcgagacgcaagagattgctgaaacatatgaaattcctgaccggtgcgtggaggccatcgccatgaatgcttgcagaaagcagttagtatcaggtttatcagaggagctcaaggggagagattgtctcgagatgtggactgaagaactctctgctctcgggattgattactacgtccaagttgtatctgcgatggcgaggttaagcgtgcggtcagagagtatcgtcgcttctctggtgcattacgctaaaacatcattaaagggtatcatcgatcgaaactgccaggaacagaggaaaatcgttgaagccatggttaaccttttgccgaatgacgaaaaaggatcttactctttatcaattattcctctcggtttcctctttggaatgctcaaggtcggaactataatagatatagagatctcttgcaggctcgagcttgaacgtagaatcgggcatcagttagagaccgcgtctctcgatgatctgcttataccttctgtccaaaacgaagattcaatgtacgatgtggataccgtccacaggatactcacattctttcttgagaggattgaagaggaagatgatgaatgtggttacgattcggattccactggacaacacagttcgttgctgaaagtgggacggatcatggatgcttacttggttgagatcgcaccggatccatacctgagtctacacaagtttacggctattatagagacactacccgaacactcacgtatcgttgacgatgggatctacagagccattgatatgtatctcaaggtaaacaaaaacacaattgaacaaagtctttttatgttttgaaaacatctgaaactgataatcaaatatggaaattaggctcatccattattgacagaagaagaacgcaagaagctatgcaacttcattgactgcaagaaactttcacaagaagcaagcaaccacgtggcacaaaacgatcggctgcctgtacaaatggtggttagagtgctttacacagaacagttgcgactgaagaaagctctgtcgggagattcagaagaagggtcgtgggttttgccttctggagtacaaagccgagcggtttcgccaagagacacgtatgcagcgttgaggagagaaaacagagagctgaagctggaaatatcaaggatgagagtgagagtgagcgagttagagaaagaacataatttgatgaaacatgagatgatggagaaatccggtaataatggtggaacgttcttgacgtcactgtccaaaggaattggaaggatcgcgacattcggtggagaaacccggcaaaaggtgaaccggaaatcaaggtcggtgtcggagagaaaatcaagtagaagcggtagataaaaacgtcaccgtttatgtggttgctatctaaacggagacaagtcatgtgtaacaggatgaataatgggccgggaggagtgtgaagtaggcccattaaaaaacaaagaaaggtctcgttttcagcctataaaaacaaggaaaacatgggattaaatggggtccggtccgagccgtctttgtccatatttatcttgataagaaaagaaatatataaaataaagtatttttttaagaaagatattaagacagtaaaaatgtttataagtgttggtcgttgtacacggttaagttgttttgttaactagtgtaaaatttggttttctgataagtttccggaaatagtacgtcacctataactagaaaattataaaaagatttggttaaatctcaccttctaaaatttactaatatagaaagagaagaccacgtggtgtctaactcatacacatacataaaccaacttgtttatagcatactataatattaccaagaaattaggaaactaccttcacttctccgcctcataaataaataatttacatctaaaaaaagaaaaggagtatgattgatgaaagatgaacatgcatcgtgataacattagatggttacaatatcctcaccaacttggaagtgacacaaattatacattactactagttagtactagtagatctgaatctctctctctttcttcttctctaatgccgtaaattgtaagctaactcttcccacatagtgcctcgattctcgcttttgctctctctctctttcctccgacaatgaataggaatctcagagaatctcttgccggtgggaggaatattccggcgatctctcagtttcgtagaggcaataacaacaacagcaacaacatctctcaaaatggcttctctagagattccgatgagaatctagatcttttctctaagatccgtcgctcatttcctttggcttcctccgacgaattacccgacggttcgtttcagattcacttttttgctttttgtggaaatcgattgcttgtgcttgcttcgatgaattataatttctatatatatgtatttatctggggatcttcgaatttgctggtacggaacacagttgtcagattcagagacgaaaacgatgttcactctctcaatttttctggcctaatttttgttcgaactgtcttcgtctcctagattcgatctctttgctttttcaattacagtgatttgatgagagactgcgtcatctaaaaaagtacttttggggaccaatgaagaattttgctggatcttgttttgcttcatcactttgatctctttcttaatttagcactaaatctctgcatcctacgtttttcttttgtcttcttatagtttctgcaaaactcgggagactctcggtcggatccaaaatagctcccaaaggcaaagatgatctcttgtcttcagctgaaggaggaaaaaatgattatgattggtaactttctgctgaatctcactgatttactctctctttgcatgtctttgtgcttccaatcgaacagtggctcattttcaaagattgctatttgtcttttggctactcagtaatttaaaatgctcatcttttggtttacctgcacttgggagtgttgaattttctgttgtttttgcattgggaaggatataaattatgtataggaagtgactctttttcatctcttggctcatttatgttttctctaggcttcttacgcctcctggaacacctcttggaaacgactctcattcatctttggcagctccaaagattgcatcttccgctagagccagttctgcttcaaaggcttcaagggtactaactgcttttcttctttaagttttccctctttttttccaacatctggttcttgatgacaatcaagaacttcataagttgctgtttttgtttccataacttcctaatgcatataacttcattaccttattcatatatgaatgctgttttttttttccttttgcagctttcagtttcgcagtcagagagcggttaccattcctcccgtccagccagaagtagctctgtgactcgcccatccatttccacctcgcaatacagctcatttacttcaggccgttcaccatcttcaatcctaaacactagttcagcttcagtctcatcctacatcagaccttcatccccgagttcccgttcctcatcttcagctagaccttccactcccacccgtacttcttccgcatcacggtcctcaactccatcgagaatccgtccagggtcatctagttcatccatggacaaggctagaccgtccctgagctcaagaccatcgactccaacttctagaccacaactctcagcaagctctccaaatataattgcttctagaccaaattctcgtccttcaacccctacccgtcgaagcccatcatccacctcattgtctgcaacatcaggacccactatttcaggtggacgtgctgcatcaaatggtcgtactggaccttcattgtctaggccaagctctcctggacctagagttagaaacaccccgcaacagccaattgtgctagcagacttccctcttgatacaccacctaatctgagaacatctctcccggacagaccaatatcagctggcaggtccaggccagttggtggtagcagcatggctaaggcaagtccagaacccaaaggtcccatcacaagaaggaattcatctcctattgtgacgagaggaagactcactgagacccaaggaaaaggccgttttggtggtaatgggcagcatctcacagatgcaccagagccccgaaggatttcaaacgtttctgacataacttcacggagaaccgtgaagacctcgacaactgtcacggacaataacaacgggcttgggaggtcattctcaaaaagttcactcgatatggccattagacacatggtacatatgtctcttctcactaaatgcaagtagctttataccatgcaatgaatatctcaacattttttatggtgtgtgtaggacataagaaatggaaagactaatggttgcgcactatcaaccacaacgctattccctcagagcatcagaccagcctcatccaagatccagccaatccgttcagggaataatcattcggattctatcagcagcaatggcacagagaacgggaatgaagcaaacgagggtagaagactgatggggaagttgagtgacatggacatgtatgagagctcaaggtatgatgcattgttgctgaaagaggacgtcaaaaacacaaactggttacatagcatcgatgaccggtcgtcagatcacggactcatgtttgacaatggaggattcgagctacttccagagccatttgccccactataacacacacacacacacaccccacaagtaaacacctttttttctttctaaaatcacttctcttttttttttttttttttttttaaattttatcttacacaatttgtttgcttgtcgatggtggaaagatataaggctcaagtggttcttggttctttggttattgattcttgattcatggctattgagtgaggtttgtaactttgtagttataatatttgaagagatggtaacgtataagagggtacctcatgttcactcttgttggaaacgatcatgaacgaaaaaacaattagaatgtgaaaagaggaaagagagggtcacacgactcacgcgcctaacgtgaatcaatgacagagctaaagttaataatgggtgacaacgaagcacacaaccaacaacaggccagtgtagttctgataaaagaaaaaaattaattccagaaattgactttcattaatgtcatatttgagatttaagaagttttaaatttttgttatttattttctcttttatgttaccccaaaataaataaataccctcattaatgtcacataccaaactcctcctcttcagggggtccatatttaagaaagataccctcttacccgaattaaaaatatcaaataaagtaagctcaatttgcaacatataataatttgttgaatattccccactcttgttgttttccttgcccattttttgatcttgaaatacttttatcttcttattgtttaacgaatatcacaatcatccattttcatttatacattgcatattttcaaaaaagaagccatatatttatttaatcaactggtgacccattcaatagaacattacgatgcttttaaaagaataaggaaattaaatgttgggaattcagtaaatgccgtttattaaaagctcttatgtataaattcatttagaataaaaacaaagagaaattaacaaaaggacaaatatttaattgagcttagcaataaaaaaaaaatctaaaaaattcggaagagagtcaaagggggacttaaagccaaagagagcaaagcaaatcggagtacagagaagaagaagagagattggaatctgaaactgtaacatcgagatttacgtttctccgtcggcgtcacgccgaagcttccatactccagaaaccccaaaacgcttatttctcaaaaatctccactctctctcttctgaatcttcaatcacttggggttgtgtcactgaatctgcatcaatggcgattccagattcctcactcttttctgcttttgactttagctctagcttcttcttcacgaaatgccgttgttgttaaaaagtgatttctccactatcccatttcctttggcatttattctccactctctctcacttgtcttcttcttcttctacgatcagctcaccaatgtcctgaaccattctcctctgaatcaacctctaaggtctctctcactttcgatctctgttttccctcttgttttggggtttattagcttcgttgtttattcctttaaaagatttcttctttctcaatttcaattactccgtttagcttagctggagaaaccctagtttgtagattgcagatctgggttaatcaagtatctgtgcacacatttatgtctaaaattagttactttcgtaattggatttgttttttttgtgaagatttattatttgaagtcaaacagatttcagctgattgaatcaatgtgtgcatatagcttccataatttcatattttgatttgagaatcgagtaatgttgctttggactttatcatcagcattcccactttggtttgagaaattacgctattgtatctttgtcattattaaggaagcttttcgttgtgttgatgatctttttactcatgatacctgtgatgtgtaggtgtcattcttggctactttatccatagatacatttctcatattgagtttagcttttatgtggctataaatcattacatgatgtgttttgtgttctcttgcagttgctgttgaatgagaaagctttgatgtgagcgagcctgagagtgtaacaaaggactgatgatgaagattattgcggcgtttctcttcctcttggtcacgacttttgtttcccgttgtttgtctgcagacatagaatcggacaagcaagcactgcttgagtttgcatctcttgttcctcacagtcgcaaactcaactggaactccactattccaatctgtgcctcttggactggtatcacctgctccaagaacaacgcccgtgtaaccgcactccgtttgcctggatctggactttatggacctttaccagagaaaacatttgagaagcttgatgccctcaggatcattagccttagatccaaccaccttcaagggaacattccatctgtcattctttcacttccttttatccgatcactatactttcatgaaaacaacttttctggtactatccctcccgtcctttctcatcgcctcgttaatcttgatctctccgccaactcgctctcgggaaacattcccacgagtctacaaaaccttacccagctcactgatctcagcctgcaaaacaattctcttagtggtccaattcctaacctccctcctcgccttaaatacttgaatttgagcttcaataaccttaacgggtcagttccatcttctgtcaagtccttcccagcatcctcatttcaaggtaatagccttctatgcggtgctcctctgactccatgcccagaaaacaccactgcaccatctccttcaccgacaacaccaacagaaggtcctggtacaaccaatataggtcgtggtaccgccaaaaaagttctctccactggtgctattgtgggcattgcagttggaggttcggttctgttgtttatcattcttgccatcataaccctttgctgtgccaagaaaagagatggcgggcaagatagcaccgcagtgccaaaagctaaacccgggaggagtgacaacaaggctgaggagtttgggagtggggtgcaagaggcggagaagaacaagctggtcttctttgaaggaagttcatataactttgatcttgaggacttgctcagagcctcggctgaagttttagggaaaggaagctatggcacaacgtataaggccatcttagaggaaggaaccacggtggtggtgaagagactgaaagaagtagcagctgggaaacgggagttcgagcagcagatggaagccgtgggaaggatcagtccacacgtgaatgtagctcctctccgtgcctattacttttcaaaagacgagaagctactcgtgtatgattactaccaagggggcaatttctccatgctgcttcatggtaatatgatgttttacatgttactcaaggttataaaaagtggctttaaagtaacactttagatgaattctatgcaggaaacaatgagggaggaagagcagcgttggactgggaaacaaggttaaggatctgtttggaagctgcgaggggaatttctcacatccattctgcatctggtgctaaactcctccatggaaacatcaaatcaccaaatgtcctcttaacccaagaacttcatgtctgtgtctctgatttcggtatagctccattgatgagccatcacaccttgatcccatcaagaagcttaggttacagagcacccgaggccatagaaacacggaaacatacccagaagtccgacgtatacagctttggtgtactgttgctagaaatgctgactgggaaagcagcagggaagactactgggcatgaagaagtggtggatctgccaaagtgggtgcaatcagtggtgagagaggagtggactggagaagtgtttgacgtagagctgatcaagcagcaacacaacgtagaggaagaaatggtgcagatgttgcagatagcaatggcatgtgtgtctaagcatccagattctaggccttcaatggaggaagtggttaacatgatggaggagattcgaccttcagggtccggtcctggttctggtaacagagcctcctcgccggagatgatcagaagctctgatagcccggtttagattggttttaaattctctttctctcattctcaaatcattatttatttttgcttttccttcttcttcttcttcataaaccgtttattttagttctctatgtctgactgcataatttattccaatcaatatctggaattgtagtgtaattgaaaccctcaccatgaatggttgtagttcttagattggttataagtgtgcgactagttttgaattttcatttgttgttgtatgattcgtttaaattaaatcacaagagtctttgggtgtttgaaaatctaactgaaatagtgatacaattatatgtgaaatttatcgtctcaaaaagataaactacatgagtaaataaataaaaataaaatcattgctctgtattttttgactgcatgagtcctaattggtgaaataaaaaaacttttggcacgagaattaataaatatatagaaaaggtgaaataggtgaggcggtacttgctgatagaatcagaagcttcgagactgacttgttttagattctctgactataaagaaaggcaaagtaacaagtttcgttttctcctttgcactccatttttattctcgattctcttctctcccgataaagaagctctcgctttgtgttgtccgtccttcttccaggtctaattccaccatttctctttggttaaaccctaatttctttctctcccgaatcgtcctctgtttttgttttgcgcgattagtttccaccgcttaataatagggtttccgatcacttacgttttgtgttgttttgttcggtctctggttcttccactgtgatctgttttgttcttaagttgattgtcttaagttatatcctctgttcaataatattctggtcttgttgggggtttccacaggttttctcgtctctgacgcatggcttctaagaggatcttgaaggagctcaaggatctgcagaaggatcctccttcaaactgcagcgctggtaatctcccttttctaatctgattttaaccaattacttacctggcactaatgactctgaattaggttccttactctctcactagattgatgtaggttagggtatcaagtatcatactttatttcctcaatccatgttatgcttctgattttttttttggtaaaagctttggtttgctagactctttgattaacgctgatctcatggattttgttgtctgttatgcacttcatatttaccctttcctgtcctgtatttgacaagtatccagaactctgcatggttttgagtttatgtcaaagtgtctccttttgtagctcctgctaatatgtctttattgatgtaattttgttgtcacgttgttttaggtccggtggctgaggacatgttccattggcaagccactatcatgggacctcctgaaagtccgtatgccggaggagtgtttttggtttctattcatttccctccggattatcctttcaagccaccaaaggtaatgtgttgtgttatgagactctttatgattcatcggtttttatcattgatcttatgatgtgaatccatcgatcttgcaggtgtcttttaagactaaggtgtaccatccaaacatcaatagcaatggaagtatttgccttgatattttgaaagagcaatggagccctgctcttactatctctaaggttcgagtttgtgtatctctactcctaccattttaacacaaattatgttactatcttagccaattttgtgtgttaacgcgagcgatattgatgctgtggaaattaggttctgttgtcgatttgctcgctgttgactgacccaaacccagatgatcctcttgtgccggagatagctcacatgtacaagacagatagatccaagtacgagtcaactgcgagaagctggacacaaaagtacgcaatgggttgatgatataagacaaagcaaaggatatgttattgcgcatcggaataaaataataacttaaaaaaaatgcacttgtttggtttatcaaacgttagcaagtatcgaacaacttagctgctcttactcctcttctgttctgatcactataaactagtattaatttcgattgttgggtctacttttattctcttgtttccctctcctcacttggttgcaggaaactgcaattctaatcgccccaaacgcaatgtttggactgttttggtacactcttgacataaggggttccaatctacacatggatcaaccacaaccaaaaccaaaccaactatgagccttccatagttaggattatacattgctcccaaatacaaaactcgttcctaatcttctattaacttataccaaagttggtatatttatgattaaattattgattttcttaatttttttaatatatttcaaaagtgtacatggttctaataaaacacttaagaaattttccatattgtttacaatagctgttttaggaaatatcatatctatagaccaaaccaagaatatctttagaccaaaccaagaataggtgttttagaaaataaacatatctttggttgcaattttccaatatcatccgccatgggtccctactaataggtcaggcggtacttgccgacagaatcagaagcctcgagactgacttgtattctccgactataaaaaagaagtagagggttttaggcttttcacgaatctcttctctcttttgtagtggccttgaaaaaaagattcaatctcctgttgtggtatgtttcttttgatccatctttcctttatgttttctgtttcaactacttcttagggtttatcatcacttacgttacgtatgtattgttttattcgtcttcctctatgatatgttatgttcttagttgaattccttaatactcattgtgtgttgcttatctcgtccgcaggttttcgagtctaaaagcatggcttctaagaggatttcaagggaactgagggatatgcagagacatcctccagcaaactgtagcgcaggtaatctcccttttcttggctgattttgactgatagattcacactaaaaacacttttagggtttgatatatgtcacacttttatttcatcaatccacattatatgtttctgagttttttttggtaacgctatgatttgttagactctctttggttctgttatatatatgtactctgcatgaaccttttttttttttttttttgtattcgagaaaactcgttaaacctttgcctggtacgattaagaatatccagaggtttagcttgcttttatttcaagtgtctccttttgtacttcttatttattctgccaatttgtctctgttctataagaagtatcacttgatcatgcaggttttattgtctttttcgatgaataaatgggtctgattgcaacgtctttcttataggtcctgtggctgaggaggacatattccattggcaagcaactatcatgggaccgcatgacagtccgtattccggaggcgtatttacggtttctattgatttctcttcggattatcctttcaagccaccaaaggtgttgtgttttttcaacactaatttaatcatctgatgtgtaatgaaaatctatgatcatcaggcttattagcgagtgtacgattttgcaggtgaatttcaagactaaggtgtaccacccaaacatcgacagcaaaggaagcatttgccttgacatattgaaagagcaatggagtcctgctcctaccacatccaaggtttgagttttgtctctctactactattttttaccaaagtcatgttctgtaaaaaaaaaactagtatattggtgaactttgtgcgagtgatattgatggtgtggaattatataggttttgttgtcgatttgctcgctgctgactgacccgaacccaaatgatcctcttgtgccggagatagctcatctctacaaggtagataaatcaaaatacgagtcaactgcacaaaaatggacacagaagtacgcgatgggatgataagacaaaggtggtctagacaaggaaaggatgtcttacttggcaatggaaatagaaaactgaagaaaaaacatttaccttttctgttttttggttagttttagcaatggctgctatgatgtgacgatcataatcgaaagacttttttagctgctcttttttacttgtcttcagtgctctgatcatattcttatttttccaattccattttaattggaaactgctattgcaacaacctcgtaaatttttttcttttttaaactatagaatcgttttaagtctttacctaaatcaataatctttaatcctctttagtattttttttttgagcatcaactaaacactatggcaaagtcttcaaccgtatataataaagtcaattctttaataaacaatggtactgcagaatttgagttgccgacagaaaaaaaaaagtaccgcaaatctaaagaatctgttgaaagtacggttaataataaacaaaacagattttttattatttacacgaattgatagctaataaagagtgagaaaaaaaacaaaaaaaaagtggaatggacagagaggaggagggtagagtggtaaatttagtaagaaggggaaattgggtctgacgcggtcataatgggagggagcttcttctccaatcaacgattcttctaatttggtctcttccctcaaacacgacgacggcgttttctttcatttcttctctcgacaatccctaacatcaccagaagaacacaaacacaattctttttaggtacaacacaaattctcttcttccttcttcgctctaaaattttcaacacatattttttatgatgcttttaagcgtctgatcgtatccgatctctcttaaaggtccgtttttgccttttcagattctcttaatccgtttcttcttctcaattttcgtttgttcgttattaatccttttcgcaattcgattagctgaaagtttcccccttttttctccagggaattgcaaaaaaaaaatcgattttctattttcaggcaaattcgaatttccaggacattcaaatgggtagctgcgtctctaaggtattgaaagaaacgaaacccttttgtttggtttttggtttttgtcggattctgtatttgttggttatgcgatgataatgtaaaaaaatcccttcttgttttgctacatagggtaaaggagacgatgattccgtccataacgtcgagttttccggtggcaatgttcatctgattacaacaaaagagagttgggatgacaaattagctgaagctgatcgtgatggcaaaatcgtaatttttccctttttgatatttctcttctctcatgtagtgttgtgtttgtttctcaatctcatgctaatatcttctcttctcttgaaacaggtggttgcaaacttcagtgcgacatggtgtggtccgtgtaaaattgtggcaccatttttcatcgagctctcagagaaacattcttctcttatgttccttcttgtagatgttgatgaactcagcgtaagtaactcatactctgtatacccatacatagtttcccttgtctctctttcaaaatcttaaaatatgtttgtgtgactttgtgcaggattttagctcatcatgggacattaaggcgacaccaaccttcttcttcctaaagaatggacaacaaataggcaagcttgttggagcaaacaaaccggagctacagaagaaggttacttctatcattgattctgtgcctgaaagtcctcaacggccttgactcttgactctcgcagccttgtgttctgaggtctgttcttgtgtcttcttcttgacggtgatcaattgttgtaatatgcaaaaaaaaaggtgtgaaaggtcaccaaaaacacttgagttagatcatcctgtttgatataataatatgcatctttttcattcaaattactcattatattattgaatcctcgcaatctaagtgtgcaaagcaataaggctctctctaatttcatttcttctttattatcattctttcactaatgaggaaacaatcatccaatgcctttgtttcttgatgacattttgaatttcgttgccaccattgatttctcctttgtatactttcacaaatctctcaagcagagatcggggtgaggagcctgaagtggccttatggctagggatagggcttggaccgttcctaaaccagatagaaccttaacattaccatgacttgatgctaaaatatagaccaaaagtaaaacatacatttgccatcgttaagttagtcttcttgttatagttagttttttattattctgtaattagtctgagtggatgctaaaatattacaaataattcttcttcaaaacaaaaccgcgagtgagtgtatcgatcctaacatctagagagagctttcggcaatggataagctgccaagaagaaatgatatttaggtaagtttggcgtttattcaagtcttcacaattaaagattcagaagaaccactttgactttgactatgacttgaactttactcagagtgaaactcgaataataaaacgaatgggtcaacggtcaatattagctgctctggttcaataatttacaatttgttctcaatcaaaacaattccttcacaatataaggttttaaaaattcgattatattttattatataaaataaggttttaaaaattattagctcacaaaattataacacgtggtaaatcttaagataagatatttatatgtaagaatttaacttttagtatgtagtaagaaattctttatgatgctttcccttttattttgtgtgttgaatttcataaatatgtatccttttgatcatttcccaatcataaacatttcgattggaaataatgactattgctcctgcagaattatgaattaaagaagtaaatataattctatttcattaaacatatgtatttataatttacgttctttttgtctccgagaccacaagtaacaaatccagtcgcactaatagcgcgttttagcgcgtgagaccaaaacttgtgtactataacccagaatattgtgctttttcgcataatttagaaagtgagatgaccgagatcgcgtgataagccttctaacaatactttaatattttttctttccttgggcatttattttctgtagaaaagaaaatcgcattcgttactttcgcatcgatagaaaaagggctacactttacaaagaacatttatttctacgctgacatcagataaatagttttggtttattatttttcttaaagcactatattgtctctcctaatctctcatagtaatataatttacttaatattacttaaataaaatatatttatcaatatatgataatgtttttattcgttaaatcaaaacacaaaatataataaacttataatgaagcgttttaacatcttttaatgtgttactatatctatgttttgttttaaaaaatttaactcatataatcataaatgaaaatagaatattttaagaaaataatttataggatttaactttttaataagttttaataagaatattttcttttcttaattttaactaatttaatattaatttgcatgatgtaaaattaacttacgaaattacgacagatataaaaatatatttttaacaatatttgtttctaaatatttttgtggatttctgtttttttttatattaattatgttttgttaattgttaattatttttaatactaactaggatatagatttgatatgtcataaaaattaatttgatataaaaatattatcacttaaaatgaagtgcgtagaatttaaatcgagtttattataacatagatagttaaactgtattacaaaattaaatatgtaaaatagaaattctttttctttttaaaaaaatattaaattaaatatagaataaaagttgataaaaaattatttttgtatcttacacgcacctaaataggaatgtcttatctagtataatatattaaatcgagaaataggtttcttcaaacaaccgttgattttgtgcatgttcatatgtttcggattacaaaaacagaagcgggggtaacatattatagttcatctacaagttggatgtggtccgatgaaggaatgaatgaggaggcctgacgtatgtgaagtttgtaaaagggttcgccttagcatcagagttgggactacttgctggagaatccaaaacagacatgtcagtccaacacttgtcaaaattagctatgcattgtcttcccgaaaccgccggcttgaaacttggttgtacttctctagcctccagcttcttccagtttatcgccttgaaccatttgtgtttttttatctcctctgctccgctcggtccacttcccagtctcctttctggctctttttgcagcagctataaaattcattacaaagtcagaatcacactggtctaaacccaatatgcttcatagtacacaaagattcaaaataattcctcatgtttgtttacttacccctttcagcaaggcatgagcttcattagacagaaactgtggaagcttgatcttgtccttaacgattttctgctgtatctttcctttgctcccgagaaacggcggctgcagaaggtaaaacaaatggtgtcacaacacagtttcaatgatcaccttagacattaggctactatggaaccaaaaaaagaagaagacattttacctttccagtgagcatctcatacagaaggattcctacactccaccagtcggcagccttatcatgtccttttccacgaacaatctcaggggccatatactccgtagtcccacacatggagtttgatcttgtgttttcttcaaattcttttgctaaaccaaaatcagttaacatcacatggccatctacgtccatgagtatgttttcaggtttaagatctctatgcattatgcctttctcatggagatgggaaactgcagagacgatttctgcagtgtacacacgagccaagtcctccctgtgaaaaacataacatatgatttagtcaagcctcgcagaattctggtgaaactccaaaactagttcaaaaggaataaagccaaacctgaaaagcccttggtgatagagctggaagaaaagatgacctccgtttataaagtcaagaacaagatacaatctgtatttggtctgcaagaagaatgtaaaacactaagttaggaagtacttgagaaaaaccaataggatgcaaacagagagaagttggcttttacctgaaaagagtatttaagttgcacaatgaaaggatgatcgattttggttagaatatcgcgctcggctttcatgtattcagcatgattcttctcaacaattttatcttttctcatgaccttcatcgcgtatatctcagacgtgtcttttttcctcacctggtacacttttccaaatgcaccttgtcccacaaccttcaatacctcaaagtcctcaatgcctactacacctgagacctcctctggagatttctcactgtcagtgtcatcattaccagagaattcatcgttctcttttatcgattcaccttcaacacactccaccaagtcaactgagtcctcagtttctcgtaaagtgagcttgttcatcttcaaagaatggctaacaaccaaagacgggccaaccaatgagtgggatcgactgtagacaacagcaggctcgtcgtaagcaacatcacaggcctcttcagagttagcttcaggcattggtccaaagacatcagagaattgaagctcaaggttatcacccaagacagattttggagggctgatggataaagatagatgtttctgaaacggcttcccagtctggtttttgtttgcaacagaacactgagaagaaaccatatttctaaccaatcgccaaaagaatcacagaggaagcttcacaagttcaccagatggatgaggctctgctaccaataaagttaatgaggaagaaactgggaataggcaaaccaatatctaggacaagaagctcttcttgtttccctattttaaggaaacagtggatgctgcacaagtgtcccaatgccatcaaagtactttaagcgctgcagttcataaaatttcacaaagatcagatcacataattgaccaaatataataagagacggatatggaattaaaataagcaagcgaaaagattctttttcaattaccaaagctaaagtcaacagaattgagattaagaaaacacgacaccgaccgaatatcctttagatgatcatcccctcccaaataaaaccccaaagccttagaattccaaaatttcaccaggacacgaggtcgaaagaaaccctcgaggaaacgaactctaatatctgtaattaagacctagtctatatattagggaaaaagctggcgcataacacaagcaattttcaaacaaatccagatatagagtaaaactatgacctggacctagaaggtttcgtgtcgtgtaaataatttatatccagaaaaaaaaagaatctaaactctgcgagagaaaagtcaaagagagacagagagagaggaattaccagagaatatgcttgaggaaggagacgagaaggagacgagacaactttaacaggaaagagggtaatgtgccaaaccaaaaaaggaaaaggttttaagaaggcgcgtggctacattttttatgtcttccgaagcatcgtggatcatggggtgaggacacgtgttcgtgttctattgggaaaccgaacttcttctttgttttagtgggccggaattctttaagcccattacattacaagacgttcagacggacactagttcggtccaaaggcatcaccgttatcatcttttatatttacacgttttcaacgttcttttatattacatcgtgggtcaaaaggtcaaagtgttagctgctctacttaatctcaatcaataacaatctcataaaatcaattataaattaagcgtcttggtaaccaaagttttctttaatgttcatgtgtcagaaggaaacaacaaccaaagaagtaggaactacataaaaatatagtaaatctacaaagtagttgtggactggtgaaggaatgaaggaggaggcctgacgtaagtgaaattggtaaaagggttggccttaggatccgaactgggactgctcgccggagaatccaaaacagacatgtcagtccaacacttgtcaaaatttgctatgcattgccttcccgatacttccggcttgaaacttggcatcacttctctagcctccagcttcttccagtttattcccttgaaccatttgtgctgttttatctcctctgctccgctcagtccacttccaagtcgcctttctggctctttttgcagcagctatacattcattacaaagtcaagagtcagaattgttctaaatacaatgcttcatagttcttaactgcacaaagattttcatgtttactgttgattctgtaatcaaactgcaccaacatttacttacccctttcagtattgcatgagcttcattagacagaaactgcggaagcttgatcttgtccttcacaattttctgctgtatctttcctttgctcccgagaaacggtggctgcagaaggaaaacaagacatcacacaacaatataccaagacatgaggcttcaagcaaattaacaatagatagcggcttttacctttcctgtgagcatctcatacagaagaatccctacgctccaccagtcagctgctttatcatgtccttttcctcgaacaatttcaggtgccatatactccgtagttccgcacatggagtttgatcttgtgttttcttcaaattcctttgctaaaccaaaatctgttagcatcacgtggccatctgtatccatgagtatgttttcgggtttcagatctctgtgcattatgcctttctcatggagatgggaaactgcagagacgatttctgcagtgtacactcgagccaagtcctctctgcgaaagagtaaaatatagaaccaattaagctttacaaaattctagcgaaacttcaaaaatggttcgcaaaaaggaattaaacaaacctgaaaagcccttggtgatagagttggaagaaaagatgacctccgtttataaagtcgagcacaagatacagcctgtacttggtctgcaagggaatgtataacgctctaagttaagaaatagtaaagtaaaataaataggatgctaacagagagaagtgttatatatacctgaaaagagtatttaagttgaacaatgaatgggtgatcaatttttgtaagaatatcgcgctcagctttcatgtattcagcatggttcttctccataatgtgatctttcctcatgactttcatagcgtatatctcagaggtctcctttttcctcacctggtagactttcccaaacgcacctttcccaacaaccttcataacctcaaaatcatctatgcctactacacctgagactttcaccagatctccctctaaagctttctcattgtcactgtcgtcattaccagagaaatcatcattttcttttaaagattcaccttcgagacactccaccaagtcaattgagtcctcagtctctagtaaggtgagcttggtcagcttcaaagaatgactatcgagcgaacacgggccaaccaaggagtgggatcgactgtagacaacagcaggctcgtcgtaagcaatatcattggcctcttcggggagtggaccaaacacatcagagaactcaagttcaacatcatctttcaagacagaatttgaagggctgatggatagatattgctgtttctggattttgttggggacaggacgctgagaggaaaccataatttacacgggaaaaatcgatacagaatcactgagaaagctgcaagagttcaccagcctggagagagattctgtaccgacagaagttaatgaggagaaaactgactaaaacaaaggctggcaaaaggcaatccaataacaaggagaagaagctcttgttgtttcccgattttaaggaaacagtggatgctgcagaagtgcgcaaatgccatgaaggttttataagctctgcaagtacatgaaaagttcacacatttaaaggctatcacatgaacaaataagatctgagatacaggattgaccaaatctatgaagagacggtgtagaattaatataagcaagtccagtgatccttttactaattgagattttcagaaaacttcgaacccacataaaaaaagggaaaactttcacagcgatgacaaatcttgaataaaacccaaatccctaacaatttccggattcagaatcggacaaagattaaaaattccacaggacatgaagccgaacgagacactcgaggaaaaggaactgcaatttcgataattcagatctattggtaagtaaaatttcacgtaaatcgagatctacagaaaaactatgacctgaacttaaaccgtttcgtgtcttagaaacaattcatgaattttggataaattctatggatctagaatacgaaaaaaggaatcttaactatgcgagagagaattcaaacaaacatagatagagagggagaattgattaccagaggggatggctgagggaggagacgaagatggaaatgaggacgagaggagaatttaagagcagcatcgcagatccaggggttcatacacgtggccgtatcttattgggagaacgttgaccagttgttaaatatgcggcggaggtttttttgtccactaattctttatttattttagtgggccgcctttcaccaagcccattcttcctgactttttgttgttttttagatcatatcttttttttccggattatgtggatttgaaatccacaatgaggaaattttaccagccattagattcacaaaatacatcaatttgtgagagactgagagagtattttgcgtatccagagattttagaagccattaatctcttattccattgaatctctctagctcgatgttcctcattcattcttaacctttctatcataaaaaatttcatgcttttaaacagttacgaaaagcattaggattgaccaaattatgttagttcttgtatgaatttgctgattttaatcaaacttaaatatatataaatttatttaatcgaaaaattgtctctcgatgttcagaaaaacaaacatgtgtccccggattcgaacattctcatatacaaaaaagatgtatcattgccttgttgttaacgacccaattaactaggtgtagtagacccggatcacgctcggttcatgtatgcaccagttcttgtgtccacaaatatctcttcaccgacgttaataaagagtggtacagcaactattgcacccgtttccattgtcgccggttttgatccacctacgaaattcatcaccccacttggtcagtttaagcttgtttaaaccaaaacatgagaagagatctctcaacaatagattggtgcaacattgttaccttgcacagtatcaccgcgaaggccaggatcaacgtcaaccacttttagcttaactgtaatcggtagatcgaaatcgataaccttgcaaagatccagagagaaacaaagttggcatcaccgcttaattacgtgaactattaactatttttacagagaagctgaaagtgagtgtaccttgtctttccaatagagcaaaatgcaatccattccttctttcaaccatttcgtcttctcacccatatcagattcgttaagacgtgtttcttcgtatgtggtctatataaaaaaaaagatttgataaccaagagaaaacgtaatcattagtacacaaactttaagctactactaccatactagcgaagaagagaagtaaggatccaatgtgacataccaaatccatgaaaacaaactgagacccatctttgtatgtgaattgtttggtttctttatatatattagcttcctcaacctgtaacatagaatggtcataatcaaaatggtgcaactaaaaaatcattcatcagattaagatataagagaaaaagagatgatttttacagaaattccagcacgaaatgttctctcgactgtgctaccattcacatagttcctgatcttagttctcacaaatgccgcaccttttcctggtttaacatgaagaaactctgctccaacaaagcaagaaaaaaccctcagtagactagtaagtagctaagtggaagcattataaccaaaacaatgcttaaatcgtcatgaactagtaatagtatctacaaattcagaaaccttccaagttccaagtatagataataacataaactaagaggaattgaggaagaagaataccaagaacacgccaaggagcaccatcgacttcgatattggttcccgctttgatgtcgttagcagacatagagcagtgaatccctgcaaaaatcaaacgtgtctgaatataaatttcaaaatcaatgcatgcatcgaatttaaagaagcgaatagagatattaactgggaaatctgttggttcggggagaaatccggacggcggggagcgccagtcgattcatcgatgaaaacgaagcagttgaataagggatacacaaggaaggagtagatgaacaagatacagagaaaatcgctcttcccgccattttgttcttccgccggcgagtaaatagagtctcgctgtgtgtggactgtggataaggtcctgatggaaaggactcgaggaggacggaaggttttacggctcaatcgaacctttatcacaccaacaacaaaaccgaaccgtaattcggttcaattcaattatccggtttacatacgcttttatctgattttttagagtaccaattccaatcaaatgccattagatgtttttttcctcaaatagttacattttattttttatatgtatgcacatgaacaaatcaattgaaatgttagatttgttcattgtaaatgtttaggtcttcggataatgatgcttagttttagcaatatatggaagatgatacaactctgtaccaaacctaaaacttctcaagctcataaatacaaaaaccaaaaccagaagtcaatttcaataacctagttcgtttcaatatgtacatggtagacgatcaccaaacacaaagccaaacaaaaccctagctttaagaacacgaaacaacactcatatcgctaactatttttcttctggacggcgggaatcactgaatcggaatcagactcggaacataaacatagcaacaaataaacgggtcatcgtactcaaactgtccatagcttgctgtctcaatttgttttatgaccccaccttcatcaatttcgtaaaacgtgatgataacatacgacttatcatccacgtctacacttccctcacaccacacccttatatttctgcgcttaccaatggagtatcccggacaagccatacaagactggagatgtaacgctggaagatcaggagtagtgacattgaaatattggctaaacgaaacaaccttatcactcaacttgtttgtcatccaaacctcaatcccctgtgattcttcaccttgtagtaacaaagagagtctatctccatcgaaacagcctaatcgagtcaccaaagtataaggacagacgcatatctccttgaatgtttcagtggagaaatcaaaccttataatagtaaagtcttccttcttcttagcaatccagtacatcttacccttcacagacacaccgttgttgcacctaatatctatatcccagtcaaacttagcaacaagagttttccatgaatcagacttgaattcatagatctcacagtttggatctgaatcatcatccttaggcaaacgaccaagaagcttcaagattttgtagttatcacgagatacattgtcgtcgtatccaatcccaacgtaatcagtgtgcaagtaacaaaccgacggtttgatccatttaatttccctcaaaaccggattccaaactgcgagactgttgtcccattttcgacacgtacacagcattagtccatcacagtgaaccatggaataaatcggatacaaatcgcgaaactcgtccgggattagtgcgtctgagaggatttcggtcaccggatcaatgatctgttggtcataggttcttatgaatcgttccggtgagtagtgatccaagtgattgtacatgaatctcttctcggtgatgagattgtaccatttcttgcacgtcgatttgaatcggatcaaggattcggcgggaatcttgtaaagtatttcttctatcaactcaaatggtagcgacggcaacaacaaacactttgaggaagccatgaacgatcactggaaagatttgaatcgaatcagagagatagattcttgaataaggtaggtttctttttcctttctcagtttttctgttgagtacacaatacttggatctctttttaatgtgaaagaagaaatgttgattattatgtacaaaacatcacaaaccctctctatcgacgtccggattcataaacaacaaaagaaaaagaaaaaaacaattttttatatttggaatccaaaaaacaaatcaacgccaaaaattaaaaacaaataggaaaaagaagaaagaagagagatatgaacaaatcaaaacccttcgaggctagttctcctaccactggctgaagacgatcttcgaacctcttcccgagccatttcctccaaagatgaacacgctcgcggcggaaacactgggggaaacacgagcgtccgtccccttgtgggtgagacagacggtcgtcgtggtggaggtgacggtgaaaaactcgaccttggtggcactgatgccggggtccaaataatcgtgttgagactgcttgatcttcccatatgtttccttgccacgaccggtgcgggttctctcaatgggaacctacacgagtacttcatgtcctgtatgatcttgagttgatccacgatgtttctcatggttggacgctctgaaggctccacctgcagacatttctgtgctatatctgctatgctcctagccgcttttgccggaaaccgacctttaagctgaggatccattataagcgagagcctgcaatcatctgctagaaaagctctgctccatttcactaagttcctctcttctttcgggtaagacccgtccatatttttccgacccgttaacatctcaagaagaactattccatagctccacacattgctcttcggggtcaaaagccctctctctagagtctcgacagagagattagcaagtgccgaactattagatgtctctgtctcaggcgcatggcctgcacaaccgtatcctgatagcttggcgctgaaatctttatcgacttggatatttgccgtcgaaaattcattgtacattgcctgttcatacagaggaagaaaagggctcaatcacaacaaaccttgttaccacccaaattcacaaatgttgatggagttttgtttagcgtacctgaaaagggccttcttcgtgcaagaaggttagaccctgagctgcgcatagtgcaatcttcattctagtgttccaatcaagaggaggcccatctgatctcccatgcagtaaacggtccaagctgcccagagcaagcctctcgtacaccaacattcttgtgtcagaaccgtcacgagcatgatagcctaccagcttacaaaggttctggtgttgcagcgacgccaatgtgttgacttcattaatgaactccctaatactctgtggaatcataataaacaatcttaaggaaacaaacaaatagatatcatcaggattatgaagaaacatgaccaaaagaatgtttatatacctgagtaattacgtgaagtcgtacaacagttgcgtcaaccttctttaaacctgaggtcgaagcctcatcaccaaaggaagccatgtacataacagatgaaagaccttccatgacacatcggtctgaagaaaaagcgttacacgcagccattacttcatcatatgaaaagctcctaactgacccgctaggtggcaaaggtaaaggtccagatacagctgcggatgatgataaccgaccgctgcttccgttaaacgacttaaagcttccccaattcttcaatgaagaaccagttcttggtgacggtaacggaagtggttgagggctagattctttagtagaagtacgtggatctcttggttgttcatcttgctcgtcgtggtaaacaccagcaagcaaatcccgttccgctgcaccgtggatgcttgacggagcagacatgactcttgctcggctactcatctctccggttccaccgttgttagattgaattggcttcacacgagttctgaaactcggaggagctgattgtaaattacgacttggaatctttggtggctcaggtaaagcagttggcttgctttcttcaagatccaaccgcttcatagaaacagagccacgtttcttcttgcttttcaaagggaaacaccccaaaaccatctttttcaatcctctaaattctgcttttgattaccgctttgattctaacggatgcatataactcggagaactcacaatttcatctgaaaaatgattcaaaacacaatttttttagcaacagaaacaactacatacagaaaaaagtgatttttagaaaacccagatccgtttatttgcatgtgtttagatcaatggctaaagaaattgttcaattcaaacttaattttcagtagaagtggataaaatctcattttgacagatctcgtggttcaaaaaagaagtttaatttgagaagttgaagcaagtaaaggacagttacataaaccctaattctataacagtgaaacaacgaaaaactgtaaagttagaaacgctttcgatttgtttaatgaagacatccatttagattaaattcggtaaagacaagagacaacgacaataataaatccaggaaaatacatccatgattttttttttttttttttttttttgtaaatcgcattatcattagagatagatattttcaatttcaaaatattcaaatttcacttttgaactgagctaattggtgaaatcagagttgtcatttaaacaaaatcttaggatagatcaaaatctattcctgcgaaaattcacaaaaaaaaaaaaggtaagaaaaaacaaaaacacgaattcgatctagaaaaaatcaaaagcagacataagagagaagtaattagttcaaacctggaacagacaagaaaagaaattctaggacgaaactgaaactacggatagagagttgtaagagagagggagatgtgaaagtgaaatcggaaatttctgggatgaggaaggaagaggaggaggaggaggagaaaactcataaggggtctctctgtttaggaaagtgagagattttagagagagaagagagagaagggtgggacccaaaagaggcagtggtcaaagttcaaagcaaaacagatatccaaagatgtattaattattagtattacttaaactctctctcccagtctctcaatcttaattcaattctttcagctaacttttagtttggaattttctctactttgctttttattcttctttcgccccctctacttttgttttcttctctctacaacctcgtcacaaactcataaaataaaggggacgacggctcaagagaaaatctcaaaatgtattaatgtgtaacatgttccaatatcattttattattggagatttttctttgtttgtaaataaaaatttcacaattatcatgtaaaaatacatattaccatttttaatctaaccaatatattaataacgatttaaattatacgattgtatttgtcgattagtgatttatattaatgttatcagtgtatatttttaaaatctataataattttattttatttatttaatttaattctaaactatttttcaaaatattatgaacgatcaaattttttatcgaacgattgataatcgtaaattttatatttaattttaaaatatacatataagctataattacaaatactaagaaaataacaacaacttggatcatttatgaattgagaaaatatattacttcatacgaaattttcaatttaaaattaatatttttttataaaaacgataaggtaggaaaaattgtaaaattcaggagaaagcctagatttccagtaaagagggcctcgagaaaagcgacatctcagtcaaacttggaaaactagttttgtcctttttatttataattagttgttttgttgttcaataaaaataggccgtatctatctatctactaatcctaatctaattgggttttttgttttgttttcttttcttgggtcaaaatgactaattagattggttgttgactcgatatcttagccgcttatttagatcgcattgccctctaatcaacggttcatatccggtcacgtcttcgctaatgtgggaccccctgacatcgttctttggaagatttttaaaataagttaaaaattttagaaaaaggttaagcacacgcgccatgcacgcgtgcgactaaactctaaattcagacaacagaggacacgtggggtccccactcgaaccaatctccattctttctcacttctcttctctacttcccgaatattacatcatcatcatgtgttattttcatttttttctcggagtagtatttgattataaaatggaaatttcacaatttgatagtatattgaaattttgattactaatcatgtattcacaaataatgctacagagaaactttaggttaatatatatccgagttttagttttatcttttcacttgacttaactctattcaaactcatagttctttcctaaaagtgtatttttattccttctttcttttcttcctattttggcggagcatcctctcaacctttgctgctttttctcggcattgttggactctgctttgggcttgaccaaccaaagtttacatcatcatttcttttatgtaattagacttttcgacggatattagttgtggatacattcgtttgcttttgtaatatgtacctagtgtcatatgcattataattagtgaaatatatatctaagcttcggttttccaaatcatatcatctgaaagttacttatcatttaaacgggatagtttctatatactataggcagttgaattgcaaaagtttttgaaataaaaaaatctacaaagattgaataacttgaaaatagttttgaacactagtatgcacgtttcctatgctgtttttgttgattacgcaatttaataatgttctggtataggtcgtatacttttctccttatgtgtagactttttgagttttgttggaatatacaattaatggtttgaacaggggtcggcttactttggatgatctattgaacaagccacataaagaaaatgattttcacgtttgactaattattatattactggtgagaaatcataaatattcactatttctacaaattttattgaaaaattattatcgtactcattgctgtaatatttgaaaaaattgtgaactttgaaaaaatgttgtaaaggttttttctatctttactaagttatctcatacattaatatatattatatatatgtatgtaaaaagacaaattatggtttacgaaaccatacttaaaataatagtttttttatcaaataaacccttcattttatatacaaaagaacctttgaaaaattatttggttggattggataaaaagagaagacttcaaacaaaacttattaggcccataaaagtcctaaactccgacccttctcccccccgttcagctatcggtttctctattttcatcaatccctattattttattttttgtgatatgttcgatttttttttgtgaaaggataacattactctttttgtttcaagaacatgacgttttcttgacgtaaaagaaatgtttttgaggttgaaaatgcagattgtgtgtttgttaggttagtgccataagaaactctaagaacgaagctacaaatgcaaaatctgcatgtcaaatagtatctctcttttagtgacaaactcacatatgcataaaaaataaactatattgatcagatttcagttgttaaccaaattaatcttatttgtttaaatttttctttcatttttttcatttcgtttggaatattccattccattttcagatatacaaaacaaacaatcaatataggtcatttggttttaaataataacagtgatatataagtcttgctaactggcaatttgaacagataaaagtatcatgatatcagtagtttggtcttaagcgtttttcagagcaacataattgtaaagttttatttgatcgaattaaccaaatttagaagttttcttttaccattacagcaccattttattttgctttttcgaacttttccaaaagccggactcgccggattattctgatattaggttttagagtttacgatatatataggaattgctatatttaacagaaacatataatattaggctgtagatttacttcatgtttctgattcatatatagttaagttgcaataatggaagctagttcagtttgcagtttgtttatgaattcttggttagtaaacataaacaaatatatatttttcacagttgatcgagatttttgagtgtttactaacgcattttcaataattgtatgtgtatagggtggaagcatggagaatgtttcagagataagtgcctgctgatattagaacattcaaaatgacaatacatcactgatcaattagcaactagcaaaccaatgccctcatttattaattattaggttattatagttcttgtagtagcttcctttaagattttctgcttgtctcactggatactgtaaaaaaaagaaaaagaaaaaggaattagtggtttagatttttctacaagatcagtaatcacaaagagagagagtgagatgtactctttacctgtcgcagtcagtggaagggctgaacttgtaagggagatcgacaccacatttagaaggcaattccaaagcattttggatggttctaggagagagagtgagtcctccaatagcagatttgatgcaacgacagaccccctgacggtccacagaagtttgagcctgactcttgagtgttgtgagaccgttgcagcagagggttgggaccggtccgccctgagtcacgtaggataagcaagggtaaagatccgcaatcaccgtgttgcaagacacggctgcttcaccgcagtgtaaagcaagaaccaggcacacggctaataagagagatctcatgttactttctgtttttttttttttggtgtatttgtgttatggttagggttagaaaatagagaggttatttatagatggaaagagtttgagattggtagttgaggaagagtgattgctaggacacgagtgttactgttagttagttgtggaagaatttaatgtttaccttcagccaattaagatccaaccctccggattcaactgcattgtatctaacaatattatttctttttaattacattttttcttctttaactatccaaattcatctcttaatcaataaaaaaggcctactaaattaaacactgataccaactacaatgagaagagttgttaaagaaaagaaaaagactaatagattaagataggaatttggatagtatttaatttcttactggtttgaaatgctgtttaattcagtagtgtatgatttaatgcctgattataaaattcaaagttttaaaactgctttgacaaataaaaaggatttcagttctcatctacatatatttggatagtgtttaacccatgtgtgtagtaatatatatgtcaatatcaacgtcgacaaaaggaaaaataatgacaatttttaggcgatggatattgagttgtatcgctgctcatagtgcattgacgctctagataaagagattaatgaagtgtgcggttggtacgttttgttgttacaagtagttaagatagcacaaatatgaaggagcatcttcgagtactaagagctgtggtgtgaaattgatcgttgagaaaccgttttggttggtttccatcaagtaatttgagccgtggtcccaattttgttcggtttagccgatccttaaccaaaaacctgattcagaagaaacatgtattcggtttgattccaaattctgtagcttgtattattaaatcattccaacgggctgtatccaacttttacaactcttgaatcaaaaattaagtcaataaaattcgagatcaattgaataatgttactatactatacacattcacatggtatttatagtaacatttaccctccttgaacattctgcctcagtgtcataccattcatgtcgacaataaaagttcccatcttaatcaattccaaagtccttacaaagttaaacgtctatacaaattataatgactgttgatcagaacttcaatatcatatatcaattttctcaaaggtattcattcttctggtgatatcatttttcctatctctagtcatgtcggggtatttctgctctaccatttggtaattggtatcaatatgtatgcaactaattagcttagtattaaacttcataaacatatattatacgcccaattatagaaactcttgacatgaatcaatcccattcttgattgtttctcttcaaacaaaaactagccatacaaggaaaagggatctcttgtgacaaatcaatctagccaggaaaggtttaactaggaaatcgctaaactataatacaaatcgtttcccgcatatagttccgattgcgctagccactactagccagtgttctcttggattgaattccaagtatatagactcgataaaaaaccttaaagaaattcaaaagaagcctcatctcccgattctggctactcggtttctcaacttcctattatgcttttcctggaagaaccattgaagatgttgtattggtacaattcagtaacattttgctagacaacaatcaataacatgaacaacaaaaccactttaattcttgaatagcaataacatcgaattttgaagatggttttgtacctgttgaaataccctagccgagctcttctcaacatcagaagccaagctctcgatcttcgccagcattctctcatacatttcttcaatcccgcctgtgtaattcgcagcttcagctccaaccaaacgtttcaactctccaacttgaaacccctctgctaacgcatcgatctccttctgatctttcgctgattgtttcttcgcactcaaggaactctcatcgcaatccacgctcatggctgagctactcaactcgcagatcaacggtggaaatcccgatttcggactaaacgaaccgtaatggcctcgaaacgctggtccaatgttgactataccaacggatctaggttcgagccgttgtttcgaggatcggaactggtacgcacggtactcgtgcgtgtgaatgcactgatccgtcaatggcatagtaagaagaaagaacacggatgaagccatgttcatcgatctagggttttgcaaatcctcgattggtaagtgaaattgagacgagagagacgacgtgacggctaactctctcattgatggacggttagcggttttcctgcgggcggagaaccacccaattaggtggtccggtgagtcgactcggagggaatcgattcgacgcgagtcaactcggccaagcggatcgtagaaggagacagttttaccagagcagataaagcttgtaacggtggcgacaatttgatcagatgaggaggaactcgaggcgatatccgccggagaatcgtcggatagattagaagagacgattcggtggatttggccgaagatcaagccatcgacgtcactgggagaagatgaagctcgttgaatcagtgacgccaatgttggacccgaaatctcgattttctctagagagagatcgtccatggcgacgagaagaacaccaaaaggaaaagatgtgacgtcactgaaatctctctctgtgcaaataaaaacgagataaaaattgtatcagcacattaggacgacgtggcgtttcgtgttctaacgagtagttagcgtgtcgtttttgtgaaagaaaatgggcataaatgtccacactcgaggcccgttattcaccttaaagcccaatcaaacagaaaaacattttaaaagggaaatatgaaaggtcaattagttccttaatcttctgcattgatgtagcagcaactagcaacggtgcttacaagtgtcgccatgttgtttcttagttgcaaattaagaagagagcaaaatatctttttacagactacaaggaagaaaacaacacttcttagctcagagttttttgaaggacagaggaaaaaaccaagaagatggtgcatcctttggttgatagagctacaagcgatatgctcattggtcctgactgggccatgaacctcgagatatgtgacatgcttaatcatgagcctgggtaagacctttttcactaaaatgtatttgaatgactgtaaaatccttggtccaatgctctaggtgatcaatacgaatcaatgttctaaaggaaaaatggtaattgttgacattgtgatttcctaaagagaatcaatggtaattttgttgatctcggttatactacatttgtgttgatcactgaagactcggatggttcagatttggttttgatgtttttttttttggttttattccacttttctaatgatatgtgagtgtgtgtttgtaggcaaacgagagaggtagtgagtggcataaagaagaggcttactagtagaacttccaaggttcagcttctggctcttacagtaagttctactaccagggcttgatattcatgttttggtttggtttggtttgattttggattcagtttcggttttgcatagaatgagatgttcttacattattaataccaaacttcacttcagtatgatatgtacacaaccaatagtattcagatatttacttttattttcttcctttttaaaaatttatttatgagaagattaacatattttggttttgttactttgtagttactagagacaataataaccaattgtggagaacttattcatatgcaagttgcagagaaggatatacttcataagatggtgaagatggccaaaaggaaggtcaggctatgtttcttttaaacgattgtttaatctataacaatagttttgtgtgacacctaacttatcatgttgtttgttaaacttatagcctaacatccaagtgaaggagaagatattgatacttatagatacttggcaagagagcttttcaggtccacaaggaagacatccacaatattacgcagcataccaagaattgttggtatgtttcatttttgctgtgacatgtccattttaatcgaaccgatggagatatggtttgaatgttagtatttcgtttaatttcttttatctgttttcagcgtgcaggaattgtattccctcaaagacctcaaatcacacccagttcaggacaaaatggtccttcgacaaggtatcctcagaattctcgtaacgctagacaagaagctattgatacttcaacagagtcagaatttccaactctgaggtgtctatcttaattattgctcattattttctaggaatattcaacataaaaagatttgatcaaatagcatttttttggttgaagtttgacagaaattcaaaacgcaagaggaattatggatgtcttagctgaaatgatgaacgcaatagatggaaacaacaaagaggtatatcttttaacacctagattctgaaaattcatataacatttttcgttaacattgaatctaccaaatgaatgtattttcttttcacctttgcagggacttaaacaagaggttgttgtagatcttgttagccaatgtcgcacctataaacaaagagtagtgcaccttgtaaactcgacatcgtaaagatctgaaacttttacctgcaaaatttgttttgaaactctaaacaattttgacgaatatatgttctttatacacgttttggttcatgtgtcagagatgaatctatgctttgccaaggcctagccttaaatgacgatttgcagcgattacttgcaaagcacgaagccatcgcctctggaaacagtatgattaaaaaagaagaaaaatctaaaaaagaagttcctaaggacacaactcaaatcatagatgttggttcaaggtaagaaacagttctagacttctagttattaaatgttttattttgaaatatctttgggttcttgactaaattgtgtaaaaacttaagaattattttgttgttgtattgtgtgttatattttgatgtataggcattggtttagtggttaaggattgaaggttgaaagattaaaaagattggccttttacactctaaaatatttttgaacttcttttgcagtgagaccaaaaatggtagtgttgtggcttatacaaccaatggtccaaaaatagaccttctaagtggtgatgacttcgagactccgaatgcggataactcattagctcttgttcctctcggacctccacaaccaagtagccccgtagcaaagccagataattccatcgtcttaatcgatatgttgtcagataataactgcgaaagctctactccaacttcgaatcctcacgcaaatcatcagaaggtgcaacaaaattactcgaatggatttggacctggccatcaagagcaatcttattatggtcaagggtcatctgctcctgtttggaatctccaaattactcaacaaccatcttctcctgcctacggaaaccaaccattttcgcctaactttagcccgcccgcctctcctcactatggtattcattttggacctgaaactcaagactgatatcagtacctatagaaaactcaaactaatcctaacttgttttccctttgcatcgttgtctcttgtggtctataaggtggacaaaacaacaacgttctggcattacctccaccaccatgggaagctcaatctccaagctctagccctcaatactctcctacacatccaatgcaagtgactcaagtggtcatcaccacacacacacatcaacccctcggttacaaccctcaaggcggctctcctcatgctaccaacaacaacaacaacaacatgttcgggatgttcctccctccaatgacaggaggccacatgccgccaccctttggccacaacggacacgtcacaaacaacaattataatcccaacatgtacggaggctatggaggacaagctcagccaccacaacagtatcttgtagaacaacaaatgtacggaatgtctcttcaagacaatggaaacaacaatactaatccctaccaagtttcttctcatcagcctccaccaatgatgaagcctatgaataagaaaccagaagacaagttgtttggtgatcttgttgaactctccaagttcaagaaacccacttcaggacgagctggtagtatgtaaaatccacacttttctcccaaattatagatttcaaaaatgttgactttattttttgtttgacttcgataaagaacaccgaatttttaaaataaatatcttttgtcaccatataataacagttcagagtttctcacttcttcttcttcatgacttcatcaatggaggaagacgactcgatttctcctgaatcaatctctctcgacactctagcttctattaggtcactcattatcaacgccgacacttccgactcggtgatttcctcggtgttcgatttccttactggtcttctgagccgagggaactcggcgattcttcaccatgtcctcaagctactctccgaccttgctttccggcgaaaggaattagcaccacaaatcttcgattcaatcctgtccaacttactccgccttcataacaccgtcgctgaggcgagccacgaacgcgccgccgtggaatcgcttgcggtgcttgcgtcattatccgaacgaacccctagcatcgccgccgcgctttccaaaatcgacgacgaggtatttgcgtcgatttgcctcggagcacctatatcttctcggctgtggctacttaggaacgcggataggttcaatgttccgtcgtctgtactattcaccttgtttttagggtttagtaaggatccgtatccatatatcagaaaagtagctctcgatggactgattaatatatgtaacgctggtgacttcaatcacactcatgccgtagaaggttgctatactcgtgctgttgagcttctaagcgatgctgaagatagcgtcagatcttctgcagttcgtgccgtgagttatttctctgattgatgaaattgcggttgtaataattgttatatgctagacatcatatcatatctgattggcggtttgaaactttttcaaagttcaggtcagtgtgtggggcaaagtgatgatagcatccaaggaagaagagatgaacagaagggattgtacagatgctgtttttctccaggtaattagcgaataccaatttcgtttttggaacttaaataaccaaatattttatgttttcttatacacttgctctcagctttgttctgtagtgagagatatgagtgtagacgtgagggttgaggtcttcaaggcatttgggataataggaactgcatcagaaagcattatattgcaaacactttctaaaaaagtattgggagctggaaaagggaagaaaccgcagaatcttctttctaatggatcagctgatgtcagttctgcagctggagtttacatccatggttttgaagatgaattctacgaggtactcttatgataaatttcctttctcgttttgtctgtgcaacatgattccattatgtgcaaaccatttaagtaggtgtttaagaagtttagttgagtttttattgttgctggactaatacatacagcatttgcatgcatcattttgaaggtacgggaagctgcggttgactccttccactccctctcagtaaattctatcaaattcccagatgaagctgtgtatttattgatggatatgctatacgatgattatatggttgtgaggttgaaagctttaaaggcattgcatcatatagcagacttggggaacctgaagatacaggaaacttatatgcctgccgtaagtcaccatattctttttgctctttttttcttgctatagtactgtttaggtaaaaagctaatgaaaatgcagctgcaatacttctcttgctatacttaataagtttggtgtcttgtctcgagttatccagattttatgcatatcacctcctatcggtttatgcccaatggagtagcttcagaattgtttgctctctagggcctaatgcttaataggacattaattgatttgctactaaactaaccccggtgtcatgaactccatgtgttgtcaccttgttcgatttggctatttttttgctatgagttgtgatgaagagctattacttgactttgcagtttttggatgctattgttgatacttctgaaaacataagagttgaggctagaaacattcttaaattggcaaagctgcctgatctgaagctggtcaacaaatgtattgacggtgtcctgaaaagtttagagatgtatccacaggttggcacacttacctataaagttcaattagcttctgatttcatcatttctttctttttcttttcgtgaacctcaaattttttgctgtttcatcctaggacgaacctgatatcttgtctgctctgttccatttcggacaaaaccacacaaatttcttagtcagtatggtcaagagatttagtgaaaaggtaagcgagccttttttttcactctttttcaggattcgtcaactataggcatactaatcatttctttgctcacttttgcatgctcttcagttagggacagcttctggaagtaaagcggaattcaatagccggcagttatctgcttctctgacgctgataatctcagcccctctctcaaacaaacaaagcatcacttcgataccacctctggcattttcatattcacttgcaatgctggggaaattctctagtggacttcatgatatgatggaccaggatatgcttctggcttacttgactcattgcgctattctttcttcttcttctgggacagaattcaacaaaggagatgtattttttcatgcatatagagacagtaatgcagatcttgcgggaaaccccgtcctactaccaggtaaagatatacctgctgagagcaaatacatggcttgcaaagcagaactggaaattggaaatcaagcacttaagtttgttaaccatatactgttgaaaataaaggctgcctggctgttatcacaatcagggtgctcgaaagaagcactccgagcattgaggttttatagcttacaatctattgatttcccagcctctgtattactgtttcatgtgtactctaaactaatgtgtttcttgtcatcctgtccagggcttgcaaacaggagttagcaactttgacagccgattcttcaatctccaaaggtacattggactttatttgtcagtacgttcacgttatagaacttctcgttcaagtatggcctcattttaattactcaagacacatcagcacgtgtagttctgtagaagtggaactactgatggaagaggtagagataaaactcatggagataaggtgtagattcacaggcctgtctacggaggagtcattagtattggagctagtaatttttggttgcttgttaaggctatataaatttgagatttgctgccgccttagctgcatggagaagctatcttcaacaatatctcaattagagctccaccatgaacaacaatgcaccaaaccatcagattttctaactgaaactaagaagtcattggaagagtttgggagctctgacgatataaatagctgtagactgcttgatctcatcaagatattcaaatgcttctctccggaacagtttacgttttctgttaatctgcagtgtgtcagtgcagaggtagaggttcctggtaatggtccttacagtccgatttcctttgtgcctggtctcccggtggctataccgtgtgagatcacactgcttaatgtgccaagagatacctgtttatggctgagaatatcaagaaacgatgaaacttgccaatttgtgtacttggatccaaacctctacaatggaaatgggagagagaagaggttcatgtttactgcagtaacgtacatgaccccaagggctgttgtgttcacattgcgggtctcaataggcattgagtgtttgtttgaagacatttgttacagaaaacagcgtcatggtcccaagcatccagtggcctatctgtgtaaggaaagagaaattcacctttctcttgtttcaagaacctaaaatgtcagtaaacgtactatgtgaggtattcttcacattaatgagtctccagagagaacccgtcatggctttaaaagagctggtaatttggctaaacgactaagagggttgacatgggatgtgcgatgctgccgaacatagagtttggaagaagatttaaagtgttactacttttgtagctactcattgagacaagtttttgcgaaaatgcaaaggccaatgccagtaaccaaaaacaatatatacaactttgttgtgatatgaatatgggcgattttccagagccataaaatcagttggggatatgaatatgggcgatttttttgttgtgagcttgtcaatatatacaagtttgtacagttttaaataacagtgactcaataaaaaaattagaatacatatctacgagtttttgttattgaaccataagactgaaatattgtggattatttagccaacaatttgagcgtttagtttcaaatccatcagagaaacactcttaacaattcatgaaacactctttaacactcttacatttcttatgcaacattttagcttccaacatttcaacacaaaaagtgcttcaaacaacgttttggtctggaaaaaaaaaacaacgttttggtcagaaaataagcttaacaaataacgagtgacataatatgattagaagtgaaacaagagacacaaagtcactcttcaatctttgtgacgcattcatcaaagagtagcaacaagaaccttcacaagatcatacgatgtagggactgtaagtaaatcatcaacccactcaaccttcccccaaatttgacaacttttctcccgaaatacaaaacttgtgcgcctttcaagcgcaatcaccgcacactgaatcgtcttatgaaagccatgatgataaggcaattgatcccacaagaccgccatctttccaccataatcagccaatataacacaagcacccgcagagaacttaggtagctgaaacaaacccctcaaatctttccaccttcttacctcagtgtcataccatctgaacattccatcggatacagagtacgaaacgttatctatcacgcaataagaatctggaagcataaaactacccgccccaagtccaactaggtgatcccatctaccttccttggaattgtaagcaaacaccttaaaggagtttttccgggaatcagaatacccatggccgccttggtttccatcacggacgctagcagaaattgaacttagctccaccggcaagcttggagcctcccgccacgtgtgagactgacaatccagaattgagacgctagaggaggaggacgctttgttgatggatccgcaaatgttatagatatcagaaccaaccgccacgagactcgaagatcgtacattaggagaaccaccgggaattgggactctagccaaagcataaccacttgacttcctctcctcataggttagggtttgatcaggtttacggctgaggctaaaccagcgataaccagtagagcaccgtaagcacacgtagagacagatctcggtgtttcccgagagtgacctggctttgtaaagctctggtgaagctaggagagatcgaaagctctcggatacgtgtgagagagtcggatagtacaatcttgagacgcgtgcgaagatgctcaatagcacatcatcgggaagtgacggtgacgggttttgggtcgaatgcggctttgaccaccgactcctcttcctctttctttccgggtaagacattgacggagttgaatcgccgttgatcaaccagggaatgtaatttagggatttgtggatatattttgttgtggcggcaatattactactatttatagagttgcttgggctttttgggccgttactataattgcaacattttgatcatacatgtttgagatggaccaatggacattgatttgtttgatatgtcttcttgtagtattgagttatgtactactccacaaaccggacttaaatctatatgcaacaagtttaaaattcatactttgattttgttcatcaatatgtactatttatctagtatgtttagacatgtgacatgtcaaaaaaggtatatttctgtctctgccaacttttcttaaaaaccatgtaacaccaaaaatatgtttatttcttccaaaaatgtcaaagctacaaaacaattacgttttcacatcagtttgttttaccatagcgagctcaccagtagtcattgcaagaacaagagccgtttgtaaaacaatgaaacctattgttgtctctaacaacgatctctcgtcttgtgatcttcgatatcaacttcatcacttcatgacaatctccacatacccttagattcttcaccacccgaatcacttggccatgatccgtactgatcagccctaacgcaaccgcaagcttctcgctgtgataccccaagaccctttctttttcttcctcttcaacatcgaagaaaacaaattctgtcgttggaacaaaacccataagcctcatttcattacccaaatcttctagctttgcatatatcttgtcgcttagaggatgagatttatcatctgctagaaactcatggaccttcccttccaactcgatccaactatatcccgggatcttcttcatacctttcttgttcatcatgtcccttacttcagcagcttcgtcccatctgccaccaacagagtatatgttggataattgaacatagtttcctgcattccatggctccaaagcgatgagctctttgagaacagtttcagctaactgcgtatctttgaccagtctgcatccgctcagtaacgctccccagactatcgcgtttggcctcatgggcatatcgcagatcaaacggtatgcgtcatctaacattcctgctctgccccaaagatctaccatgcaaccatagtgctcaaccgtgcgtttcaaagcataaacacagcttatggcattgaaaaaccgaagcccgtcttggattaggcctgcgtgaacgcacccacagagcagtccaaggaacgtggacccatcaggtgagatacctaacttctctgtttgtccaaaaaccgcaaatgagagcttaacgtggccattcttggccagaccagaaattgcagcattcatgataactatatctttctccttcatttctttaaatacttcaaaacctcgagccatagccccacatttcgcgtacatgtcgatcagggcattggccataaacagattggtcaaaaactcatgcctatctattaaactaattccccattcacctagatcaagggctcctaagcttgcacaagacgaaagaaacccgacaatagaaaactggtccggtttcagattttcctgcaacatctggagaaataactctattccttcttttgggaagctgttcgatgcatacccttgtatcatagtgctccaagtaactatatctttctccaccatcgagtcgaaaacagaacgtgctttctccatcttcccacacttggcatagagattgacaagtgttgtccgcacaaaggaattcttctgcatctccatctcttccatgtacttaactatccactccccactgtcgagatcccctacatgaacacaagcagataaaacctgaacaataaagtagctatcgggtttcacacccatctccaccatcttcttaaacaaatcaatggcttccctgtgtcttcctgaagtagtatacccactaaacaaagccgtccaagtaacaacgcttctgtcaggaatttcgtcgaacagtttgtgggcatcattcaaacgcccggatccagagtagatagagagcaggctcgtcatagcggccacatcgtgattaaacccacatttgaccacaagggaatgaagatcaatcccaagcttgcgactcgaggctctggtgcatgccttgagaaccaaagggaaggtgaaaccatggaggtagagaccatgtttgcggatggagaggaagagatcgagggtttcatggaagagatgattattgacgaagccattgatgagactattgtagaggaaaatgttggggaattgggtatgagagaagaggagataggagtatttggtttggcggaagaagagagttcgcttgaggaggaggttgacgaggaaggtgtcgtggtggagatggtggttaatgagagagacgtggatttgtttcagatgattgacggtgcatgcgacggagattagagttttgatctgctggacttttgatgttgctgatggaacggtgacgatgctcatcgcttttttaaaacattagggttacctcccgccaatttatcactcttgaaaatggacatcgctttaaattcgaattttaatgtcttttcgtttatttttttgtttttttggtaataataatatgcctgtatcagatttgatcctatgcttttgtatcaaactaatccaaattaaattgttaaaattgttttctctcattttttcgcattgcttagttcctcttttgaatcacaacctcataagaagaatagctaatttagcattactcttttctttttttggacagctaatatagcattagcatgatattgcaaatttacaattcataaaatatataccgaaatgaaattcaaatcatagctcatacatatgggatccactttattttaatcatatgacgaaggcatcgaatttacaaaaaacacactaaacttgggaataatgtaaatacgaaagacaaagaaaagcttacacaactctctgcgtagcaagatggagcagagtgcgaaagaattgaggagggtacattggcggctgctctgctaatgcctttaggtttccaatatcccaaaacaaaacaaagaacatgttatcgtctatgtactcatgaggagaattc

SEQ ID NO: 1281 - DNA, 80381 bp, Arabidopsis thaliana
aagcttctgtctctaaactggatttgttagttacttgtgactataattatttatccactagaaccaaaactttacaaagacaatatctatggatcaatttacaacataagagagtgttctctagtactttatataatggtaaagtgtgaatcttgatgatgttcttcattctgttcaagtgtggacctgggtagagacaatcagtactactagtcttctactagaccctggaaagtttgaagatttgttactttcctgcgaaattaacaagattttcccgggaaaacagagggtgatcgatcaccgttcttcgggaaaccattactcgacggataccacaccggagaaactagaagtttcccagacctccacaccttccatacattcccgagaaacaaagagccggtcacctcctgcttcaattttcgaaatcatccctctcttggaatcatcttccttgtctacaaagtttctcctgcgaattggatcaccacttgtcttctccttaacacttgaccatacctctaatgcaccacctctggcggccaacacttgctttctgtaacaatgtaccacgctgtaaccacctccgtcgccggctttccaggcaccgggattctcgtctgacatatatacccatggatcttcacctaatttacgaatgtctgccattccgaggtctcctgacttggaacataccttgaaaaggatcgagtcttcaacgtccacgtccatatcagctaaggcgtctccaaacctagtgcttcgtcccgatcctggctcgttcgtttcccatacgatgttcctggaccttgggtcccaaatccggatgtagccagagcaaccaaacactccacgttgaacggctgatcccaccaaaagacctttcgctggcagccaccggagtttctccggtactgtggttttagccgagtttccagattgctgaccgatcacggcggcgacttgaagagtggatttgtcgatctggagaacactgttctctctgtgcaggcaatcaaaggatgcgaatactccaccttccgaatcagcaacggcggcgacgcgtgccttatggatcctcggatcttccggatccgtccagtgcgtagatccgatgtatcgacctccagagagatcgtagaaatgaagtcccgacgcggatccagatccaattgcagcagcttcgccccagacacggcagatcgatgtgatatcgttgagatgtgtacggacggttccagcatgggaaagactccaatcgtagacggagatctgaccaccgtgagcgatccacagagaggcgtctccagcagtagcggttaaagcagacgggactccatcagcagccggtacgattgtggagacaagagacgcatcgaaacctagcagcggcggcggtaacatcgccaatctgaggagtgattcgacgccgtaatacatagcctcatctagtagctcttgcttggaaaaaacgccggaggaattagctgggagtcgaccagtacggaggagattgagaatgacggcgaaaatctccgggtcacgatcgatgaaaaccggattcgatccatgggaggttgaagtcgatagagctgcgaggagagagtctgggcaagatgattgaatggtcgacgcgttggtttcgaagatctcgccgccgacgttgagcttcactcgtttgccgccatcggaaaccaccatcacagtccggttcgagtttcgatttcagcttgaaccgagtttttgctaattgggctgtgtgaagaagaaacgtaattgtaactgatgacttgtcaacttatatgggcctgtgctaatctctataggataattatcagcccaaacataaaaagccagaaccatcctgataggagctttatagagagattgattttaatcagggtttaaattgaaagaaatgaaaaaaactgagggtttcattgttaattacaatttacaagctattctacaatggaattacaaaatgaaaaaagaaaagtcatgatacagatacaacactgtcacaaattatacattgatttgaaaccaatttatccatggcacttccttgttcaatttcgaattttctgctaaacttattccacaaatgcaatccatagcttctcttctgcatttcaagaaccttgacttgaactctctttgaatctttctctgttcttggaaccttgaatagcttctcaatctcaacccaattcactggataaaacgcaggaggtgtcaagatggtgaagttatagccatcggttccttccacggctcgagccactcgtgaaacaagatacggtccgttatgtccccaaacgtttccattaaaagtcaacgcaaattcttcaatggatttgagcaagaatggatgattcttgtcgaagatcaataccgcattgttcaatcttgtccagtttctcgaaaccggctccagagtctgcgcaccgatcacgttccttagagttttaaagctctttaaaacaatcatgtctgtgtctagataaacacctccgaatttgaacaaataagcaagtctcatgaggtttgatagattctgagctagagagatctttcctggatctcttttaccggtctgaatctcttcaagccaagattctccggctgtgtccttgagaagaaaaggcaaatccggcgtgaccgccataactctgtaacctcgatcaagaaacggtttcaggattctaaacccttgaagagaatccattgtggatgataaaatcatcaaacaacctctagcatgagatttgaatacgctttctacagataatatctctctcttaccgaacaattccgcaggtgagatccatgtcatcatgaacttgacctcacaatcatctctcaaaaactctgttgctctctgttgaaacttctccgacacgtctttgcctccaaaaacttcaagaacttgcagtttgttaatctcttctttgactgtgatttgttgcttgatcgaatagttattgttgacttgatcacttacctccttctctgagcttagaggtaagtaaggaacaattgtcttgatctctattgtcaccaccttcgctgagaaatcttctctcaccgataaattagagacgagaacgatggtgaaaacgaccagagctataaccgtggaagcaaacgctgtgaagagtgatgatccagagcggtttaacctacggtgatcaaacatcgccctgactttcgtcgtgatgtcatgatccattttttggaaaataagttaggagaagaaaaaaatagtgaagtctgtatttttttgtttttctcttataatttgtgttgagtttcttgcttgcttggtgaagaagctgtcgtgttttgaaaagttcttaagcagccaaagcaggctgacttggacgtagattattatttgttatgtaattaaaatgggaccatacgcttaaataaatgatcatgatttatccacatttcacttttatttttgctacatatagacgacttttctgtgatcatctctatgattatatccattaggaccctgttcattattttcggattgatatattttggttctttttggatatatcaatttagtgagcacagctacattatccattattttgaatctttttattacatgttgatgatctttagaatcttctcgtaatttttaaataaatatttcttgcaaggacaaagcaactattaatctgtcttttgatatggtcttaatcttctagctttcataattgttattaattattaggccgcctatggtggaattttagtagttaaaaaaattcttcctaattataaacacgcttactttcatatagttgactgacaaataaaacatttatttcgttgaatttaactattttcttgctataactaagaaggcaccttaaaaggctcaaagcgaggtactaaagatgtgtcaggcactttcctcgtagttcagtttgttatatttagtttcatcagatttttttattgtctaatccatccttcatattgttttttgttttttcacgtacaacataattgaattggaaataagtccatatacatctttcatccaaacaacttgtcaagttatggaagcatcttgactttgacaattgaaagctcgcatagttagttgcataaaaatctgttcccaataatattatactcatctcattattgccgatggtttagtaagttaataaggtatcaatcattcatttcaagaatgttgcaaatcaagccaaatcattgaatacaagaatgttgcaaaatcatgccaatcataattttaaactgctggcttctgacacaaagggaaatgtcagacaactacataacattttatcagatagcatctttggtttattcatatataccctatgtataagatattaacacatcataaactaattaatatactcaagaataaaattgtgctctattaacagaaaaaaatcatctaggagccaactctgtgatgctctggaaggaaatattagagttggacgtcgacccttgaggaacggctgagcttttccctttgtcacgttgcgttgacgagctctcctgtgagctgcctccttggccgaccctaagaccgattccacggtggttgcgtcccctgttgacacctctgtagacgccaggttccgttaaggcatcctcgttgaggttaagctctttcctgcgaagcatctccatcacttgcttcatgtttggtctcttttgcgccgcggcttgagtgcagaaaagagccaccttgatgaaacgggtcacttcatctgcggggaacttggttagttctggatctacacactctagtagcctcctttcttctctcagcttccacacctgcccaagacagagtttaaagcattgaatattgtttgttttcgcattttacattttgaaaatgtattattttttcacttgtaagaaacattaacacaaacatagagctatatatatttttgttgaggtacgaggcttttagctttacccattcaacaagaaccatgtactcgtctccaaaggcggctctggtgctactattaccactaatgacctcaagcacaagtatcccgaagctgtaaacgtctgctttttttgtcagttgaccaagaagtgcatattctggagccaagtatcccctgtagtcgcagtttcatcagctgaaaatacatgtagaggaaagatggaaactgatatgtttatagagggattcttacactgttccagcgactcgggtactgacatgagtgacattgtctggaaaaagcttagccaacccgaaatcaccaattttgggagaaaagtttgagtctagtaagatattactcgccttgatgtcacggtgaacaacatgaggttcgacttcctcgtgaaggaaagctaaacccgaagctgtcccaacgcaaatcgcagctcttttggaccaatcaagcggtacatatctactccttgaacctgatatcactcaaacaagatcagaaaaacaggacacaaatgggatttggtagacaagaatgcaattgtggcaaaagttaccaagcaaaacactagcaagactgttgttctcaaggtactcatagacaagaatccgattgttcccttcgatgcagcaaccgatgagtttaacaaggttaggatgatgaatgtttgatatcaagttaatctcggtcaagaactcgcgtgtcccttgtttagattctgctgatagtgatttcacagctacttgtgtgccatctctcaaaactccctgcaagattcaaaaccctttactacattcaccagaagaacctcaacatgatttaagcagattgtaagagaagttatcatttttattaccttaaagacaacgccatagccaccacctccgattctgttcgttggatggaaactatcagtggctgatcttaatgaattatatgaaaagaccctcacattgttggtgcaaatctctgatttttcaaaagaccagagaacttttgtgagatatcatcaaataatacaaattccatgttctaattagcacacaagattaagatgaagtgacttgatatttggtcaaccattctcgaattctacagaatctctagtaacttgtaagccaaaggcagaaacaaaattgagaacaaaatttaaaaccctaaaaataatggtaaagaccatcaatagaatataccttcagcttctctttgtccaagacgatcacttccgttgcacatatctagaagtccgaagcaattataacgcatcacaaacacagacaaaaattcctcccaagaacagaggaaaaaagctcaaattcaaattcacaagcaaaataatattcagaaaagggtttgatagagatatgaaatggaacttttctttaaaagaacctcaatttcgacctgtctcctcgatactaaatctataaagtaacgatgagagaagaagaagaagaagataatgtgtttatttgctagtgcgaagaagaaatctatattgagttaatcaaagagaaatcatgagactgcttttgtctgatttaaaatttaaactttttcgtgaagatgtcaataaattgttgagcatacaaagcaaaccaaacccagaactcatgaacagtgaatacgctaaaaggtattcaattttattttgttgtttatgttcggctgctgatgctcgaaagtgacaaacgaaagtgacagctacacgacgacgagacttttattactatattttattttacttttttcacacgacgagactattataaaagtcgcactgattagatttcttctttaattattttcttctgcctgtaactaaggcaaggttagaagaattcaacttcaatggattttatagacctgtttattacaatttaagtcacacaaatacgccaaacaaattctatcacttacctaccttttttttacattttacaataattgtcctcgtaccgtttaactaagaaaggttctcatagactcatacgtacatacgtatgaattaagagcgatagttactaataaagttttgtttacctgaccaaactacacggcacatttaatttgaccaagttcttctcgccgttcagacaaccatgcatttatatttttctcttaaaaaagaaatttttgccaacattttataacgtcatcaaacgagcttttacttgacgtcatcactacgctgacattcaatcatccaaagagaaagttcgaattctcaaatcccaactcaatgatccaaaaaggaatttttgttttcacattgccttgcgtctttctttctttcttaaaacgaatcgtttgttaatttctatcgattgcggtctgaaattgaatttacagttggcacatgacatcatcgttccacgaaaatcctccattatttcttatttgcgccacaaaatcaaaacttgaaaagtccaccttgttgacaaaaaaagtaaaataaagttctaaaatgtttttgaccaattttcaataagaaatagtaatcgttataaaattgtagtaataaaagtatttataaaaaaaaaaagtataaacacgattttggtggagttgtggcatgtaactacttactttactcgtcacttaaaggtctgatttcttgttgtctctaaacgtgaagacgattcaccgaatccaaatcctcacaacgacatgttcttcaagtatatttgactctcttataaacctaacgagacaagtttatgaatatgttcctttgtttacacttgtaagaaaaccgaaacccatttacatgtctctgtttcgtcccttcatatagtataaaagattcaaatatatatctggagattcttatcgtacaacttttttttttgtatcggtcatattggaatgaaccattttggtacatgccaaaagctgtaaattttcaagtaatttagtggatttacaaagagggttgtcccgcgagatttaggtaccaaactcgttaaattcttcttctatgctctgttttgtcttctttactatttccatgttttgttctgtttctcgattctcactttgttctatatcttggtttaaaatatcagacacagcatttagcaattgctttgggagaacatttatgaaggaaaaaagacatttgatgcctgaggtttatagattatacggttgatcacttagaaacaagttgcttcgaagcgtgagaacaaaaaacaagaacacagattacataataatatgggtcaagatgtgaacttggggtactggttccgcggagaagcagcatagcttctttcactaagaagatcatcattttcggcttcgtttccgtctaagcacagaatgttgatgttgtcaacactcgggtcagatgagctcacagtgctgctcgtggccaccggagagcttgagacactacccggccgacttctcacactgtacattgatgatgccggaacttttgtcacaagcggccggaggtttccagtcatgcctcgtcttatatcctacacaccaaagatcgacaattgtgttattattaccagagaactttaagaaacactcttcttgcgagtcagatcatccagcttgggcccaatgtttaatctatagcgagcttgtgagaaactctcaatcgaagattttcggatgctactctactctcaacaaagaaaatttgactaaaattgtgagacgtgatcgtaccatatgtcttatggccatatcgattgagcttttggagaggtttctaccatatccaaggctgttaaaagctgagctagatttccccgatcctcgaccaccattctcggttagccgcggtggacctagtttcctcatgttcaccactctctcaaccattttattacccatagccactgggctcaagttatcacagccacttccgccgttgcttgcctttgctcgcccacgcacaccagtgagactcccgttggtgttcccgataggagcccgacctctggacggcgaacaagattgccttcttgcatttccgctgccgccgctggtggggccacctccgcgttctatggaaccagatcttgaacctggtgctgaggctactccaggtctgcctcttgaagctgagaccggtctgtctgctaaagtcgtcctcagattcggtggagcttctaaagagaaaccaggcatctctggtggtttccacggcctcgacgaattcaaagtaggagaaggagaagtccctcgggacggagccttactcaacgaattcacagtaggagaaggagaagtccctcgcgacggagccttactcgaaactattgatggaccggtcggggttgaaggcctgcgggttggtgtggctggccttgacactggcttttttgaagatgcagaagacggtcgaggattagaccgagttggagtagctgatctcgctgaaccgcttgaagtagtagtggttcgtggagctgctgtagatgtagtagcacgtgcagcagttaaggtggcacgtgaggtgggtgttgaggatctagaatttgaagctctggtggtcacgggccttgatgtggaggtggttggagttgtagaccttctggttggtgtggcaggtctgctcgttgaccttgagctaccagaagaagatggtcttctgagtccagctacagaggaagagcttgtttggggcttattattgttccctgagacgatatcttcacgacagttccctagctgcagaacccaacacaagagtttcaatgcttatcaggataaagaaataacttaaacttggaccagaggcattataagaaaatgaattagttctgtctaacaagttagtttatacccgagatttaagaaccgtgggtcgggaattgggagcatcgtgctgattcattacacttctatgtgactctttctcgaactgtggcgtgcctggaggtgttagcagcctaaacaagagacaagaacatcagaccaatgattcgctgaagaaggagacatataattactctctagcactaagctcaaatgaggtaaagcaagaataagtgccactttattgtgttaatttcaatctaattaggacaaattcaattactagacgtataatcctaaattaccatttctaattttagaatgcacatacacttgcaacaaaaaaaaattgagattttgcttgcaaatttctgatactagcatagatattttagaagcaaaataaaaatggaaacattaccaatcgtaatcagacttctcattctccgaatatagaaagttctcagcagcggttctcctgagaggataacgttgagacgacgccgtttcggagacaccagagagagcagccgccgccgcagccgtcaacgttgcgttgatactaacattatcagatcctaaaagagacagaacaaattcaatcaacattgccaaatgattattacataagtttatataaacatatagagagagaaagacagacctgttaaaagagaatctgctctatgttctttctcgcgacgacgcatctcaaggaacagagagagttcttcatctctgtcgtgggtcaacattgacgaaagctgagattgaaattttctgggtctcgtgtctgaacttgcacaacaacaaattatctccaaaataaaaagaaaaatagaatcggaccaatcagatctgagatcacactaaggagaccttaagagagctggaacagccaccaatgagaataatagaagccactagagaacagaggacaagaacccaaaaccgttttttaattgattcagagagagagagagagagagagagaagttttttgagttgaagaagaagaagaagaagggagagagtggggaagatgttcttcttctcaacaacgagatttttcttttctttttaatttgttcaatttttttaaaattctgatttcaaaccagacaaccccttggtcgtaccatatctcttgtttttttctctcttaaataattgaactatgggttttgaaagtttgaacagaacacgaagcgtcgggttcaaaacgcagatgatctaaagaaagagcccacgggacacgtgctctgtctttacccatgaacatgctatttaactacgaaaatgccacttgtgtttttatgactccaaaagatttatggtggatgctgaaagttatgtggttaaagctgcaaaaaattgtgtggccatatttggaaaaagttaattaagattcacaacactccaaacatttttacccctcactagatagaatgacattgaattctatatacatgttcaagtgtataagtataactataagcaaccactataaggatggtagagaaccatcagtggaagtaacttctggtagttattccagatttcagataaattagcaaaaatggctacaaaagttctattctattattagtgcccattgaataccttcttcttacaatcttatgttactagttttattttattcactgaatagtatattacacgtatcttattactagtagataagataaaagtaaaatatattcaaatggtaaaattggtgtgtataatttcgagattgattcattcactggtgtatgtgtcgttagacatatcaatgaatgattgaattctaatcgcacaaaacagtttccgaaaaacgattaacaacttgatatgcattataatatgagttttaaaattcatagaaaaactatatttgttacttatatgatgaatatttggtttcttttgaacgcttacacgaaaaaatgttgaattttttcccggcgagtttcccggtcaccgatagtctatacgaagcattgaccactttccaagtatttccaatgggtcgttaaataacagagataccatatttttattcttcatcatcgcttccagtcataggctcgttctggttcatgtcgtatcctcctccatagggcccaagcaccttaaacctggtcacattggttacacaacatccactttaaacctgatcatcgtttgaatcattttgcggagtttttattaaacattgaaagatgaaaacctttctaagatgaattttccttccttgtatttctgagacttatcgtaagcgatttcctgagggagaaaaagagaattagcatcaaatcatcacaaagaaagttgtttacaatgtatgagttttgagtcttgtacgtatttccagccgacaagagagccacagctaacacagaagatgtcagctacagtgtgccaaccagttatcatgacgcgatgctccttctctccaaccgtcacattgacactaagaattcaaaaaggtgtgctaataaataagggaaccttgtcacgagtccttgcatgatcaaatccgtgtaagtagtacttacacattgtcgaaaagataagcccttccgtgtttgcagtgaaatgactggaaacaacacaagcacaaacacaaatcaggtagctgtttgatcaatgcaagaacatctatcgacactgtagaaacacaaatcatggtgcgttcgatcagtttaacagaaaaataggaaacaagaactgaaggtcaattcccaagttgtttgattagtaaggaaatgaggttttgtgtgttctaatcatctggtctcaagggtcaattcaggagcatgaattgatcattaacaacagaatggcaaattcccattttccatgttttttattatctgaaactgtaactgtaagttgtgtgtttcagtcagatttctgaaaacttgtatattacaaacacaagtgtgaaggctaacaagtgtactagaccaagatattaacaagcaagcaagagcaaagtataaatgtaggaaatggaaatgaaatgaaggatgcataaaaagagaagaaagggaagaatgtgactagaagaaattcacctttgagataatatcattagtaactgcgaaatgtgtctgacaatacttgcagctataaaccagtccttcgaggtctatcacgaatagtcttcccatttcgaacaaacccacctacctgaaaaggcaaaaaaacaccaacagacagatctcagtttccgtcacagatcttgaacaatactcacaaaaaaattgaggataccaagcaaaagcaacttaagattctgatctaaaaattgaaggggcaccgattgaacagagaaataaaccacactgaaacgaaaccacaaacaaacagccaagaaaattttcacagaacaagcgagaaaattacgatcaacgaagaacacatagccaaaatcaagagaaattaccagagaatagttcgcgtttcacgaaacacaacatttaattggtataaaatggaaaaaagggcggagagcgttaatctcgagaaaaggctttcgatcaaaatgccaaaaaaaggtaacgaaatagtagtaactaagaaacttgcgtagttcgcaagacgccgagtggaaaatgaaggaaaagtaagagagagaaacagataaaagaaaagaaaatctcccagaaaatttccagcaaagacgagaaaatttgtacgacagtgaaaattcgagaaaaaagaaaaagaaagaaagtggaggaacaaccaaaattgatcttaccccgaaggagaaacgccagagcaaggaggaggtttcgaattttccatgcatttatttatataataaacacttattcttccaggaaattaacataaggaattaatcacacttaccacgtgtacaacattgtaatttattacagcatttatttatttcccatggtatgtcttttcttttctgattggactagatttaattgctcgtgttcgaacaagcgaccaaaccggatcgaccaagtgaatttaattccatcaactggaattcaactgaaacaaaagaaatcgaagctgaccagaaccgatataagaacgaagagtgttaattggtatcattgacacgtgactttggttccgatttgagaacggagtatttaagtgtcgtttatttttctatttaaaaaaaaaaaaatgggatagaaatgtgaatttgagaattcccatagagatcttgaggaacatggagacgtcctacattgtatgaaaagggaagaagaaaaacgacctttcaatctttctgataaaccattctttggtatgaagcagattccttaacagagaatcttgaggaagggggtattcatttggaacaggaaggaacataccttttcattctccattagcattatcgaccgatcttgcttattctttgaggaggccacatgacacgagtgacccttccttgaattaaacccaaaggaatctgccaaaacaagtttatccagatcagtcacatgggacaggccttgaaaagaatatcatgtgcatcatctacgttctaattctatgaaactatgtgctggggtttggaagcagagaacttacagggccaaaggatcttgagtctaagctggaagttttgttatctccttctacccaacaatgaccttctgggactctgatcacatcccgagaactacttatccattcaccaggcatcccgactatcctctttatgtatctatctccgaaatgtgtcggagagctgccacagagatgcagttcacatcgtcaggagcttaatgatgtatttcaaaatatacaacttagaacacatacggcacaatgtcagatgaacattataaaacagatttgagacctgaaaaagctgagctaaaggaagcaaaaagcaagaatagaatccaaagagtttgtattcatgaccaaatacattatatcaaatgtaccagagattgaatatgcacgaatttcatggttcagcaccacaaataggacaacaaacatttgtaaggttttagggaattagatttaataaaattgtgaatgctgtaagcatccaagaaaaggtttaaacaagagatcaacatgtatttaagtattatgtagctataatcttcccttgtcaaaggatgactcaaatgtggcattatagggaacatacctgaacactacaacatcaccacgcgcaaacttgtaatccttaaggcaaaatttgtccacaagtacataatcatctgcatcaacatttgaacatctaataagaaagaagaatggaccaaaataagcaaaagtctaccttctagcagtttgtgcagtaggacacttacctaaataagaattccgctggggattaaatgtgggagacatggaatctcctctcactggaacaacgctacaacatctatctgaaatggtaagccctataatacttccagtgaatgatttcttcgccacttgccataaaatattctggattcccatgtccaagatggcctaactaatatctgattctcagcaacattcatagaaccatctatctgcaacaaaaccagaaggctttatagttgatacatcatttaaatgagatttaaaatacaaccaatacgattatatcaaacagaaaaccattttagatcaaacactacagtctaaaaccacagcattgtcaaccagttaatgaatcgggttttctaaatctaatctcaaaccatgctaaaattagtgaactaaacctaatcgattcatggaactgaaagatgaaactaatctgaagtgtaagcctaatcgaaccgtatcgaaatcgaccacaggactgtgaaaacaaaaaaaacgcaaaatctaacgtgattgtaataacctgaaaatggaagaaatccaggtgcaaaagaatgagagttggaacacaacgactcgcaaatcaattttgtgaagcggatgagagcagagaaccagagctcgcgacgatgtgaagaagaagaatcagggtttctcttttgctctacaaggtttagctggtaccataaattagccggttcaatcaaaaagttcgtgtcgcggatttagtctggtttcttccggttcgtgaccgttggattcgcggtcaaaggcccgaaggtcactgcggcttttaaactgttattctgccaaaaagtaacactctaacttgtctatagagtgtggttaactggagtaaatcagggtcactgcggcttttaaactgtttttaccggtctctaatttcagaagtgtgttggggttcaaagtcaaaaccccaacattttcatatttataatttgtaataattacaaagaactcagtagtcagtactcagtacaatgacataattctagtcctatagaactgtttcacgtctcttgacaatacacaaacttactgtcaaaagcagattgcaacacaggaaacgtgaaaaatcacccttttctcctccaaaacgatgtacatctctgaaactaatgtctgatgaaaaaaaactttcatttgatctggggtttctgtcttgtctttgtgaactgtatgtctccgttaagaacagctgctacgaatttctcaacttcctcaatagtcatatcgcctttgaatgtagcaaacttacctcgtcgaggcttgtaagctattaggagcttatcagaagaagttttgaactctgatttgtcaagggagctcaagaacgcagattgttttgttgcgtctagaagcgaataggatactgtgtcctgagaacctgtggttgaagcttgtcgtcgagagagtgatttctgggatacctggacaaagaatagagccggaggattattcatcatcaagtcaaagaaccaaaagagtaatggcttgaagaaagaacaccgcttcacttcttgaaatttatcaaagaaccgtgtttaactatcatactgagccaaaggcatataaatagagtatagaggtagtgatatatttgtttaccttggacattattgactgcagcttctctttaccatttgacgatctgaaggcaccaatgatacaaacaggagtgttctccccacaaatggagtcaaaatttggtcttgacagaagaggtatcttttctgaggactcgttaggggcttggcccgcctgactcttagaagagaccttcttgttcttcttctctaatccttcaagcaatttaccaagttcctggacagctgatttcagatttttcacagtgatacctgttttcaagacttgcttctccccattcgataaccaaccaactattgccggaaacttgtctacccccaacttttgtatctttggatcagaagtatcatggacctacaagatcatgagaaaaaaatactttagctaaaaagatttcatgtctaaggaattctaataattaagttcaaatttgctgactcgtcattaaacgtggaccagggaaccaccccataatttctacgaccatcagactctcgcagtaacaataattgtaggaatagtgatgtaagtggaaattaaagccaaaatataacaaacctctgtgttgtaaaagacaaatcgtccattgtacaagccacttagaacccgccagatgacaggagtgtctttctttgttgacagaagcaaaactttaggagtcttttgtgagctaacggcagatacatcgaatgtattcagatcaatcttttttgagaatctcggtagatgttcctggcagaagcttttcaccttctttgcaacaagctcttcagtatattctgctaaggtagctttgccacttgatgtgtatgaataaacaaacatccttggagccctacgaggaactatgcctagttgtttgcaaagagaggattctgtttcacaatttaatcgcccaacctgtaaacataaagttaaatcacgtaaacaacaaaagaaactacacttcttcttttaagaacgaaacagaaaacccaaaatcaactaacttgacaagcatatgttttacctttaaagctccttgcaacgactcagcaacttcctctatgatggattcatggtactggcttcccctctgagatggaagatacgacaacaaaagccaagtcatcccttggtccacaacgtccttcttatagacctgagagttaatggttttgatagctgctacagtactgctctttgatttagattcagcattcgatgagctaccaaagccaccaaactgctcctttcctttagaactaccgcccgaaaacatggaaaagatatcatccataccaaaaccaaaggagctttcactaggaccgccaaacgagaaagaaaacgatttggaacctcccccaccgcccatattttgccaaccaccaggccctccaaagttgaaaccaccaccacttgaggagtaagaatacccaccattacctccgggaaaccccgaatcaaatccaggctgtcctttctcatctccataaagatcatagtttttcctcttctcttcatcagataagatctcatacgctgttacacatagataagggtttaaacttgtcaaagccagatcaacaaaaattcaatttgtgccacaaacacatggccatagaacaagaataatcttataatatactaaaagattcgattacaggacacatctcctagggaaatttgatacctaccattattaatctcagcaaacttctcctgagcacccttatctttgtttttatctggatgatatttcagagattgcctgccaaaaaaaatcacaagctacatgagtaaactatttgttgatcatcattcgaattattagcttaatcagcgactagaaacgaagggtgcttacttgtggaaagctttctggatttcacgctgctttgcatccttagatactccaagaacctgaagatgcattcattagttaataatgtttataatcaatagcaaaaactactgagcaaaacctaatatatcaaaaatccttcttttctataacacccacaaatttgtcagcccaaacttcaatgagaaaggggacaatcaaaagtaatcattatttccggccccaatcaaaagacttgtgaatggaaagaaaacaagatgaatcacaaaccgtaccttgtaaggatcaacgctcttcgctttcacattcaacaacaacaatgtcgacacaagaacaacagatatcgccaatcttgttctcaccatcccgaaagtacaacctctcaatctttttctcttttattgttttgttgtcaacgaatcttcttcttcctcttctaagcgtgtcttattcacgaaactcaacgcttcgagaaaaatcgagaaggacatcattaaataggttcgcagggtttaaaggaaaaaaaggaaatttctcgaatgacatatatattttaattaatttagagtattccccatatttaatagtcttacaaaagacaccaaaattgtcaattggattaagaaattggtaggggcaattactcacttcaaaaactagcaggggttgtttcgtatttcctgaaaataaattccggttgcttcccgttctcaatttaaggcgggtatcatacgtggcaaatttgatgcaatcccacgtatctccaccaataagattttagcaaacacgagcgatcgttgtttatttgcgttcacgcgccgttaagatcacgcgcgattattaatttgggcttatttattataggcccaataatctgtagttagcccaaaacgaaagtctccggttgggtgatcggaatccgatcagagcgacggtaagtatttcttttttcttcgactgttaaaaaaaaaagaggaaatcattttcactagtgacattgttacgtttcaagagcttaagagaagttgaaagacggaggaagaagaagacgatctttcttctcttctctgtctctactagcttcgcgttttccttccttcgccgtgagattttatcgtcgtcgtaacaaacctctagggttcatcctcgacgtttccttggttaattaggtcaacaatatcgtcggatctgatggcgttatcggcttccgatttgccggcgatgtacacgctattagctaattcaatgagcggtgacgagaccgttcggcggccggcggaggcggctctatctctgtcggagagtagacctggtttctgttcttgccttatggtagcgtttctaatctatgtgtcttgtggtttctgcaaatgtcagcttgattttactcgctcatttcctctggtttggttgcaggaagtaattgcatccaaggatttggtgtcccatgtggacgttagattaatggcctcagtgtatttcaagaacagtatcaaccgtcattggaagagcagaagaaattcatggtaagttcaagttgtttccggaatcggcaattctacttataattctttttagctggctcgtttagattcttcgctctgcaaagatactaccctgtatgttaggccttgacactctttctggcaattcttacaggagtatgagcaacgaggaaaagagtcatctgaggcagaaattgttgtctcacttgagagaagagaactaccaggtgttgtagcatttacttttgatttttttccttgactacaccatttgaggcatatactttgtaagcatatctatctgactttgtttgctttattgcagatagcggaaatgttggctgttctcatatcgaagatagcccgttttgattatcctagggaatggtcagcattttcccttcttaattcatattaactggacactatcttccttgatttactgagtttatgcattgcgtgcttcatgatatcaggcctgatctcttttcggtactagcgcaacagcttcactcagctgacgttctggcttctcacagaatctttctgattctttttcgaaccttaaaggaattgtctactaaacgtctcactgcggatcagaagaccttcgctgaggtgagtctgctactaacatcaaccccttatcagtttcctttctcctcttgaatgaatttattgttggaccaaagcttcgttttttgctttagttaaggataaggtccagtttaatttgttggcagatctcgtcgcaattcttcgactttagttggcacctttggcaaactgatgtccaaacaattctacatggcttttcaacaatggttcagagctatggttcaaatagtgccgagcagcatcacgatgagctttttctgacttgtgagaggtggtttttatgtttgaaaatagtgcgccaactgataatttcaggatttctaagcgatgccaataatatacaggtagatacactatactttttcatgaatctttttagttcattatcacattcaccttcagctatctcccttctatgaacttgtggtatagtttcgccaaatatgtgttccgttccccgcactttccatttcttctgctatcttccaatggttaagttgaaatcataaccttaatagattggttgactacatcgggatagagaaatctttcttgctctccggcatatgctcttcatgcagataaaagaatatacagctaactcgtttctctcaggagatacaaccagtgaaagaagtctctcctgcgctcttgaatgcggctcaatcctttcttccatattgtgagtttttttgtgtggtggaaactctttttcatgcatatgacctgtcagcacacatatatatgtatgtattgctaacttgtgtggagcctccatgcagattcatcttttcaaaatcgagatcctaaattctgggagtttgtaaagaaggcatgtgtcaagctgatgaaggtgttaggtgctattcaaagcaggcatccattttcgtttggagataaatgtgctcttccagttgtagtggatttctgcttaaacaagataacggaccccgaacaggcattgttgccatttgaagatttttttattcagtgtatggtgatggtgaaatctgtgcttgaatgtaaagaatataagccaagtcgaactggtcgtgtgatggatgacaacggagatacatttgagcagaggaagaagaatgcttccaacacagttggtggcattgtgtcgtcacttttacccaatgaaaggatagttcttctctgcaacgtactagtgagacggtaacactcttaactaacagtaagatatgtgaattcaaatttttgggtctctcttagttaccaaactgtggccctgttatattcatattatttcatgccttagttcttattagttaatttgataatacataaatttcaataccaatgcaaaatccaaaacataatatgagctggggcaatcttgtggacacataatgatctagttgctgtacatctatgtatctctggtctcaatctcttcttgctgcgtgcatggaataaatgagaaggcaatgttactgtcggggcctagtggagctagtttgaaaattattgcatgcattaagttcatttattgtgttgtgaactgtgatggtgtcatggtcgttgtatgaatgatgcctggaagaaaagtttactgaaattaaccatcgacattccaacaggtattttgtactaacagcaagtgacctagaggagtggtaccagaaccctgagtcctttcatcatgagcaggacatgattcagtggacagagaaattgaggccttgtgctgaagctctatatatggttttgtttgagaactacagccaagtaagtagcaaatagtcttaggcacttcatcctgttctgaaaagaagtctgctaattgatatagatatcattaaacgctataactgatgcgtattccatctgtctctataattgtggacagctgctaggacctattgttgtgtccatccttcaagaagcaatgaataattgtcccccttctgttactgaaataactcctgcactgcttcttaaagatgcggcatacgctgctactgcatatgtctactatgagctctcgaattatcttaatttcagagattggtatgctcttgatcttctaatgtctgaatcttttttccatctgctctaaacatcttgacccttcattttgctagccagcagaatgtgacaaaagttttgattagtcaagtaattattgtacccttcttaatgatcggatgattggctgcaggtttaatggtgctctatcccttgaactctcaaatgaccatccaaataggcgtatcatccaccgaaaagttgctatgatattgggacattgggtttcggaggtactgctgtttacttgttttacaccggctttaccatgtttatgcagctaagcttgacaaggctttggaggaaatcacatcttatctttttttctaaaagcatcttaagattataacataatttgcaaattgacataatatcttgtccataagttgagtcaatgagggatagccatctaaaagcagaattgtttctggttatttgttacaaatggctattagggttagttaccctgttggtttgtgttctcttctctaccctagttttcgtcaattagattttggttgaaaaatggttggctaatggtaaatggttgatgattacaacctttcagattaaggatgacacaaaaagagcagtttattgtgctttgatcaaattgttgcaagacaatgacctcgctgtaaaggtagtctcatcttatctcatctttgtttcttttatctttctgtcttgcattaagggcacattctctcatttttttctttatatgtattggtgacctctgagatcatctgtttacttatgtagctggcagctagtaggtcattatgcttacatgtcgaggatgcaaatttttcggagcaaagttttcttgatcttcttccaatctgttgggattcatgtttcaaaatggtcgaggtagttcaagagtttgattcgaaggtacttgatgtagctgcctcaaattcattatagcactccattcttgccattatacttccttcgatgactcatacaacatctaactattctcaggttcaaattctgaatttgatttctactcttattggccatgttagcgaagtcattccgtacgcacaaaagttggtgcaattcttccagaaggtatactagctttctttgtggatttgtttttttgttttttcttttcttggtccgcaatttatagctgactatctatgtggttgacttaagaacaggtttgggaggaatcttctggtgaaagccttctgcagatccagcttcttgtcgcactgcgaaattttgtgattgcacttggttatcagtctcccatttgctatagcatactgctcccaatactccaaaagggcattgacataaatagccctgattcactcaaccttctggaggatagcatggcagtaagtttccatatcataacatgtatacctttcttttctgctgatacaaatgcgctatatattaataacactgctctacatatgcagttatgggaaaccacactttcctatgctcctatgatggtgccccagctattagcattgtttccctatatggtggagatcattgaaagaagttttgatcatttacaggtgagctttttaagttttcaaggagttgtttgattcattaatgacctatacatgtgtgtgttcagatttacttcaacatgttacgtcttgagacattcaaatgaccatatataggttgctgtcagtatcatggattcgtatatcattttggatggaggagaatttctaaatatgcatgcttcaagtgtcgcaaaaattcttgatcttatcgttggaaatgtaaatgataagggtttactctcgattcttccagtgattgacatcttagttcaggtgcgtataatttcccattttcccaattggtcgtatccttattgtgatggtgtttaagttccagagatacttattcttctgttaagtttgtatctagactgcatttatttttgtattacatagcctcatctcttgggatacatatatattgaccagtaatggaacttttggcatgattacactggaattttttgtcatgactctctataaatgtgttgcaaattacgccaagtttaacttcttgatatgaacatgtgcttgtgtattgagcagtgttttcctgtggaagtgccccctctcatcagcagctgtttgcaggtgaatttttctagtcttcttttgatggatgcaaaatccattttcttccttaatgcatctgatggagttggtttgttcgttttctcgcagaaactggtgattatttgcttgagtggtggagatgaccgtgatccatccaagactgcagttaaagtgtcttcagcagctatccttgcaaggattctggtgatgaacaccacttacctggcccagctaacatctgattcatctctttcagtgttactccaacaggcaggtgtcccagtcgaagacaatatactcctttgcctcatcgacatttggctcgacaaggtcagtgaagaacacatcttgaacattactggttgttcgaatagctttctagactattaactttcagataatggaatattaacttgtttcatgtctttacatggtctttttcttgaatcctaagcaatatctcattgtcaaactgctctacatgttgaaatgcatgtttctttttcattatctgacgcactttagtcttgcatctactcgtgcaggtggaccatgcgtctcccatgcaacaaaagacatttggcttggctctttccataatacttacacttagaatgccccaagttcttgacaagcttgatctaatactaaggtacaggtttgcacagtcgagaattaacagtttgacttatgtatctttgtgatataatttatcgcgtttctggaaacagtacatgcaccagtgtgatccttggtgaaaacaaagatttaacagaagaagaatcaaggtcagatactttttttaattacttacattacataacattattaaattaattttaagtgactttttttatttgttattgaactgttcacaacactaagaattaagaaacacacaatttataattccagcggtgacatgagttcaagcaggtctcaaggagaagaaaccccgccaagcaaagagttacggaaaagtcaggtaaaagttaatttaaaatatgggtttcttgaagaaccagcttctacaaaaccactgatttattacacttcttttttggggggttggatcttatttagataaaagtttccgacccaatctaccagatgtcactagagaactcaacgcgtgagaaccttcagacatgttctacacttcatggagatgcctttaattctgccattagtaggatgcacccatcggcgcttgcacaagtgaagcaagccttaaagctgccgtgaataaatgtttttgcctcgtgattgtttgtttccttatcagttaaagagcagcagtattcaagtgagtttctgattcgttgttattctctcttttcagcgtcattcattaaaaaacctccattgtgtttttctatattcatcagtattcaagtgattgaatgtttttgcctcttcaccatttgatctgactcgccacttcataactgttcaggtgagtgagcttttcttccctttacggttatggatttgatgggtgtgttacataggcgcgcatgttgcattgacctctgcgaccttggcggtttgatgaactatgtacatatctttgatgaggtgattcccttttagctgcccatgattccctacagaacaaaaggaggcatctttcagagacttatatttgttttcctttggtcgagtttagtatgtcaattcattcttcaatacaacgtttttgtcccaatgttacaaacaacactaaagaaaaagtgaggaatcaaaatagggagatccttacgatgtatttccggtctgttttttgtcccaagaactctaactttacatatgatgggaacaggtcggagtttttgtctctatctgtcgtactgttgtacttgctgatttttactcattctcccttatgaataaatcttggcttcgtgattttatagtcgaccgtttcatacaagtgttgtgatcgtacgcactgttagatcccaattgcagattttcacaaattactccttggtcgtgtaaactctctttactatgatgattttgtaaaaacacatactatggtatttagcaataacgggtaattaagcactgcctcttagttcgacatttaagcactgccgataatttaggccttaaaattctatacgaagaagtgtgatcaatttatgggacacgggtaatcggaataatctcaattgatcccttaatgcccttatagtatggatactaccgttgtgtgcatgctcggccacaacaaaaactgatgttttttcaaggaaacacaagcagctccgtgttctgagaaatccttattaatgatgagcttccaaaaatgggaataatgtatattaatcacctaagtgtacttcgaaggttctttacttccggtactgacggatctcttttacaacgccgtctgtcaacgagtcaacatcgtgattcttcccgtagaatttcacaaaattcatctccggactcatcaagtaccttcacccacaacatgtttacatatcaaaactccaaccaccaaaaaagagatcaaacactactgaacacatacaagatgaatcattacactgtaactatgtaaaatgtaactatgtaaattctgaaatttgagaatatgaacatgaacaattctaagtctgcatgtcgggttttgtgccgataactataatcttcctaacaaaatatgttaaagggataataagtacacgtacatgactatagagtgatcaacgagatagtctgaatcttcctcttcggtcttcatgtagtaaacccggtaagatcgggccaccgatttgatttcttcagggctcccagttaacccgatcaatttcgggtgaaattctacaagaagtatcagactatgaattttcatttcaaaaccaaatgaatctttcgaaatgaaaaatatctacctttgacatattcatgtacttgctgaactgtgtctctttcagggtccacagagataaacactggcaccacgtctactcccgaattttcctctgtgtaaatgtgatataaccttagaggaaaaatctccaaatgtagaatcacacaaatgaaaaaatgttggtatctcacttattttgtcaatggcagcagctaacttaataagttcgtcaggacagatatcgggacaatgagtgaaaccaaagtataaaatggtccattttcccatcaagtttttctccgtcacacgtttcccatcgtctcttataaggctgaatggtcctccaatggctgcttttccagcagatggcccctccttgacggctatagagttcttatttatatctaaatcaataagaacccaagtcaatatacaaagaagaatcgagataagctcgaagagggattcagcagaaatcaatgtgaaatccctaagcatttactcagtgatagaagtgataagttcatttatcttgccaaggttatcactagccaaatcagatatcgtttgctaaggtctaaggcctgtgatcattaagctacaaacaatgtattcaattagacatttcagaactccattagcaaaatgtacgacatgatgcaagatattaagagctcggtcgaaatctagcacctcagttttactgttattacacaatccaaactagaaaatgggagctatgtagccaaatcatgtaatagtagtctacactctacatgatcaagtttgtgttactttgtagatatgttcaaaaaatgaaactcaccatagatgagtaccttcgatatgacgtttcttttgtgtgtcataatagtagaccaatccagctccagtagcaaacagcaagaaaaagctcatccatgaaaccggctgcaatcaaaccaaaaactctccaatcaaatattagaccaaaacaaccatttaattctgcaattcaatcagagagactttgttcatggaaacagttacccctccacgaacgtcttttccagaagcacgctcgtttttatgatctgaaccaccatcagaactctccgatcctccagatttctcatttttctccgaagattttgtttccggtttacctgagtcatgtttcgaggtagtatcagaagcagaagtactcagcaaacatctctgatccattttcagcatttcgattccacagttaagtgaaaaaaactgcaaaaggaagatagcaattagagagctcaaaacaaagagaattagaaaatgaattcagatgaggagaagaaatgacgaaccgatcgaggaagagagaaatctccatgacgaagcgcgtcggagatgcacgccggagaaggagacgatgccgatagtagatcgctggagacgcgaatccgacgaaaaagttgaacggaacgaagacggcttgcagttctacatagagcagacgccattgacgaccaatttttctctgaagttcacaaattcgctgatttctttcctgcgagctgaggtttttaatctgagaggtgcaaagaggttttacactttataaaaccttctagtgaaacgacacagtttatattaaaacggcaaggtttgcgaacgccctttatacaaacaccttgccgttcagtttaaagcccgtttgggtcgacaagctcattagttttagatatttaaagcccattaagccggtttcaatcaattgttttagatatttatgctttccacccccagttttaacattactatcacttagttccaactcttttcatgaagacccagttgactcaagagcgaccaacgatactttgattgataatggagtaaccaaagaacaataaaagagttttgcattaactaccccaagagaacaaaataagacccaacctcaaacagatatggcctgaggggaattaaactacttttacccaaaaaaaaactaaccactattcacatgatacgatagagagaagcggaaagacgacatgcaaaaaaaatagagggttaaatttatgatgggtgcatgagccttgcaatcattccttgagtccagcgtgcagtgaccttgagatcttcatcctctgattcgagacactcattaaggaactcaccgaagaaggtgaagttttggaacaactgctttgtgttctctcctacaacatccgcaagatcacccatcgctgcaaccgcggcttttgtcacgctctcatccctgctctcataacaaaacaccagttacaagtttaatatgtgcaacgaaaccagaaggaacaaattgattatattttcaaaccacatggtacggacctcaggggatctttggatactagttcaacaaactgcaggagatgttgagcgtagggcatcatgagctcggcttttgtgtccttgaacccttgtagtatcccggagtatgcctcaaagatgcttctccgcagttggtttgcataatccataagctcctcgtcaagggtatccatctgagcacacacctgagcagccccttgcatgatctgaacggctggtgctacatacctttcaaaatgagcaccaattgccagagcaatgtctccaaagcatgagaatattggaggcttcactgatctgtggagtgccccactttgaaggttttggataaggagacccattatctgatcgcaaaaaggtaggattttttcatccagggcacggcaaatgtcaccaagcactcctactgtgattgagcagacttggtattcttcgaaattctgcagccccatctggagatatttgaaaagctcgggcatgtatttcacaaactcagctccagtagcatatgcaagagcaccgattgcaagcatggcttcttcgtggacacttgaactatggcatccaaacactcttaggaacagcctcataatgtcatctgcgctctgcattatgatgggtttcgtatcctccctgccgctcagcttctggattataacttggagaacaccacacagagaagcctggacttccgcttgcttctcacggtcatcagttgatattatagggaggtccattgtctcagctaattttttcatgatggcagggaggagatgcgctatgatgcttgaggcctctgaaaggtttgaacaccggacaacctcgttcaaggtttcatacgcagcacctcttagcttagactctgccccatctgtacgctcagcagctgcaagcagatgtgtgatgatctctgtaagataaggagagagaagagatgaacttgctccagagtcttcatatccctgtgcaagattgtatattgctccacagaccttctctgcaacatttggcacatctttaattgattccagtaatacactcacaattctagggaggttttcgggtgatataacagagaaaccactgtctggggagtgcaaaaattcaaagatacggctcagagtccaagcagttgtatccctgacatggttattctgatccttggttgcattaaggagaaattccaagccagcagcaaccatcggggcaagcttatcaattgttgggccctccaaaattgatccaaaagcataagtggctgcctcccggcagcgccaatctggcgaacttatgtttttttcaacaaaaggcatcacaagagggactacatgatctccaactgttctggcaaccaggccaaggcatgtcccgccagccatagatatgttccagacgtcgtcatcatggtcctgatcctcttcctgcttcagcagagtttctagcaacatttgaactaaatggggaagagccttctctatgaaagaggagtggggaggagatgagtcaccactagcaggactgtcatactcttgacggtcgatctcttcatcacagatggaactccagaactcaattgcttggagggaaacgctctcttcatctccctttacagcattcgatgtgagctcaaagagtgtttgtatgtagtgctccagcacctcatagtatgtggatgcaatggacacaaggcactcgaaagcagcttgcctgatctctgcctccttggaacatgctgtctcgcataccatcttcatgatgtaattcctctccatttcattctcaaaatttgtctgagagaaatccaaggcattaacagtgcctttgttgctgcgagacgaacttcagcagtattttcagactggttcatgccctgcacaactgctgtgaggacagaattcacttcatcttgcacaagatcatggtgtgatatctcttcacagacatagcctagagtttccaaggttgattgcttcaagtgtgcgggactgccttgctgagtcatattgttaagcagcgatccaacaagttcaggccactgcttctgaggaatttcaatggaggctaccttagcaataacctgagctgaagtatgccttgcctctagggcagatgaaccaagagttcttagtaagcgatccttgatctgggatttaagagcaacatcaattgcaaaccattgtttcaccagatgatcttttgtggcagaatctttggcgtccagagaattctttagcagaataccggctagtcgacgggattcagcaggtttatcattgttggcaagctcaaaagacaaggatactaagaacagcggcaagttctgttcttggaattgcctgagattaccctctgcttcagtccggactcttgcatcggctgactgggcagccaacagaaactgtgtgatctccatcgccattctggtctctgcgcaacaaggacattcaccataatcagcaaaaaaaaagaggggttaatagaacaaaatcagcacaattctaaaaaaaaagggaaagctactgaacaaagtaatggtacaagtataaaaggcaataatactatacaaacggtcaacaagttcaatcagatggtacaaacaagagcatttgaacattatgagcaaatatatccatactccgagaaaattatatgagaatctctgcttggtgtaattgacaacaaaaatcattgaaaacaaacccaatatgaaatccgaaccaaagatgacccagcgttttctatgaaattcggaaaaagctttttctcctagtcgtgaagaacacgagttcaatttctaagaaggaagagagacaaataagtggcagaatcacagcgagcgagtaaaaaactaaagttaaaaaccctgcagtactagtgacccaaaacctaatccgaaagcatagatctataaacagatatacaaatccagagatcaatacacagttcaagcaagagatttacctggaaattaaggtttgcgtaaacgctagggtttttcgcttcaatttaaacaccacgtccctctcactgcagattctatccacaaaaagcttctcgaagaagagcaaaaaccaaaccctagagtttgcagagacagagagagagtctgtacttgaaactgtcgaaggagagagagatatgagaaaagaaatttcaatttcgaatacagagaagaagcgggtgtggaactgtggaagggcaaggctcaaaagctaaaaacactttattcctaaatcaccccatagactttgtatttgtatctgaaataacctttgtttaccataattattcgacacactttgggactttttgttatttgtttgttatacatcaaatgagtaaataactcttttatccaaatttataaccatcgtctatttgcaagcttattcattttggcacaaccttaggtgaatgaactgtatcataaccagtcatgggtccaagtaaatgaacatttaagtttgaaacctcaaatacattatacataactaaatacatccacactactttagaaaaacttaaatttgaattatgaaacaaacaaactactaaagtaaacttaaatttgtttttgtaatcttggttaattaatctggattttagtattttttttgccaaaactggattctaattttgaagtcgaggtaacaaataaaaattattggcaaatataagggggttacgtagaataaagaattgttaatggggtgattttagaaataaaatagttttaagcttctgctttgcccttccccacccgctccttccttatattcgaaattcacattcacctctctcagtctcctcattatctctgcctcctttccacacagtcgactctttttctctctgcaagtctagggtttttctgatccaccagaggtttttcccctgcttcgagcgccgtcttggagaagctttttctcgataggctttgcagtgacagggacacagggtttggattgaagcgaaaaaccctagcgtttacgcgtcttctcaagcgaaaaaatccttaatttccacgtaagtctattgcttgtagtgtgtattgagttcgggatttgcatatctgttactggatctatgttttctgattaggttattgggtcactactactgctagggtttttaattttgctgggattttaatttggttctttactcgctcgctgtgttcttcacgattagggtttaagcttttttcgaagttcaaagacattgttgagtcaactttggttcggattttatactggaatttgtttgtagtgatttttttgttaattactcagagcagagattctcctatggttttctctgagtatagatattaatttgtttgctctctggattgaacctttgtacggtttgaatagtattattgccttctatactcataccattactttgttcagtagcttttacttttgcttagaattgtgctggatgtgattctatttgactactgttttgtcgctgatactggtgtatgtctttattgtgcagagagaagaatggctatggagatcacacagttccttctggctgcccagtcagccgatgcaagagtccgtactgaagcagaggctagtctcagacagttccaagaacaaaacttgccgctgttcttgttatccttgtcttttgagcttgaaaacaatgataaacctgctgaatcccgtcgactagccggtattctgctaaagaattctctggacgccaaagattctgccacaaaagatcatctggtgaaacaatggtttgcaattgatgttgctcttaaatcccagatcaaggatcgcttactaagaactcttggttcatctgccctagaggcaaggcatacttcagctcaggttattgctaaggtagcctccattgaaattcctcagaagcagtggcctgaacttgttggatcgctgcttaacaatatgactcagcaaggcagtcccgcacacttgaagcaatcaaccttggaaactctaggctatgtctgtgaagagatatcacaccatgatcttgtgcaagatgaagtgaattctgtcctcacagcagttgtgcagggcatgaaccagtctgaaaatactgctgaagttcgtctcgcagcaacaaaggcactgttaaatgccttggatttctctcagacaaattttgagaatgaaatggagaggaattacatcatgaagatggtatgcgagacagcatgttccaaggaggcagagatcaggcaagctgctttcgagtgccttgtgtccattgcatccacatactatgaggtgctggagcactacatacaaacactctttgagctcacatcgaatgctgtaaagggagatgaagagagcgttgccctccaagcaattgagttctggagttccatctgtgatgaagagatcgaccgtcaagagtatgacagtcctgatagtggtgactcatcccctccccactcctgtttcatagagaaggctcttccccatttagttcaaatgttgctagaaactctgctgaagcaggaagaggatcaggaccatgacgacgatgtctggaacatatctatggctggcgggacatgccttggcctggttgctagaacggttggagatggtgtagtccctcttgtgatgccttttgttgaaaaaaacataagttcgccagattggcgaagccgggaggcagccacttatgcttttggatcaattttggagggcccaacaattgataagcttgccccgatggtagctgctggcttggaatttctccttaatgcaaccaaggatcagaataaccatgtcagggatacaactgcttggactctgagccgtatctttgaatttttgcaccccagacagtggcttctctgttatatcacccgaaaacctccctagaattgtgagtgtattactggaatcaattaaagatgtgccaaatgttgcagagaaggtctgtggagcaatatacaatcttgcacagggatatgaagactctggagcaagttcctctcttctctctccttatcttacagagatcatcacacatctccttgcagctgctgagcgtacagatggggcagagtctaagctaagaggtgctgcgtatgaaaccttgaacgaggttgtccggtgttcaaacctttcagaggcctcaagcatcatagcgcatctcctccctgccatcatgaaaaaattagctgagacaatggacctccctataatatcaactgatgaccgtgagaagcaagcggaactccaggcgtctctgtgcggtgttctccaagtcataatccagaagctgagcagcagggacgatatgaaacctatcatagtgcaaaacgcagatgacatcatgaggttattcctaagagtgtttggttgccatagttcaagtgtccacgaagaagccatgcttgcaatcggtgctcttgcctatgcgactggaactgagtttgtgaaatacatgcccgagctttttaaatatctccagatggggctgcagaatttcgaagaataccaagtctgctcaatcaccgtaggagtgattggtgacatatgccgtgcgctggatgaaaaaatcctacccttttgcgatcagataatgggtctccttatccaaaaccttcaaagtggtgcactccacagatcggtgaagcctccaatcttctcatgctttggagacattgctctggcgattggtgctcattttgaaaggtatgtagctccagctgttcagataatgcaaggtgctgctcaggtgtgtgcgcagatggacacccttgacgaggagcttatggattatgcaaaccaactccggagaagcatctttgaagcatactccgggatactgcaagggttcaaggatgcaaaggctgagctcatgatgccctatgctcaacatctgttgcagtttgttgaactagtatccaaagattccctgaggtccgtaccttcttttttcaataatataatcaatttatatatcttttctagtttcactattcagtttaaacttattactcggtttttgttttgggagcagggatgagagcgtgacaaaagccgcggttgcagcaatgggtgatcttgcggatgttgtaggggagaacacgaagcagttgttccaaaacttcaccttctgtgatgagttcctcaatgagtgtctcgaatcagaggatgaagatctcaaggtcactgcacgctggactcaaggaatgatcgcaagactcgtgctctaatcataaatttaaaggcttttccatcatcactactcgtgcgtctctctctctctgtcgtcattgttttgagtaaaggtttcaaagaatagttgcgggtcttcctctttgctctgtctaatgatgttgggatagtggttaaggggggttttgggaaattgttttggggctatctctgttttgatgctgcgtcttattttttactctgtagaagaaaaacaaaatcttttctttttttttggtgaatggaattatccacttatcggtggtcactttttgagtcaactttatgattctatgtttcttaacgtgaacaatttcgacagaatttagcaaacgattaatttgatgtaaaggctcatcataactccgatgatctacgtaaacacaaactgcgaggtataagaaattccgtttatacaaaaggtgccaaattttctttaaaataacgacgttacatcattacatgacaccagtagaagctaaaagccaccacatcattacatgacaccagtagaagctaaaagccaccacatcaggaggaagagaaggtatcgataatggtggtgtgaagtgggtcactaaggtgagtcgcccagttgttgagcggtcctttaccggttgcagccgcctgaaccgcaaaacccaagaatccaaccatggctaaacgagcatgtttgatctcagctagctgaagctgagccttcttcaccgggtcagacgctagtcctaacgggtcaaagaacttgcctcctggatacaaacgcttctccgagtccagttcagcgtttcgttggaactcaatgtagccgatcactaacacttcgatccatatcaatgtcgagatagagaacggcaatggctgtcctaagtaagatgatccatccactagctctacctggtaaattaaaaataaaacaatcagacagatgtcgaaacgctaaacacaaacgcaaaagtgacgaaaagaaaagaggcgataccttgccggcgtcttgccaagtaacaccggtgagccattcgacggtgatagcgccaagagtggcgagcattgcccaccgaccgtgaatcagctcacattctctgaatctttgtagcccgaagacttcactatatggctgaaacggcgtcgatttggggtccaccgcctcggtacgagtcccgatcacttctccgtataagttcttggctaagttctggtccaaggaatccaaatcgaattggagatactccgccggtttgcctaaaccaaaaggatcgaacccgtagtccccgacaagtgaaccgtcgagatattcgggtgattttgcgcctgggaaccatagaggccggtctgagataaccgtcttagcctttttgggagatgctttcttggttccgaatccgaaccgggctgtgaaccggcttgaattggagctaatgtcggaaaccacccgggtacccatgattgaagaagcagcagcggcggttgaagtggcggccatctccggcgtcgttagttagttctgtcgcgtttgcggtttgtaacttatctgaagcaaatggcgtttttaagtggcggtatgtgtgtgggagagatctcagagaacgaatcttgacggttagatggagaaacaaatccatctgacggtaggaaacaaaatcagccttatctataaaaagctcgcgttatctatcctgtctgtcttttagagttagatgaggcaagcaagctgattgggcaaaagaagctattgacgaatcgcatagcaacgccacttgtcacttcagcagcacatgtccacttgtatagttgtatgccttgcatactaaacaaattcaagaatattgataatccggttaggttcggttacaattgtctcaaaccacaaaggaagtctctgtcttgtaaaaattcgaagaaggcttctcattaagaaaatatgattacatgatcgcatccgagacagtacaatagaccaagacaggacagctaactgttgcgcaaccaaacagcacactcacaagaaatttaataatacattcaggaaaataaacctcagaagcagagtctctagatacttctggaatcgatgatgatccagaaacaagtagaaactttgtcgacagcactcaatcagatccccgtgaaaacgttttacattaagaagagagctggaaacggccactagttttttttcttctccatccctgccaaaacaccaaagaccatatgattctacaaatacttaatacagaagagaaaacccgaggagtaacatcaacgaggacttacaaaggcaatgtaatataggaaagtcagtccagccaggataacaaacccgatttggaacacattgtacctgaaatataaaacctcaataagacgcatcacggatatagcatatgactgctatatgttataccacttctacttacttgtaaaggtacttaattcctctaagggactgcaatgtgtggccaaatatctcctgggcagcagtggcttgagcgtaatatccaaatgcagtggcacaaaattgaatcacgctgcattttaaatgaaccacattactcagactgtgaggattaacatgtaattgtgagggtagcagctgtatattaaaagtcttggtttgacatctaatagagtacaaaggatacccaagtgcatgagtaaagtaactataaacttcgattcaggcattcgccggaaaggaaattagttttagtgatggcatgaaaacactgataagttaatgtatgcacataaacatgcttgatctagatccgtttatcagagtgcacttgatcccaacagatacaaaggcagaagaagagaccagagagacttacctgattgaacaaagaagaatgaggccgacattgaagaggaaagagttcattagagtagctccccatctgaaataagttgatatggccaatcagcaatcaagagaaggtaatgaatgaccttggaaaatagccaaataatgttgaaaccggttagatggattacttcattggatgaatggtaatgaagaccagcttcaaacccagcatcattgccccagcgataacagcaagtagaaggtagaaacagaagaaagcaaaggcagcagtgcctaaaagacctggagatttccacacgtaccagcatggagtcagttagaaacaaagaagaaaccttatacaggataacaaggacaaaagtatgaacttaccccaaacatcatcaagcttaatgaaaacctcgttaagaaaaggggagagaggagggtcgacgagtagatatatgatgatgtgtgcaacccaagcaatggaaacgatcaatctacaaagacattaaaaatttgccatttaaaaagacgcttagctcgggagcttaagagtgcaaacctaaatatgcaagaactgtatgcattatgcatgatttatacaacatgtaacaaaaaaaaatgcaaaggaggtttctgcttagatgtactaaccctacgattccaagaataaacttggccaagtatccgagcacagtgaaagcccatgcagtttctgcctggaaaaaggtaccagggaataaaatagttgaacaagaaaaatattatagtataagttctaagatacactcgtcttacctgctctccttgaggatacatctcttctaagaggttcacatcttcctccaattggagcaactcctgcagggttaccacattcaattataggattgaggggacacagcttaaatccacaaccaagcaaagaaaagctaccaataaagtcaataaccaattctactatctcactagcttttcactacaagttgtcattctcataactccacagacgaccaaagcctctttacacacaagggaccagtatgaataggcaaactttccaagttgctacttatgaaacaaaatttagataagatactgaaccttgagatatatgaggtaccttttcaactgctttcacatttttccgccatttcctgcccttagcaccacttctttcttcctgatgaagtccatcagctgctttctttagttctcttgcctttttacctagttcggttgcctcctgtaatatatttatggagttaatcatgcaagagacagagggattgactcaagatctagagagatgcttccagaggagaacaataaccagacctttatatattgtgatcgagtgataacagcctttggtcgcctgatgaatgcagtgataagtcctaatggtagacatgcaataccaacaccaccaaatatctagaaatatttgagagaacaattagttatcagattttttttactgaaatgtataaatcaaacatctatttacttcaatggatacagaattatatcttgccatgcatctcatctgttgagagtttgtgttagtcaatgaagaatcaacaatataagacagattaaatcctttcaaagcaaacaatgcacttctcaacatgaaagaacaatggtcataccgtgaaaagaactgacccaacaattgtcgcaagagcaacaacatattctggaaaagtagtacgcatagtccatgttttctcagatgtgggattagctgtaaatgctgagcactgcattgatagccagagacaggaatatgttaaatgctgaaactctctacggcataaatgactcatgatataaaaactaatgctaatgctacattcaagaggcaaacatacctggcgagcagtgttacctatgcatggttgagtatttgaaaactgccaggaagagggaaagtggatgtggcagaagccaaatgcctgaccgagaagtccacctttccaatgacacctacatgatgaagatgttaccaataatgttaaggtattcctagcatataaatggataagatagatatctcaacccaagccctgattgggtaatttaaaagccaaaattaacataagaatgcagtcaaatcatagagaccaacatcagattcatccttgccacatgctcactaatggattcaataaccactccagctaaacaagtataacctccagactatcgtcattcgtcaatacagaaagacgctgaatttcaagtcgacaaaagaattgaaaacagaggaacaactaaccatataaaattccaagcaccagagcacaaacaacagccgtggtaactacccaaattaaggcactttttatcctctttccaagagtcctgtgaaaaaacgaaagaaaaaaagcccacaaattgtcatcagtattcgattaactcaaaacttacaacatagagatactaaaatttcatcaagctacgaacttgtcctggtcgccttcatagaaaaacattgcgaaggggatgacaaagaacacgagaatagcgtccacgatataaatagcaagccaaagatccttcatgggcaaggtgagattgcaagctccattgtatatagcatgtcgacaagcatgccgattggccacatcagccggtaacatgagaatcgagatcatagcaatagaaaggccaaaaacaacgacgaatttggggaaataagcctggtttgcatcatctggatgctgatagttgacgagaagatagatgctagagatgaatacgatgacgcaaacaacgatcgcgacaatcacgagagcgaggttgaaatcgcccatcgtgtgcaatgtacaacgtccccaattcgagagatttcgatcccggaacgatttggaagatgtagcacccaattgcaaaggctagggttttctaggagttcaaattttgaaaattgaatttggggattttagtagatctggatttctttctttttttccctctcgaaaaccagacgagggaagaagaaagaggactgggagaggatgaacattcttgtaaattacgaagctaccctcaacaatgtgctctcgtgcctaatggctttgggtgtaaacgtaaattgttactaggtttggagattagctgtccgaagcaaatgattcggacaaaatatttcaactaatgaaagacatctgtaagtaataaaccagtgaccaattgtgtaaaccggacacaattttaaaaacaaaaaatgtcttcacacttggctccaaaaaaccaatttaacgactcttctggccaaaagacggtaacagtacaagtagtttgagtaaataaaatgatacacctcctatcgtggcgaaccgaagctcttcggtcccttcgatctctggaaaatctccctcggatactcggttaaaccctccggttaaccaccctaagcttttgtacccttctccgtggagctttgatacagccgccaacgacctgagaatgagattgaaaagcaacaccatttataacaaccaaaccgaaccaaagagttcagtttaatttatactatccaaaccaaaagattctatgatcaaatcgattgattaatagtttatttagtttgataagtttctctaaaatctggactaaaactggcaatgattaaccaaaatgcaacatataaagctggtacctgagtccttcaccgcacacgacgagcactttactctctttgtccgggacagcctccacaacacggagggcgaattcgtcattgatcatggtgaatctctggcccgtccaaagcccaatatatcccaaatgaatccatttcttcagcaacgtgatcggcccattgtctggatcttccacgaacagtggcacgtgtaaggaacctttcacgcgtgccttttctctttcccaagccggcctcacgtctaacagtatatatccctccgacgccacaaccgcattggcttctttgggctccaccgcccgtaccttgccggaaagtatcagctctttaccggaaacggcggagatcactggtaatctgtatgattgtcggaggcgtcggtttagtactactggtagcttgtggatatggtttagctgaggaagaagaactgtcatctttaattcttttggattttcagaggaatttaaccaatgatattgttcttcagatttttcattttaagaacaccccaaaacttcttacttatttccattttaggccctcagatatttcataatttgactatcaccctcgcttaaagtaaagtaacaaacatatactagtggggtcaaatgttaaataataaatatatagggctactaagtgtaaatttcctctctttgaaacgacaccgtgattcttaattctgataaggtttgacttttgagctaggtttgccgaaccaaaaacagaaccggtaaagaccaaataaaagaaccggtcgggtatttcttgtatctcgataaatatttcgaaccggtacggaatgatccgctagagtttttcccattgaagaagatcgagtgaaattcgaagagcgaatcaaagaggaagaagaagaaggaggaggtatagcaatgggggtcgattattacaaggttcttcaggtggatcggaatgcgaaagacgacgacttgaagaaagcttatcgcaaactcgccatgaagtggcatccagacaagaaccctaacaacaaaaaagacgccgaagccaaattcaagcagatctccgaagcttacgatgtaaattaacaaaatgcgttttctcttttcagagagattcccatcttttgcttgaatttgagcaattgtgtagtttgtcaattcactatggttacttctctggcaattaagtaatcttgatttgcttgtagaattgtgtttgatagattccttatgctgttggattttgtaaggttttgagtgatcctcaaaagagagccatctatgatcaatatggagaagaaggtctaacaagccaggctccgcctcccggagcaggcggcgggttttcggatggaggggcttcgttccggttcaacggtagaagcgcagatgatatcttctcggagttctttggcttcacaagaccatttggtgactcacgtggtgcaggtccctctaatgggttccggttcgcggaagacgttttctcgtcaaatgttgttccaccgaggaaagctgcccctattgagagacaacttccttgtagtttggaagatctctacaaaggagtcagtaagaagatgaagatctctcgggacgtcctcgattcaagcgggtcagttttttttcagctacattgtcatgaattgagtttaagaatcaccttcttatggatttagttccaaaacattgatttgcttaggaatttttaccttaaggagctttggagctggataaatacatgaaagatgtagtgctagaaattagtcattagccattggatagattatgttggactcattagagttgttttttttgtagctatgatgttgttgttatcggtaatgcaagttgaaagtgtattctttgttgcaatgcaggagacccacaacagttgaggagatcttgacgatagaaatcaagccagggtggaagaaagggacgaagattaccttcccggagaaaggaaacgagcagcgaggaatcataccatcagatcttgtattcatagttgatgagaagccacatgcggtgttcaagcgagacgggaatgaccttgtgatgacacagaagatccctcttgtggaagccctcacgggatacactgctcaggtctcgactctggatggaagatcagtaacggttccaattaacaacgtgatcagcccttcttatgaagaggtggtgaaaggtgaaggcatgccaatccctaaagacccatcaaagaaagggaacttgagaatcaagttcactgttaagttcccatcgaggctaacaacagagcagaaatctggaatcaaacgaatgttttcgtcttcctagtctgtctctttctatcttactgctacgtttgattttcggttatgactaggtatgtggtagtgtgggtctttgtttgggagattgtgaggttcttgaacgatgtcgcattgagatttctcaacgtccttcagagcttttggtttgggtttggggttttacattttagcatttttttttttttcgttcttttaaatttgttattagattgggggaaaaataaaaaactaaataaagattctttgcttctttagtttgtttagagctttcaaattttctaaatacatacaaggaaaaaaatgtatgtggcactatgccactatggcaccagctcctgcattcttttctatttcagttcaactaaaacaattcctaaaattattttgataaaaaaaacatattaataaaacttttcatgttttgttctaacaaatcttctacaaacagacgacggtcacgtgatttgggtttagagaggtagagcgggtgagagtcgtgaatttgggttgtgttgaaaacatgaaaagaagaaacatgttttggcatgaatataccttttttcttccgttaagagtgaaaatgattatctcaatctcatctctataaataccaagaagtcatccttgttatcgtacatctctctttgtctttgcttaatcataaactactctttcttccttgtcgtttcaaatggcgcaattgtattcttccgtgaaacccacgccaatgttgaaagatgagctagacattgtgatacctacgattcgaaacctcgacttccttgagatgtggcgacctttctttgagcagtatcatttgatcattgttcaagatggtgatccttcgaaagtcatcaacattccagtagggtttgactacgagctctacaacaggaacgacatcaatcgaatcttgggtcccaaggcctcttgcatttccttcaaggactctgcttgtcgttgcttcggttacatggtctccaaaaagaagtacatctacaccattgatgatgattgctttgtaagtgctctatttcatgttatgcttaagtgaaaaagttcttagactctgtttggtcaaaccaaagtcttcttcaaagttgacaatatatgtgcaatgtaggttgcaaaggatccaacagggaaagagatcaatgcgcttgagcagcatatcaagaacctcttatctccatcaactccgcatttctttaacacactttatgatccatacagagatggggcagactttgttcgtggataccctttcagtatgcgcgaaggtgccataaccgcggtctctcatggcctctggctcaacattcctgactatgatgctcccactcagcttgtgaaacctcttgagaaaaattccaggaaatttgatcttccactgaggctaccaattttgttttgcatcccttctgtaaaaacttaaacgatgaaacaatgcttattggttagttcttggttatatgcaggtatgttgatgcagtcatgaccattcccaaaggaactctttttcctatgtgtggtatgaaccttgcttttgaccgtgagctgattggtccggctatgtactttgggcttatgggtgatggacagccaattggacgctatgacgacatgtgggctggttggtgtgtcaaggtaaattcaattcttatcttgcttttgtgcattggttatactgtaataccgttacatttgtccaataatataggtgatatgtgaccacatgggatggggagtgaagacgggtttgccttacatatggcacagcaaagccagcaacccattcgtgaacctgaaaaaggaatacaacggaatattttggcaggaagaggcgattccgttctttcaatccgtgactcttcctaaagagtgcacttcggtgcagcaatgctacctcgagctggccaagctcgtgagagagaaacttgggaaggttgatccttacttcatcacacttgcaactggaatggtcacctggatcgaagcttgggaggagcttaactccgcggagggaactgaggctgaggcaccaaaaggcaaaaattagtaaagagaaggtcactgaataaggcaaatggtattgtttactaggagaaaagggtttgagtcacatgtgcaaccctctctgtttttcttaatcataatttgatttgcttctgtctttaatttcttgtcatcagtatttgtgttctcagtgcattgtcagtttgtcacaaaaagagaaggtgtaatgtgctctatgcattttgttttctttaaggtttctaaactctttatctatgaaatatctatcattcctattttccttaatttgagagtaaatttacacagttctcaaagtttaaggctttcttatcataaacaagccctcattgtacaatgtacattacgactagctctggtcatatgcttaaacagtgactcagtaagtaataccaaaagacataagaacattgtttggtgtactgagttaccatcttcttcagtttatcaaattcatgaacttcaacataattgaaaatcagcatatacaaaacaattttgaagaaagttgaaactttaaagatagagattggagaaagaggataaaagaattgagaattaccagcaaaacagagctagaatttatcaatctcaacgccatctcttaaaacctcataagcatctcggcttctgcttttcttcatccctgccgtgaaatgtacctttgaagaatcagcagagatacttgtgactttaacccatatcattacttttgtcttcatcccttcaacatcagctagctttcccttctcgagaaatccggtaactgtagtggtgaatctcaagactgatgtatctttgtaaccaacttcgcagattgatggaataaagacagttaacttcctcgtctgttcattgaactcgtagttggttgcatcacgtggaaagatccccacaggcaaaccaaactcctttagtaactcgggcaatggcttctgcatttttcctgataacgagattagaaaccaacaatttgttgaggaaagatgcggctccttaactgtcgaatgaaacagcaagaatgagtacaaaaataaccaacctttgattttgttcaccaaccattttgttcctccttcgatgctcgaagacaaagactggaacaaagaatgtttacagattatagaagatcacaacattgcatcattgagctaaatcatgttttgaagaaacccacaggaacactagtagcacaaaacagtctcaaaaaattatctactcttaagatcttgttccttctacgccaaaattcgtctaatatcatcacaaacgatttcaaaactgaagaattgcaggaaactcttatacaatccaatgaacatatgacagatttgttagaaaattgcagaaataaagcgcaattgcgctactaagtgaagaatcaacgagctacaccaccatttaccagactctaagatcaaaagaaccctagatcgattacgacacactaaaaaggatgaatcaaatttctcaaaagcatcggatcgataacagaaactcaaaacaaaaactgaagcatctgattccgcaagtagtagtgaaagagtagagagagattcgtacgttgatatcgtcaccgacggaatcgagctgcttgttcgccttcttacctaaccagtacgagcctaccttgttcaagatctgatccattctctctcacagatcgtttctctttctctcgccgagatcggaggtgttttttttttggttctatcaccgattcatttaatttcgttactttgtattaacactataagagccaatagatttttgacacgtaccaatttgaaagaacgatgtggattgtagaacaaacaatttaactttgtattaaagtgtatatagggccaatagaagagaatcagacaaagtttattactgacagtgaaaataggataagcttttatctgacgtggacggaatctcctcgttgacgccatcccattggatggccatgaggctaccacacgcccgtaaatgtggttctatctagaccccaacacgtgggtctaatccaacggccactacactcgattccctcctatattacaaaaccctttcttcttcatcagttcatcatccacatcgcatgctgatcaaagacatagcttcaagggaatttcttcatttaccactaaacccatcatggcaccacttctcctgctggttcactgagattcccacaacagaggaaactggcaaggagatcactggtggtggcagcagaaacagctggctcgatgagcggagtcatattcgagccgttcgaggaggtaaagagagcttatctagccctaccaatcaccgctcttgtctccgtcgctcaccaaagatacgcacaagcttgtgaggcagctgttaacgagcaaatcaagtaagcatcatccaacttattagctatcaagacaaaataaaaaacaacacttctacatacaagttatcatagttagcaaagaaaaagatagttgaagttagtaagatttttgtattttgtaactaaaaaatactcatgtttcactaattcgatggcactaagtcacaccattggtattttgttaatgttacctccaaatattgccacctacctaattcaccttctattttgtaacaggttggttgtgcagtggttgagacaatgtctcgtacgtgtaccatgccatgtatgcgtatttcgacagagaagacataactcttaagggtttagccaagtatttatcgttaaaatttcataatcattctaagaaacagaaagttatatatcttctcactaatcctaattgcctttataattgcagatatgtcaaagaatcaagcaacgacgaaagagagcacacagagaagttcatggagtatcaggtttcataatcttgtttcacagtttccacaatgatttttgtttctcactgttccttccctcttaatcaatagatatctaattttccaatgtggtccctaaagaagaactaagaacccaaatctatctaaagccaataagccattagtgaaaccagaagttgcagaaggtacccgttttgttaagagtccattaaggtgctagaatcgtatgtggtctttgcttcctcagagattcgaagatgtgaagatcatatctgaaactgagatacacgtacgagatcactattaaagccaatattatagagacaagtcacagatactatctgatgacatgtacttcgattcttacctaaaatgtaatgacatgttactttgtttctacaagattgacaattcctaagcacagaagctatgaaaagttcatgatcttttcgtaaagattctctttctttgtgactgatctattatagaaggttcataaactacaaactactaagcctcatgtaccagtgaagatccgacatgaaattcctgtaaagacttcataaataccatctgttgatcatttctctaaatacttccggaaaaacagttaccaaacttgcatgaaatttgaaaaggggaactgaccatcttcgtgaggcaggcggtgacaatattcatcaataatccaaagactctggctatgaggatttgtatctctgtgagactgtgactgttttcaagagacagggacaacaaaattataacttcatagtgtgtactgtgtacactctcgctaaattggatcgagttctctggcctgtaaaatctaccccaatataagacagaaaaatggcaaaccctaacaagttcaatggttcagtggagacactaagcaggttccacagttcagaagagaagctaggtaataatcccaaagtttgctaggccaccaagatttggattcaaaatcattaaatccttatgaaaggcgtttaagaatataatgaaagcatagaaactaaaaaactgcacttctgttcctttagaatttgtacaacctaaatctgaacttgtgcatcaatctgcacagcaaaaaacgatcaggaaaacggcaggagcagctgcaacatgaacacggaaacttgcagggggaaaaatcttagattgatgatgatgttacaggagaagaaaattcaaaatcatataacaaaaatccaaagttaagtaaagtagaaagtgtttacatcaacggaactgatggtagataaagaggtttttggttgctaagctaaaaccaagactgctcacacatatatcatacaaatgaagtggtgccaagtatgtttattgtttgtttatgatgctccagatactgttacatgtctcgtatgccgtcatcttatttgtctcgaattgaaacttctcaattagcctcttttcacgatctaccatatctaatatgattttcaaaatcaaggattcaaaacacctaaggataaaaagtgaacaatatatatgattaagaaaacgttgatagaatagagtgatgatgaaagaacaggatacagcctgagatctttgatggatcatcaatgtccggtataacgttcgtgacagaagcatacattgatagctttttcctgtagataaaaagagggaacaatgagaaaacaaatgtaacgagcattcataacaagcaactgcagtagtgaggtttgtggatcttactcagctctcaagtcgtccctcacttttctctttgtagattgcttatgttcatctatcgatgacaattgagcattcaggtccttgagttcatcagcgactagtgtattgacaattaaaaaaccaaaagattaattttttcatgtcactgaatcaacaactaggatattttcactcaaaaacaaacaatacttatctaagctcgtcttttagcttgaactcccgttccatctcttcgtcaagctctttctgaagacgttcaatttcatcttcagccgcaatatctgaatatgcttcctcagttttcttcttacaagcatagagtttcgtcttacaatctgcgtccaaaccaaaaaaattcctcgctcaatccagctaaagccacattatttatctagtaaattatctagagaaccaaatcggaaaaacaaaactgaccttcaatagagccttgtatctgattgaaatcctcatggcaagcaaaattgagagctttgaactgctcagaactttgagatataatatcaaaaccattcttaacattcaataagttgatcaaatcgtctccataagacatgagatcttcaatatcgaaattctccgacgcatttcccatttctgctgcggaaaattgaaaaatcaactatctagcagcaaaagccctagctccacacctcaaaaccctcaccagaaaaatcgtagatttctgataccaccaagtaagtacgtgatattctggaatctggagagaggagggagatatgaagaggaaagatctgaattttgatttttgatttttttattccaaaagtaagtttaatttgacataattaactgctaaaaatatatggacgctaatatgggccaagcccattagttttcactttccataatgggctaacaaaatttatgaccaataagactcatgtttaggctaaatcatagcggtcttcatcattttgtccactattttgttttcttttggtcgaagatattgtcaagtattaattatgcaattacgtgaaatcatgagagtcatctcctccacacatatagcccaaaaagaccttgactttgaacatttcgactctttcgtcgttgatagcataagaacatgtccatatttgaaacttaaactcaatgctctctcttactagttacttcatacaatcaaagtcaaaaagctcaagataccactactcaatgggcatagcaagatccataaactcgttcatgttcttcttctttctaatgatattatcaaacgcttctaaaagctctgttcttgctgaggccacgacagcgaaattcacattcataggtttcaaagaaaaccaaacggatattcaaacagaaggagcttccacaatccaacacgacaatgatcttcttagactaactaatcggaaacaaaacgtcactggaacagcgttttaccgcaaaccaatcagattgcgtgagttaaccaattcctccgatatcaaagtttgttcctttagcacttctttcgtcttcgtcatactcccttcaagtcccggcaacggtggttttggtttcacgttcacactttctccgaccccgaatcgtccaggagccgaatctgcacagtatttgggtctgttgaacagaaccaacaacggtaatccatcgaatcacgtattcgcagtggaattcgacacggtacaaggatttaaagacggcgcagacagaagaggaaaccacatcggtcttaatttcaacaacctctcctccaatgtacaagaaccactcatttactacgacacagaggatcgaaaggaagattttcagctcgagagcggcgaaccaatccgagttcttatcgattacgacggatccagcgaaaccttaaacgttacaatctatccgacgagattagagtttaaacccaagaagcctctaatctcgcgacgagtttcagagctgtcggagattgtgaaggatgaaatgtacgtcggattcaccgccgcgactggaaaagaccagtcgagtgctcactatgtaatgggttggagtttttcaagctgcggagaaaatccaatggcggattggctcgagatctcgcggcttcctcctccacctcgcttgagtaacaagaaaggttacaattctcaagtcattgttttgattgttgctttatcgatcgtcacactggtcttgcttgtgttactatttatatttgtgatgtacaaaaggcgaatccaagaagaagatactctagaggattgggagattgattatcctcataggtttagatacagagatctctacttagcaacgaagaaattcaaagagagtgagattatcggtactggaggatttggaatcgtttacagaggaaatctatcttcttcgggtccaatcgcagtgaagaagataacctcaaatagcttacaaggtgttcgagaatttatggcagagatcgagagtttaggaagattaggtcataagaacctcgtgaatcttcaaggatggtgcaaacacaagaacgagctcttgttaatttacgattatatacccaacggaagtctcgactcgttgctgtaccaaacgccgagaagaaacggcatcgtgttgccgtgggacgtgcgtttcgagatcataaagggaatcgcgtcgggactgttgtaccttcatgaggaatgggaacagatcgtggttcatagagacgtgaaaccgagcaatgttcttattgatgaagatatgaacgctaaattaggcgattttggactcgcgaggctttatgaacgcggaacgttaacgcagaccacgaaaatcgttggcactttagggtacatggcgcctgagctcacacgtaacggtaaaggctcaaccgcgtctgacgttttcgcgtttggcgttttgttgttagaaatagtgtgtgggaataaaccaacgaatgcagagaacttcttcttagctgattgggtaatggaatttcatactaatggtggaatcctttgcgtcgtggatcagaatctcgggtctagtttcaatggcagagaggctaaactagctcttgttgtggggttactatgttgccatcagaaaccaaaatttaggccatcgatgagaatggtgcttagatatttgaatggtgaagagaatgttccacagattgatgaaaattggggattctcggattcttcgagagacgatcataaatcgaatgttgtaggttatgtttcgtctgatagagcctcgagctcgaatactttttcgtctttctccaatgtttcttcaagctctatcgttagtggtagatagtttcatagcacttttagcatagcttatttattttctagaaacagaacattttgtatgtttttactatttatgctaagaaggaactaaatgtatgacgtgtgtgtcgattatgtcttattatggaccagtgaacccattacccatattactaagtgaatgatagatacaacttgtacaatacaagggttcattgtttccagctttattaggtacaatattatttttgcattactaaaaacagacttttcttttgtctaaacatttttttgtaaattataacataaaatgcaaatagcaaacaaaatatattttcttattccaatgcaaacaaaatatctttcttattccgttttagtttgcttttgttatcaactcaagactttgatcggtgacttaaaacaaatgttaaaaagacgatccaatccctcatatatgattgaaaactttgatacaaaatgagattgacagaagataagactaacaggtccgttctagattctttccaaacgtaacagcatgattggatcattttaagcaatttcaagtggagaaaatagaaaaatattgtgtgttgcccaattatttcaatcaacaattcaaaattattatgatatgggcttggtaggttgatggtttcactttcataacacaacgacaagtgaactacgaacctatgcctcagtttgtgtccaggttcatgatggacatgcctataattagaaacgtgtattgaaagaaagcgtctaaactttgcaattggctacagaagttttaaaacaatgattgcgttgtgaacattactgaattttcataacaactcaaaccattttttacaaatattacgacacagttgttttgttactgtgatatctgttgtttctatgctttaaaatttaaataaacaactgtgattcgttgtatagaaccgtgtatcagactatcactatcctacaagttaattaattacgccaaaaacaagttaattacgccaatcaaactaaagaaaactataataatagcgtgactctatggtttggtactttggttaatgtgctgcttacttgctcatcttatctatgattagaatatttacttaataagtggagttttaaactgtatttctcatgtattttagtgaatctcatattaacttattaggttatactttttgataaataatttaggttagacttaggtaagataagtacgtattaaactgggatgaagataaaacaatgccaaaacaaacggacacgcttcagctgatgatagatttaattttgccaatagtataaaccagttacgcctttttatagaacaactctgccatacttgataattcatacactctatctcttctctctctcaatctctcaaaagatctccggtaacgttttaacgtcggtgaaaaaatgcggaagttaacggcggttaattcactactgaaacggaacaattatcttcttccgcgccatggctcctcacaaacagcagctcagagaacatcctccgtccgcgagaccgagaccgaaacaaaacttccgaaaatgcccccgttcaattattctccgccgccttacgacggtccatctacggcagagatcatcgcaaagcggcgagagttcctcagccccgctctttttcacttctacaacacacccgtaaaacgacgttccgatccctatcatttttgttttctagcatagaacgacgacgtttcttactctgttttcttttttaccgttgatgataacagttaaacattgtggaggcaaagatgcagtatgtgttcgacgagaatggacgtcgatatttagatgcctttggaggaatagcgacggtttcgtgcggccattgccacccggaagtagttaactccgtcgtcaaacagttgaaacttattaaccactccaccatcctttaccttaaccacaccatctccgatttcgctgaagcccttgtctccactcttccgggagatctcaaggtaaataatgatatatcttctttttgagttgtgcaatatagttttttttgtattaaggttattcgatgacttgaccggcaagtcaaatgtacatgtgttatcatgtacgtaggtggtgtttttcacgaattcgggtacggaggcgaatgaacttgcgatgatgatggctagactgtatacaggatgtaacgacatcgtttcgcttaggaactcttatcatggaaacgcagctgctactatgggtgccactgctcagtccaactggaaattcaacgtcgttcaggttcttttccatttcaatctacaccatctgatatagcataattgattttttcttaagatcatagtagatgagtaagacagttaagctgtgttgaccaaacaaaaattagaatggaatcaaagttcaatatgacgtttgaatcgattagcttggactaaatgagtttatatgaagaagagaagaagtaaccaacccaaatttaaatttgacaaggcatcatctctgtaacagagtggagttcatcacgccataaatccagatccttacagaggaatatttggatccgacggtgaaaagtacgcgagtgatgtacacgatcttatccaattcggaacgtccggtcaagtcgccggtttcattggcgaatcaatccaggcgagattaatttgtacttatttcttatatcaaaaaggtatttatgattatgataatgaatatgcatgtaatgtagtctatatcctgtaacagggtgttggaggaatcgtagagcttgctcccggatacttaccggcggcttacgacatcgtgaggaaagccggaggagtttgcatcgccgatgaagtccaatccggttttgctcgtaccggaacccatttctgggggtttcaatcccatggtgttatccctgacatcgtcaccatggccaaggttcatcattatcatgattcatgcatcgttatcaatttatcatcatcaattctaatttggattttgcaggggatcggtaacggtataccacttggagcggttgtgacgacaccggagattgccggcgttttaagccgtcggagttactttaatactttcggcggaaatccaatgtgcacggccgcaggacacgcagtacttagagtccttcacgaagagaagctccaagagaatgctaacctcgttggctcacatcttaaacgtagacttacgctactcaaaaacaaatacgaacgtgagttacttcttgtccaaattaaaatcaattttaaaatttttctttattgaatatcttatcctttctctaatttgtttagtcattggagacgtgagagggagaggattgatgctaggagttgagtttgtcaaagaccgcgacttaaaaactcctgcaaaagcagagacccttcatttaatggatcaaatgaaaggttagttgtgttcaatcctaaaccaagtgaaattgatcactctcatcatataaagttgatacttatgcatttaagatagtgtttaatacaaatcttttggtatcaagaaatgggagtgttggtggggaaaggtggattctatgggaatgtcttcagaatcactcctcctctctgcttcaccctctccgacgctggttagctccttagtttaacatatatatcttcaaattggtttctttttgtttcatttttttattcatgatttatgttgtttcaaatcttgtattttgtagatttcctcgtggatgtgatggatcacgccatgtccaagatgtgatttactatctttatccgttctctaatgatcactcacccttgtatgtgtatataaataacacaatacatcataaagtagaattacaattggtgtttaccgaaatatatcacagatgcaagtatatgtaactaaatgtacagtactgtatacacttgatagaatctacaaataaataaaaaactcgctgctaatgatattccacaaatacatatattgatccgaagtttcgagtttagagtaaaacttgaatgatacacctgtggggcaaaacagttggtcatcaaagacgaggaagtggtagaaatggcggcgccgcggcggagtaggaaaacgatgtccggagagctgtcctgatcgcggaaacgagactcgtcagcacgaatataagttcttcaagtatgcatagtgtctttcttatcatcgaatcttcttgttttctcgatgcgagattcccaagtgagagagagggagttgtgatatttttctgctgacttttagatatatatggcctttgataatgttattcagacaaacaaagtgtcagcttgatgtttgtgtccaaaattgataatataatggaataattgcaaaacggaacctgaagttttgattaacatggaatttgaacccaatattttttccctacaccaaatttttagtttttcggttttcatttttttaccaactacaataaaccctagatgaattcggtttagaagaccagacattgctatgtaagagtagaaaaaccgttggtgtttagattacactaatttaaacgttataacacaaaactgattaaaacataaatatacttatgaagcgtgtgcaatgatgatcccttcatgtaccccgttgtacggaatcctagaggtgattcgaagaatttatggtaactcacgtaacaaagtgtcagctaagtaatttatggttacgaaaatacaattgtctcgtttaaaaaaaaattaatatagttttaaaaaatctaatatcgtttttaaatttaatatcatttctctgttactagtttagtagcttgaatttttgttttcgtaattaaactagactgattttttaaatttagatttagaccgtgattagaataaaagtgagttttaagttgcattttaatcaaagaatcagattgaatttgcgattaacttctcagttaattagtcgatccattgatggtgttctttgaatttgtttctcaatgatgcatacaaaatttcaatttccacattttaaacataaattaattttaaaattatagatatttagtatacctctcaatcttataatattagtatttaataacattgcattaaagttagtaattaattagagtggatttttgatctgaagagggtaaaactaaaaacggaaaggagaaaaagaatgaaagagaagtggaaagaaaacgcaaatgcattgaagactttccctttgtctctctctttgacaaaatcccaattttcgcatcctcactttctcctctgccttttttttttctcttctgccgccaccaccaccaccactgttaattcgccgccgcttccacatcaatcgccgtcgtagccaatcatcatcgttcttcatcctccgcttctcctgattcttagggtttccgcttccgcttctctgtcgagggtttttcgagctggattctctgctcctgcgccgctggtgcagcggctttgttgattgatctggatttctccgtcttcctttctattttattttctgtatctcgcacaatccaaacaaaaaagctagggctgaggatttgatttgcgtgatttctgggggtgtgttaattcgggggtgtgttctccgatttggatggcattaggagacttaatggtgtctcggttctcgcaatcttctgtttctttggtctccaatcaccgttacgacgaagactgtgtctctagtcacgatgacggtgattcccggaggaaggattctgaggctaagagcagtagtagctacgggaatggtacaacggagggagccgccaccgccaccagcatggcttacttgcctcagactattgtgctctgcgagcttagacacgacgcatccgaggcttctgctcccttggggacttctgagatcgtattggtccccaaatggcggcttaaagaacgagtaagttttcaatcgaacattgttggtagctgcaagtatgttagactagcttgtttagtgcaactgacgatgtaagaggcgggtagaacaactacattttctagaattcattataaaatctgctattgttcgctactatgttaggtaatgttaaccgaggagggttgtgtacttgtgttaacgtttttattgtggagctgaaccttaaagatacatgtttccgtttcgtttcaatctcaatgtctcttcagaaataattctatttctcgtcggaagctaaatcaggtgttcattggatctgatagctaggggagttcttgcaagtctcatattctttgttaacttttcttcttcttctttgcagatgaaaacaggatgtgtagctttagttctgtgtttaaacattactgttgatccgccggatgttataaagatatctccttgtgctagaatcgaggcatggataggttgaaactttggcctactcaatcctattacactctttcttttctgtgtttatcccttttttttgtcgccacagtcaattttatctctattttttttctttctgatggcagatccattttctatggcaccgcctaaagctctcgagacaattggaaaaaatttgagcactcagtatgagagatggcaacccagggtgacaatttttttccctgcaccctatcattattgttttgttaagttacgcttttcttatttattttatgatttctcaggcccgctataaggttcagcttgatccgacagtagatgaggtgaggaagctgtgcttgacttgtcggaaatatgcaaagaccgagagagttctattccattataatgggcatggtgtgccaaaacctacagctaatggtgaaatttgggtatttaacaaggtctgttttttactagcgttttcttttctctaccatgttcttgttccttctcgtctgttaccacgagctgattgattctctgtttgagcagagttatacacagtacattcccttgccaatcagtgaacttgattcctggttgaagacaccctccatctatgttttcgactgctctgctgctaggatgattctgaatgcctttgctgaggtaaaggaaacaaccacttcacttatagaacacatctcctgtcgagtttaggactcgagtctgtaattttcgttccataagttgataaaattcatatactctttacgccagcttcatgattggggttcttctggttcctctggatcctcaagggactgcattctacttgctgcttgtgatgtacatgagacacttcctcagagcgttgagtttccagctgatgtttttacgtcttgcctgacaacgcccattaaaatggcgttgaaatggtaaatcatcattccatctctgactttttttgcgtactcagatgtcatgttttcttcctacaaaatgtagtttaagttccgtctagctaagtttataaaatcttagctagtatgttctcgcttcatcatgaggtaagatcaaaacttttcggcagcattttggatgggaccaaagatggatcatagagttttgtttagaagaccttgtgcgtatgttttagttttgtggggtggtaaaacagcatatcataagagttgtgagataaccaggactgataatacctttagctgccaagtcactttgcatatggaagtttgctgatgtatggtttgcaataattctttctgtcctggctaagtatttttgatgataccaaaagattcacgatatcatcctgattgatagccttctccttctgtgatatttattctataactaattgctactgagtctgtgcggtttcaattctgggcttctttttaacctttttccagtaaacagatcaccattttatgtagttcagtttagcttgcagctttttcacaagaggatttccattgcaggttctgcaggcgttcgcttctgaaagaaattatcgatgaatcacttatcgacaggattccaggccggcaaaacgatcgtaagacattgttaggggagttgaactggattttcacagcagtgacggatacaattgcttggaatgtgcttcctcatggtacttctccaaactttctgcataatttatcaagggtaaatcttcttcaagttgacttcttttctgtgtcctcatgaatgatagttttaccctgcagaacttttccagagattattcagacaggacttgttggtcgctagccttttccggaatttcttacttgctgagagaataatgcggtccgcaaactgtaatccaatatctcaccctatgctgcctcctacgcatcaacatcatatgtggtattcaacaagaaccatattcttctgttatgtaaaatgttatgtgtctagattttgactcagctatccgttgcatgcttttcagggatgcatgggacatggctgctgaaatctgtctttctcagcttccccaacttgttctggacccaagcacagagttccaggtttgttttgttttgtatagtttcctgcaattgtatacgacggcgcttgttttgcttataaaacgtgttcctatcctttttctagccaagtccgttttttactgagcaactgacagcttttgaggtgtggcttgatcatggatctgagcataagaagccaccggagcagttacctattgttcttcaggtgcctagatttctgtacttattttcccttttgctgagagagagagggagagagagattcatattcatttgccattttctcactctgggttttgtgtggatatggcttaggaacattctttggcttccttcaggacgttctatcataattttgtttgcatattgccattttagcgtatttatagaatctggtttgtttcaggtgttacttagccagtgccatcggtttcgtgctcttgtacttcttggaagatttcttgatatgggttcatgggctgtggatctggtatacttctttaaattttaatttctctctccctttggcttacacagagtttctcctttttatcatgtatatgtctttacacgtgaagtgaacattcttctaggccttgtctgttggaatattcccatatgtgctgaagcttctgcaaacaacaacgaatgagctaagacagatcctggttttcatatggacaaaaattcttgcacttgacaaggtaaatatctgatgttccatgagctattttttgggaggaagatggtggtttgccatgcctctttttgttattctacaaattgtgctagttctttctgtggttttctgtgcacctgttgtttattgagtgtggaccttgatggaaaaacaatttgtgttttgttctgacatgaattctgaatgaacatatatttaccacctaatatttctctacatttttttatatcatatccttggacatcggatcaagttgcttacctatggccgtcacactttcaagatgcataagttttctcgtttcattcttggattattccaacattgactggtctcttttgttttcagtcatgtcaaattgatcttgtgaaggatggggggcatacatacttcatacgatttctagatagctcgggtgcatttccagaacaacgagctatggctgcttttgttctggctgtcattgtggatggacatcgacgaggccaggaagcatgtcttgaagctaatttaattggtgtttgtctcgggcaccttgaagcatccagaccaagtgatccacaaccagaaccattgtttctacaatggctttgtctttgtcttggaaagttatgggaagattttatggaggcccaaataatgggcagggaggcaaatgcttttgaaaagttggcacctctgctttccgagccccaacctgaggtgaagttcagatttctgtataacgtccttcgtgtagaagtgtacgttctgaccataacattctcttgtaggtaagggctgctgcagtttttgccctgggtaccttgcttgatattgggtttgactctaataaaagtgtggtggaggatgaatttgatgatgatgaaaagattagagccgaagacgctatcattaaaagtctcttagatgtagtttcagatgggagtccacttgtccgagcagaggttgccgtaggtacgcaaagcatgcaactcttgaaaattcatgttcgtggaaccatgggttcctaattagcatcagagtcatttaacgtcaaaagtaaaacaattctaacctaacaagattattttaaactagatacatctgtacatttttttcttgatttatcatttgcccaatttcatgaatccagtttacttagaaatccatatttatttgatgcgttagttttagagaatgacattttagctcgatacaatcttaaaatcatattgtccctcgtttagagagtttatatagagttttgtgcatttccaaatgtttgtctttgttcattctacatatacatcttgaagcgtagcttgcttacttttacttttttttctttctatttgatcccctagtcgctctgttgtttatgtctttacagctcttgcacgttttgcctttggccacaaacagcaccttaagttagccgcagcttcatattggaagcctcagtcaagttctttgcttacttctctaccttcaatagctaaattccatgatcctgggagtgcaacaattgtttctttacacatgagtcctctgactagagctagcacggatagccaaccagtggctcgtgagtctaggatctcaagcagccctcttggctcctctgggctgatgcaaggatctccattatctgatgattcttcgttacattctgattctggaatgatgcatgacagtgtcagcaatggagcggtccatcagccaagactgttggataatgctgtttattcgcagtgcgtccgagctatgtttgcattagctaaagatccatctccacgtattgcaagtctcggacggcgtgtgctttctattattggaatcgaacaggttgttgcgaaaccctcgaagcccactggccgaccaggggaagctgcaacgacatctcacactccacttgctggcctagctcgttcatcctcatggtttgatatgcatgcaggtagctgtttatgagtgttttatgatcataacttgatgcagaatttttcaaagttttgcgtaatttaagaatgctgttcattcttgaaatgttagtgaattctaatcttacactgttgttgacgacaggtaatctgcctttaagttttaggactcccccggtcagcccccctagaacaaactacctgagtggattgaggagagtttgttcattagagttcaggcctcatctattgggttcacccgactcaggattggctgatccgcttttaggcgccagtggatctgaacggagtttgcttccactatcaactatctacggctggagttgtgggcacttttctaagccacttcttggtggtgcggatgctagtcaagagattgcagccaaaagagaagagaaagaaaaattcgcacttgagcatattgcaaaatgccagcactcttgtaaatagttttgtctgttatctctggtttgttctatacctatactagtcgcctgaattgacttcctacattttaccttgaccagctattagcaagctcaacaataatcctattgccaactgggatacaaggtttgaaacgggaacaaagacagccctccttcacccattctctcctattgtagttgctgcagacgagaatgaacggatcaggtatgcgagtttcatcagagcatcgttaaaattgaatgttagaacaacttcttgcattcaggttaaccctctgttaggaaaagtacagggtagttcccaatctattggattaggtctcggtttagtttagtcatttagaaaaagcttccctttgaaacttatcttaaactttgatgttctctcttgggacctctttttatcgagaagccttaactgcactaagtatttcactttatttctcttagagtgtggaactatgaggaagcaactcttctcaatggctttgacaatcatgattttcctgacaaaggaatttcaaagctctgcctcatcaatgaacttgacgactctctgctacttgttgcatcatgtaatgttcacaactcttgccaccaagtctttcagatgtttgcaagttgattgaatatgggtgttgagtaatggtatctatgtcttacacatgcttttgggatttgggtaggcgatgggtcggtccggatatggaaaaactatgcaactaagggtaaacaaaagcttgttactgggttttcttcaatccagggtcacaagcccggtgcccgtgacttgaacgctgtcgtggactggcaacaacagtccggttacctggtttgtgatttcttcaatcatgctatgcacgatatttcttcttagttttccaagttacgaagcctgatttattgttatttacgggttactggtatttaacagtatgcttctggggagacgtcaacagtcacactttgggacctggagaaagaacagcttgtcagatctgttccctctgaatcagaatgtggagttacagcacttgtaagtctgcatgaacaaccttctgtttaaaacatagaaatgctctaggatgtcatcatttgctacaatctgatgaatcgaagagatagtatgcataagctatcgtcttatagttctttttgttgttttggaagttcatggttatcatgcttttccttgatcaaaacatttttgaattacaaaacatgtgaattttgcttactttatgttatctttgtagtctgcttctcaagtgcacggaggccaactcgctgctggttttgctgatggatctttgagactctatgatgttcggtcacctgaaccgtaagttggtttaaactttaatgttcattctttaacagaactcctcaaaataatctaaaatgagagcaccaaaaaatatttttgaatacatcacttaatatcatttcttctattgaaggcttgtctgcgcgactcggcctcatcagaaagttgaaagggtggttggcctcagttttcaacctggacttgaccccgcaaaggttgcaaaccaaaattgatctatgaactgtcagctttcatacctttttttatagcatatattggttcgggtttgaagaatttcgtcttggtttggtttttaattctcaagagtttctcaactctttgtcgttttcctggggccaatatctattctgttcttatcttcaggtggtgagtgcatcacaggcgggtgacatacagtttcttgaccttagaacaacaagggacacatacctgacgattgatgcacacaggggttcactcacggccttagctgttcacagacacgctccaataatcgcgagtggatctgcaaaacagctcattaaagtattcagtcttcaaggggaacaactagggataatccgctactacccatccttcatggctcaaaagattggatcagtgagttgcctcacatttcatccgtaccaggttctgctagcagctggagctgctgactcatttgtctccatatacacccacgacaactcgcaagcaagatgagtcacaaccgtaagtgaatatgttgcatttagcattgctcttgtgataaaaagaaaagcataaatcagtgcaggtcgggtcggttttgggtcggggtaaagtgggtgtggtttatagtattcgttagcctccgtccaagataaaacaagatctaagttaacactaaagaaggaggcttcaccaaataagttatatctctacctatgcaacaacgcacgtaaatggtgtctgtaaatagtttccctgttttgcttttcattttctcatctcttgggtgtgtgatttcctttttattaatcttttaagtcattctgtttcctaatttgtttcatgtgtaaaaaaaatggtaaaagtaatggtggaagaaaatttgcattttcgtgacgatgctttgaaatgttgtctgttgtttgttcaagttgggatccgttggaaataggcttgcaatttttcatgctacgcatctctatgattggtcaaataccagtttatgtcagaatccaagtaattatcgaaaaatctgatcactcactaggatttctttggttatcaataaagagatgactaacaatcattaacaatcataatgaatgacgatctttatcattttggttaataacaaaatctacgaacaaaaatccgttaggacattttttactgacacgtgcaaagcaaagctctcccgcgtgcaacaaatgaaagctttttgtttcgatgactgttttactgacttgtgagttctgactgacgatgaaaaaaataaaaagttcctcaaggaggtgtaaagattattgtacggagaattaagcttcctttggagatggcgtccatggcgaccggcgtcagtttttcgatgactagcggcataggagaaggaggatacgatgttcatcgagtagcgacggctgcacggacaactctgaagctgaatcagaagaactcactgagcgagagtacatgcatgcttttggggatgaataagtatcggggatccggagctatacgaaccgtctcgaaggctgtcggttacggacaagagatgagtaagagtctgagggtgggactcatttgcggaggtccgtcggcggagcgcgggatttctctcaactctgctagatcagttctcgatcatattcaggttattttccgttttcccatgatcaattgagctttggatttgtgtattttctggctccatttaatccgtctggtttgaaattgagtttcaattgtgttggatggtttttcatcagggtgatggtataaacgtgagctgctattatatagatcctgatctcaaagcctttgcaatttcatccgctcaggtttgcagcgttgtattaggcattttgaacaattctgctttatgtatctcttactcattctttcttttattgtttgtgaaaaatttcaggtgtactcgaatactccttcagatttcgattttaagctggagaggtgaggtgtatgatatgaacggtttgaaaaattggttatgggacaatagcagtgaccaaattagctgagtggctagtttgtttcatactgtagtcttgcacagggattctcgtcattatccgaattggccgagcatcttgtttctgctgtggacattgtttttccagtaattcatggtcgatttggtgaagatgggggcattcaggtttttttgtttggacaagtccttataaattttattttctattggaagtacttatgttacgagaccttaaatatcattgattattggctatgtaggagctgttggaaagtcacaacattccatttgtggggactggatcccgtgaatgttttcgagcatttgacaaggtaaatagaaagagtctgtggatgaactggtgtatcagatattcattacattttaattagctagctctcattgtgttgtttgatattcttcttcatctgtcttagtatagttctgattatttttagtgaacttattccagtatgaagcctctttggagctcaaggaacttggtttcatgacagtaccaaactacttggtgcaggtagtatattgtattattgtctatgcaggcatgtctctttattgcattcaattccctcttcattgtatattaaaatcttatctatacatgcactcaaatttcgagctagtgatatatttcctaaacacaaatccttgctcagggaactggagtagacaaaagtgaaatagcactgtggtttacagataaccagctggatctcgagatgggaaaagttgtggtaagcatctccccatttctcagcctggtcatagaaatgttgcctagagatccctcctcatttatttcactttttttttttctctcttcacgtttgtctgtttcaggtaaaaccagctaaagcaggttcaagcattggtgtcaaggttgcttttggcgtaaatgattcaattaaaaaggctactgaacttattctagaggtattatttgttttgagacttggacaatataactagacacttggaaatgaggaatggagatctctatttctcgaaactagaaaatctgtatttttggaggattgcaaactatttctttacaggcagtaagttttctttccttctttttttttggatagggaattgatgatagagttgttgttgaggtgtttattgaagatgcatatgagttcactgccatcgtcctggatgtgggttctggttctgtttgccatcctgttgttttgatgcctactgaggtaattacattttcaattgctttcttctgaatttcacagaagcttgtgcagattccttttttgctctgaggttctgtctcaactgtaatctggaccactcttacatgaattattttaatcttggactagtaaaacttgggcctcagttacttttcactaaataggaagcagatgtcaatacgaacagtttttaatatgctgaattccatagtttgtgactaacttatttgtgcattgaggtcagataatttcataagaaatcatttgaagtaatatgtatatggactagatcttaccattaatatcatgtttttccttactaaatacatgcatttatgtggtcaggtgcaacttcagtttcatggcattggtgatccaaaggaaaacgcaatcttcgactatcggaggaagtatctgccgacacagcaggtactgaaataaaaatgattcttacaatttccgtaaccaataatgaaaggtgtgtctggaacacattgatttccttaatgcccttaactctgtatttcaaataggtcaacatacctttctttttatttttcagaggttatcatattggtttctcagcatattgagttccaaactgtagtaactttatatctcctcacaatgagttcatttaaaataaacaggtcacctatcacactcctccacgtttccctatccatgttatcaaaagtattcgtgaagaggcatctcttatatttcaaaagcttggtttacgtgactttgctcgcattgatggatggtatttggctcccaattcaaatttatcatcacctgtaagtgaaacgcttggaggaaccaagtcaggagatattatattcacagacatcaacctggttagcctagtgcaatttcaccggccttcaaatttacccggagctactaatactttgcattgttcttagaagtaacacttgaatgcatatctcaaatgctcttacagataagtggcatggagcaaactagctttctcttccagcaggcatctaaggtaattaaagatattgtaactttgatggtatgttgaagatgtgcttcatgctgtttctactctgttaatctttttcttctcgtattttgtgaaatagttgtgcatgtaccctatttttccttactataatcgatgtgttataaaatgacatgattttataagcatttcacgtttttctttctcaaaatttttattgacagcaattaatcttctcattgatagtttgtaagcaaatggtaacgtcatagtgaaagttgaagctgtgatgtattgttcatttatgtctatattctcatttatgcctggtccactccaacattaaggttagatgtttatattaccatacatgaattagatcatcgattcttacattcaggttggattttctcattcaaacattctgcgaacaatcgtccaccgtgcttgctcgaggtttccccatcttgattggtataattatgggtatagtcaattactccaaggttcaacaaccctggaagtctctgaggacccccagaaagtgtttgtcatatttggaggagatacttcagagcggcaggtgtccgtcatgagtggaacaaatgtctgggtcaatttgcaaagatatgtagatgtaagttgaaaagaacgcagacatcatttgaggtgtaatcatgtatcttatgaaatcattaattcctgtgtatattgtcattaaacgataatagtgggtgcaataggattgccctgactctgatgatcttgttctttacagcttaatgtaactccctgtttgctttccccctcacttagcaactcattaggcgcatcttcgaacttggacaatagagaagtctgggttttgccgtaagtatattctcagacatatgttgaaataatatattcagtagtctgtacacatagatacaaatgttgacctcccagacgatagaggggacaccggtataacatttcacatggatgtatgaaattattttagcttttctcatttgtaacgctatagacggtcaacatcactaatgagtttctttattctcagctactcggttgtgctaaggcacactgctgaggaagttcttgcagcgtgcttagaagcagtcgagcctgttagggctttatttacatctctgctgcagaagcaagtgatggaggatcttatggatggttttaagaatcaaagctggtttgcagggtttgatataacagacgagctgcccagaaagtactcattgaaagagtggatcaagcatgccaaggaagctcaagcaactgtcttcattgcaggttagtcttgtaagagagagactgcaatgtttccttttttgtactaacatgactacatgagcaaatataagattatgagaaaaagctatcaacaaactaaatcagaaaacctagttgcaagatcaaaaacaaaagccgggaatgttgatacattttttgtttaatattgcaatgttgatactcttcctgacgcacttttttttggtaagagagtgcttctgttctgcatgcaacacatgcaacattatgattttagttttcaaaatgctaactggcagtgcatggaggaattggtgaagatggtacactgcagggcttgctggaggatgaaggagtttcttatacaggttagttgctacttttgatgtagcatttgggcttctatttaattctccacataatatatgttcacggtattgtttaattttccttttctgttcttaaataaaggtccaggcgtactagcttcaaggacttgtatggacaaggttatgacatctcaggctcttagtaatgtatggaaaccaatcgatatactcttcaagccgatttggaaaccgtgagtattattgtaacaatttttgttgttgttgttgttgtgtgtttcttgtaatcaatagctttcagagtttggaattcataccataagcaaagatgtgaagagaacagaggatataatgcatgagaccttcccaaatgtttgggatgaattaatcaagaagcttcagtgtctcacactatgtgttaaaccagcaaaggatggatgttccactggcgttgcaagattatggtaacttgtatttaaaattcttttatcgttaccactaagttttttgggtgtgtgattaaacctttgtgtttttctgcagttcctctgaagaccttgctgtatatgtacaagctttgaaagattgtataccaagaattcctccaaacactctttctaaggttaaaaaacaaataattttgttagtacaaccgtgaagcattcattattaagttaggattatccaaatccgtatcttcacttgtgtgtgtagacacatggaatgattgagatgccaaatcctactccagaattcttgatttttgaaccatttgtcgaaaccgatgaaatcatagtttcatccaaagccaagcagcagctctcttggaaaggtaggaggcggtgggtagagatgactgtgggtgtaattggaaagcgtgggtcaatgcattcactgagtcctagtcttactgtcaaggaaagtggggatatattgtctctcgaggaaaagttccaaggtactctcacttgtctttctttgccacttcatgtcttcttttgactttatgagagaaataattagtctttacagtggcatatgaaattaaatcttgaataggaggcactggcataaatcttactccacctccaccaacaatcatgaggtttgtctatagtttcttttgggatattattagtacatggagtagaataaaaccatacgaaacagagcattttactttgtaggaaaaggggctatttaagctctttaaaaagctattcttgttacggttagcaaattcaggttttcggtcgaaggaaactataaactaatttgaaacttaatgtgttgtcagctccaaaaaagtgagtttcgttttagttttggggtataaaaaatcctataactaaatcaagatatttatcagtttattggcttttgttgactttggtttaaccaaagaacacagagggtaaagtataaagaagcttatgactaatgttgtgagatttcagtaaggaagctttggagagatgcaaacaaggcattgagctgattgcagaaactctcggcttagaagggttttcacggatcgatgcttttgtgcatgttgaaaccggagaggtacgatagggacctagagaattactttacattctactaatggttactctcatcttacattccaaaatcaattgcttggttctcacttgttggttgtgcaggtgctggttatagaggtaaacacagttcccggaatgactccttccactgttttaatccaacaggtgacttttgcattcctatttgtccaacagaagtgttgtttacaatttcaatctaatctttaccataaacacatattcgaaagatttgtacttggaattctcctcatgagtacatagacgataacatgttctttgttttgttttgggatattggaaacctaaaggcattagcagagcagccgccaatgtaccctcctcaattctttcgcactctgctccatcttgctacgcagagagttgtgtaagcttttctttgtctttcgtatttacattattcccaagtttagtgtgttttttgtaaattcgatgccttcgtcatatgattaaaataaagtggatcccatatgtatgagctatgatttgaatttcatttcggtatatattttatgaattgtaaatttgcaatatcatgctaatgctatattagctgtccaaaaaaagaaaagagtaatgctaaattagctattcttcttatgaggttgtgattcaaaagaggaactaagcaatgcgaaaaaatgagagaaaacaattttaacaatttaatttggattagtttgatacaaaagcataggatcaaatctgatacaggcatattattattaccaaaaaaacaaaaaaataaacgaaaagacattaaaattcgaatttaaagcgatgtccattttcaagagtgataaattggcgggaggtaaccctaatgttttaaaaaagcgatgagcatcgtcaccgttccatcagcaacatcaaaagtccagcagatcaaaactctaatctccgtcgcatgcaccgtcaatcatctgaaacaaatccacgtctctctcattaaccaccatctccaccacgacaccttcctcgtcaacctcctcctcaagcgaactctcttcttccgccaaaccaaatactcctatctcctcttctctcatacccaattccccaacattttcctctacaatagtctcatcaatggcttcgtcaataatcatctcttccatgaaaccctcgatctcttcctctccatccgcaaacatggtctctacctccatggtttcaccttccctttggttctcaaggcatgcaccagagcctcgagtcgcaagcttgggattgatcttcattcccttgtggtcaaatgtgggtttaatcacgatgtggccgctatgacgagcctgctctctatctactctggatccgggcgtttgaatgatgcccacaaactgttcgacgaaattcctgacagaagcgttgttacttggacggctttgtttagtgggtatactacttcaggaagacacagggaagccattgatttgtttaagaagatggtggagatgggtgtgaaacccgatagctactttattgttcaggttttatctgcttgtgttcatgtaggggatctcgacagtggggagtggatagttaagtacatggaagagatggagatgcagaagaattcctttgtgcggacaacacttgtcaatctctatgccaagtgtgggaagatggagaaagcacgttctgttttcgactcgatggtggagaaagatatagttacttggagcactatgatacaagggtatgcatcgaacagcttcccaaaagaaggaatagagttatttctccagatgttgcaggaaaatctgaaaccggaccagttttctattgtcgggtttctttcgtcttgtgcaagcttaggagcccttgatctaggtgaatggggaattagtttaatagataggcatgagtttttgaccaatctgtttatggccaatgccctgatcgacatgtacgcgaaatgtggggctatggctcgaggttttgaagtatttaaagaaatgaaggagaaagatatagttatcatgaatgctgcaatttctggtctggccaagaatggccacgttaagctctcatttgcggtttttggacaaacagagaagttaggtatctcacctgatgggtccacgttccttggactgctctgtgggtgcgttcacgcaggcctaatccaagacgggcttcggtttttcaatgccataagctgtgtttatgctttgaaacgcacggttgagcactatggttgcatggtagatctttggggcagagcaggaatgttagatgacgcataccgtttgatctgcgatatgcccatgaggccaaacgcgatagtctggggagcgttactgagcggatgcagactggtcaaagatacgcagttagctgaaactgttctcaaagagctcatcgctttggagccatggaatgcaggaaactatgttcaattatccaacatatactctgttggtggcagatgggacgaagctgctgaagtaagggacatgatgaacaagaaaggtatgaagaagatcccgggatatagttggatcgagttggaagggaaggtccatgagtttctagcagatgataaatctcatcctctaagcgacaagatatatgcaaagctagaagatttgggtaatgaaatgaggcttatgggttttgttccaacgacagaatttgttttcttcgatgttgaagaggaagaaaaagaaagggtcttggggtatcacagcgagaagcttgcggttgcgttagggctgatcagtacggatcatggccaagtgattcgggtggtgaagaatctaagggtatgtggagattgtcatgaagtgatgaagttgatatcgaagatcacaagacgagagatcgttgttagagacaacaataggtttcattgttttacaaacggctcttgttcttgcaatgactactggtgagctcgctatggtaaaacaaactgatgtgaaaacgtaattgttttgtagctttgacatttttggaagaaataaacatatttttggtgttacatggtttttaagaaaagttggcagagacagaaatataccttttttgacatgtcacatgtctaaacatactagataaatagtacatattgatgaacaaaatcaaagtatgaattttaaacttgttgcatatagatttaagtccggtttgtggagtagtacataactcaatactacaagaagacatatcaaacaaatcaatgtccattggtccatctcaaacatgtatgatcaaaatgttgcaattatagtaacggcccaaaaagcccaagcaactctataaatagtagtaatattgccgccacaacaaaatatatccacaaatccctaaattacattccctggttgatcaacggcgattcaactccgtcaatgtcttacccggaaagaaagaggaagaggagtcggtggtcaaagccgcattcgacccaaaacccgtcaccgtcacttcccgatgatgtgctattgagcatcttcgcacgcgtctcaagattgtactatccgactctctcacacgtatccgagagctttcgatctctcctagcttcaccagagctttacaaagccaggtcactctcgggaaacaccgagatctgtctctacgtgtgcttacggtgctctactggttatcgctggtttagcctcagccgtaaacctgatcaaaccctaacctatgaggagaggaagtcaagtggttatgctttggctagagtcccaattcccggtggttctcctaatgtacgatcttcgagtctcgtggcggttggttctgatatctataacatttgcggatccatcaacaaagcgtcctcctcctctagcgtctcaattctggattgtcagtctcacacgtggcgggaggctccaagctt

SEQ ID NO: 1282 - DNA, 106688 bp, Arabidopsis thaliana
gaattccccacgtcaacgtgactgtgcattccacgtggcggatgtgggccctatagttggaccatgactcggacggatgttgaaattcattgtcgttgccaattgcgtttgtctcactgaaactgtgaaaattttatctcttttatagataaagaatcttgcttttttcagttttcagtatgaagaagaattgaagagagtgtccgaggaaggagacctttggtttcagtttgtgagtcttgttgtaatggctttatcaatggagtttgggttttcaattgggtcatgcttcaaggcaccaaacccacctgttctaatctctgcaagccctaataagatcaatttcacgttgagaaggagaaagaaaagattcttacttagagtctctgctgtgtcgtataaggaattcgcagagtctgctttagaagaaaccaggaaaaggatcgttcttgaaccttcacatctccaggtatatgcaattacatttcgttagtgtagtgggaggattatatttctcattgtttcttgctgtgaattttgggtaaattgatttgagttgtcattaggaaccaaacaaataactttactgttatagactgcttatataagtaaaagttcagattttgtttttctaatcacgaaactgtttcaggaaaagtatagtagcatgacaggactagatggtaagaccgaacttcaaatgcttgcttttaaatcttcaaagattagactcttgaggagtatggcaatagagaatgagacaatgcaggtttaacttcagcagtacaaactgattgctttagtcccatttccttactttcaattgattgattgtttgtatcttcgcttaggtctttgactttgcgggtttcatggagcctgagtatgatactcccatattctgtgctaactttttcacatctaccaacgttaacatagttgtattgtaagttatcttctagttatgctggagttatcaggtctgtattgtccaaactgatgttcaatattttactgtatgttcttctttagggaccttaatcctttgcatcagttgactgaccagacggattaccaagacaagtattataacaagataatgtccatatatcacaaatatgctgaggtgaccacaagaatacaccaaattactcaattgcaagtaaacctaatgctgaggtgtaaatgactgatcttgagatttatttgcagactttcccatggggagggaaattgactggtgaatccataaagtttttctcgcctttggtgatgtggactaggttttcgtctagcaaagaaaaacataaggctttgttctctgcgtttctagagtactatcaggtatatactcagcggccaaaagctaaggttttattggaaactttgactgagaatctatcatcttcttcctacaggcatggcttgagatgacaatccaagtgagggaggagatggaaccatctcatgtgagagccaattgtgaagcacaacacaagtacctgacatggcgagcacaaaaggtgatttcatttccttttgtgtaatttgcatgtttgaacagacactgtatctgtattgttacaatggatattgatttggtgtttgcaggatcctggacatggtcttcttaaaagattagtaggtgaagcaaaggcaaaggtataaaagatttgatcccattagtgtccccattattaattagcttgtgaagatgttgaaaatgatttgaacaaaatcaggagctgctaagggatttcctgttcaatggggtggatgagttaggcacaaaaacattcattgattactttccagagtaccaaacagaagatggaactgtaagcgataaacgaagtatcattgggaagtcatatgaaactcgtccatgggatttaacaggacaatttatcggctaacaatgatatatgtgaacaagtcagatttcagagtcatcaacacaagaggacgtgaacttagggaagtaggaataagaaagagcagcatgaggagtctctcaggtctatctgcatttcaagatgattgtttgagttaccatgcattgtagttttacaagtgtagctctcagcccttcatcaaaatgagaatcctcgagtatgatatgattttaatgaaaatgtattcgtctctacctaatcaacagagattaacttataaaaatccagacataaacatatcataactctaacatccagacataaacatcatgcgttaggtaaccaaggcagatgatgattagcgagcttaataacttaaacatctagacaaaaagcataacaagtaaataaaaaggaaggttgcacaagttaaaaacacccaagaggttcgtctgcgagctttcttctactccaaagtcatctttggcttcttaattatcttcttttttgcagtcctctttggcttcttaattatcttcattatggcagccatctttggcttttcatctataaagtaacaacgaaagtttgttacacttggttaacaggaagcaagaatcaacaagatattgacgtacctgggcggccacaaatgatgcggcctttctggcggcgggggtggaaaatgtttcttccatggtaagcaacaaaccgaacaactgctttgcgcccccctcccatgtcggtcccactaagttttggggccttgtctattgcgtcttctcccagtagatacactatagagaagctgtaaaaaaccaggacgacaagtctttagtataagtttagactttactaacttggggaaatatggttggggaggaacaagccacaaacctatcgaaaatcatgacatgatcaaccttcccacatgaagagaaaagtttactcaactcgcacttgatatcagactcactaagcgaagtgtcgtatcgtatccttcaacctctaactcaacgcaactgaaataattggattgcagcagatgatatagtataattagaaaacaatcttaaagatacaaatctcggaaataaattccgtttacttgtcttcttctttcggaaagggatcggcctcagcatcgacagtccatcctcccatgtcacttccattgagttgcaaggccttgtctgctgtgccttctcccacaaaataaataaaagcatgactccagagagaagaattgcgagtttcgggaatatgaacatccgtgatctctccacatggagagaaaagttttttcaactcactctcgacatgttcacgaggaagctcaatgtcatatcccgtaacgctaatcctctcaatgtcactgtcactacaagcaagagatcatgatcaacatatatacatatcttactcatacaataatctcaaccaatcaatcaatttaccggatttttcgactacgcttcacttcaagcccctaaagatacaaaaacatctatcagaaattcgaaacagatcgtcaaagagtgaataagaagaaaggctataaggatacgaagaagattaccttgttggcgatttcgtccatggataagttgacaagagcgccggcgataacccttaagagatattttacggttttagagatttaggtctgatttgaacaaggtattaataattgtgttttaaaaataaaataaaaaatcattactagcttgctatgcacggacatagtatacttgttattttctttttatagagaccgaaatatttttggtatcaactaaatattttaataatttgaaaccaaatgaatcatatttttatctctttaacttttaaagacaaatttcatacagttaaacttttttcataaagcaacttcatacatttagactaaaaaatcattataaaattattatgattagctaacagatttaaattgtaaaccaatttaaaaaaaaaattaagctagtcttttcatttttacaaaagattttggtggatcaaacgtgtagcccttaaaatctatttttgttgtttggtactaatacgttttttcttggttttatatcaagccaatctccgtcacttatttctgatatcaaaaatcacttttttttttaacagtttaaaactttattatctcctttttcgcaaatatatgagttgtttttatcaaaatagtatatggaatataatggttctgatgtttagatctaatcatccagaaatttatgcggtcgtgatagtggaggtacaaactacaaagcatgtcgcggaacgcaacttttctctatctttcggaatatggtgtttgaacatattttgatcgtaagcttcatgtaattgctaattctttattgattattctccaaagcagctagtgtctgaggcaataaaaattttcgtaaatgacttttaaatacatatataatctctcagatactaaatataatatattcttaatatgaactaccctcacaagcatggatgtcgggaacaacaacatttcgacgcacctgaatcaaattccattttcattcgaacaaaaactggagaggtttgatcccagtcaccaaccgactcatccttgtaggctagatcccaaacactacttttctcaaccttccatttctgaccactcaaaccggttcaaaacgccctacgacgaccaacggttcaattcggcaagaattagcttctacaagaagcttacgatctaaatctgctctaacaccatactccgagaaaaagagaaaggttgcgttccgcgacacgctttgtacgtccgccatcaccaccgcaccaacgtttgtacaattggatctaaccatccgaaccattgtatttcgtgtaattttttgaataagaacaactcaagtatttgtgagaagaggagatactagggtttagatttttagagaaataagtgatttctaatatcagaaataagtgacggagatgagcttgatataaaaccgcatgtcatgcgtgaaatcttatcatgacaaatgtatattatattgacccatcataaactttatcgccaaatattttttctttttatccaaaagtaatattcggtatttttttagggtgaattagctcaataaccatattccataaaaatattaagtaactaacaccataaacgaaggaattgagagagtgacgctacgggtatgtgaagttacaacccactccctaagccacgtttctgtgatttcttgtacgcgcgtgagggtaagagcgagcttctttctaccagctgacgtgtctcctttcgaagccagtaaaaaaattatcctagcaccgcttgagaattgtcccatcagtaacataacctgcagatttttacattaatttgaataaaatattccccccaaaaatatcggagcagaagatgctctgttttctatttattgccagtaaatgctataccttttacgcagagatctaacctgcaaaacagaacagtatggatggtggtgaaaatagtacagcagtaaatacagggaatcaaaagggaaaggtacaaaaccatcgctttcttgtttctgtttttagtctctcgtgatttaattgcctagtgtaaagtttccatttaaaaattctcacttttacgttcgaatataccacttacctagattgtagatctgctaaacaacttgttagtatttacttaaattagatcgtgattcacgctgtatttgttattccgtaattaaaagctacgaacgattaaattggaaaactgttattattgattgatatttacatttaattttcattatgttctttctaaataatactgaactatttccataatccatgtagaccgcaggacaagatgaagtattgttggtgattggcgagtgggtcagggtggataatctagcctggcagtttgaacctaagactgtcgaaggatcgtcattcatccgactcagaactaacatgacgtatgaagagctatctcagaaggtgaaagataaacttggcttgcgtggaagaggcatcacagttaaaatggcataccaatttccagagtggatggcgatagatgaaggcaacggttctccacctcaatacatcagcgaagatagtgatgttacaatgttcattcaaatgcggcggcatatagaggaggtcaatctatgtgtaactgtcgtccaacacactattccaagttctccggttgctgttacggacaagaacttcaattcagaggacagtgacgattcagattatgactcagaggaggaacttcaccaatttgcacttgatagtgccgtgttggggcctacactagagccaaccgctgctacaacagagacagaacaacaccgtcgtaccaggcgagagctgttccctacaggaggaatcagtattagagagcctgaagaatgcatccgccttaaaagccctgactgtctccctactgacaaagggaaaggaataatggacccaattgggaagaaagggaaggctggtccaagcagagcaacggtgacagatacctcaacagacagtgatgatgacttgctcattgttccattcacactgccacccaatccaccagctatcaccattccggaaaatgctgacatcgaaggcgcagattcctcacgggcagctgtgggcacgcctcatggcaatcatgtttctcctattggtaatgctgtagcagaaactgaccttcagcgtcaaaacattcttttttgggggcgggcacaagaagctttaaacactatcctatccgatttcagtgatgaccctattctttttggtcgggacgccccaccagtatttaacgatggaaaaggtgaaggtataacttgcattccatatctacatatagattttgtttgatgcttgttgcaaaacaaatttggttatggagtaattgggaaaatagagttcacaccttatactattctatttatattaatcgtgtactatttatattacagactacaaccatgtcgctgatagatgttccttttatttcaggtgtggactctgctttctttgacgttaaatacgaaggagataagctgtttgttggcagagtctttaagtcgaagtctgactgcaagattaagatagctatacacgccatcaaccgcaagtttcacttcagaactgcgcgttctactcctaagtttatggttctgaaatgcatttccaagacctgtccatggcgtgtatatgcatctaaggttgatacttctgacagctttcaagttcggcaggcaaatcagagacacacatgcacgattgatcaaaggcgtagataccaccggttagcaaccactcaagtgataggcgagcttatgcaatctcgctttcttggtattaaacgtggtccaaacgctgcagtgattaggaagttcctacttgacgactatcatgttagtatatcatactggaaagcttggcgggctcgagaggtggcaatggagaagtctttgggatctatggccggtagctatgcacttattccagcttacgctggactccttcaacaagcaaacccaggcagtctatgctttacagagtatgatgatgatcctactggtccacgccgtttcaaatatcaattcatcgcattcgcagcatcaattaaagggtacgcatttatgcgcaaggtcattgtagttgatggaacatctatgaaggggcgatatggtggttgtctcatctcagcatgttgccaagatgggaattttcagatcttcccactggcttttggaatcgttaacagcgagaatatagtgcatatgaatggttttttcagcggctaagcattatagctccagacaatccggatttaatgtttatctctgaccgccatgaaagcatatacacaggattgagtaaggttagacacaaccatccatctcacgtttcttcatatagtatacatatatcgatttacttaatatgccaataagctggttctattttgattggataatgaatgatttccctaatattgttgcaggtctatacgcaagccaaccatgctgcttgcacggttcacctttagcgcaatatcagacatctatataagccaaaaagcctctgccgcctaatgtctgaagctgcacaagctttccatgtcacggatttcaatcggatattcctgaagatacaaaaattgaaccccggatgtgctgcatatttagttgacttgggtaagtgtttttctcagcttacatatattgttattaacgtggctgagatgaagttgactccataacctctgtattttgtaattcatataggattttcagagtggacaagagtgcattccaaaggccggcgtttcaatatcatggatagtaacatatgtgagtcttggaacaacgttatcagagaggcccgcgagtacccgcttatctgcatgctggagtacataagaacgacgttgatggattggtttgcaactaggagggctcaagccgaagactgccctactacattagctccgagagttcaggaaagagttgaggaaaactatcaatccgctatgtcaatgtctgttaagcctatctgcaactttgaattccaagtacaagaacggacaggggaatgttttattgtcaaattggacgagtctacttgttcctgtttggaatttcaggggttagggatcccttgtgctcacgcaatagccgctgctgcaaggattggcgttccaacagactcgttagcagcaaatggatattttaatgagttagtgaagcttagttatgaggagaaaatctatcctattcactctgttggtggagaggtcgcaccagaaattgctgcaggaactacaggagagctgcagccaccattcgttcgccgtccaccagggagaccaaggaagatcagaatcttgtctcgtggtgaattcaaggcaagtacctattagtaaacattacaatgtacttcttatctgttaacaagctaataacctatctacttttaatatgcagcggaacaggacaaggtcccagaggaggtgttcacgttgttgtggtgttggacacaataaggcctcctgccgtaatgctatataagccgtcaactactgctatggggtgctaataggtgttatgaagaaactttctggagtgggcttaaataatggttgttcccgcatatcttgcggaagcgggtttgtttacttctactaatgcaggagtaagtacatttatttaaatagtttggtatacccaactttgatgtataccttattattttgatttttatgtactacctgttcatcgtgtatatttgtgttggtatctctaatcccgatgtaattaagtaatgccctgtaacaccgcttttgaaatgtatatatatgaaaccccgcagtctgtctaatcacccttctctgcttctttccagtgcaaaatcatccatatcttacttacataaggtacagtctttctttttacgaaaactaaaccctaataatgaagtgggaacccaagcaatgatgcatcagtaattgtatacactgatttttcctgtaacataatcaatggggtaagccataacaaaccaaaaccatcaatctgcttttggaaccacagaaatgagtttgtttacacgtttgatgaaactgttggccgaataacatatgttttacttagtttcattatgctgtatgttggagatgcactttcagtcaatcgcgagcttgtacctgcaagctgttacagaaccaacgtggtgagctggcgagctggcaatgtgaagcgagctggcaatgtgaagcgagctggaaatgtgaagcgagctggcaatgtgaagcgagctggcaatgtgaagtcggggataagcaaagcacgtgttgtgagatggcgagctggcaatgtgaagtcagggatgttaagcaaagcacgtgtgttgtgagctggcgagctggcaatgcaaatggacgttaacggcgatcgttattaacgtggttagcgtttactttctttacctttttgtataagagcaacatgttatgctcatgctttcattatcgaagattgttatagaaactctctctcttctagaactttctttgtaatctctgggtttttctcatcttgagaaccagaggagaatcactccgcgtttcatgaacgttgtttgattcttaagtaatatacagagctttcaatcgtgttggtgttttggttgttaatcggagatcgtgatattttctgtatcacaagcatcacgtttataaatgttatgattatatagccaaacgggcatcatggatggcagcttcgtcataaatagttttgcatggtatcctattctatttactatttactgtactattccgacccatatgcaagattcaaataaaaaagctcgttttacatcaaataattggaggctcaaattgttttctcttgatgtcatgttttcagtatatatgtgaaaatattactcgtttagttataatgatatgcaagaacttgacatttcatttattagttgaatactttggagttataggagtttgtagctataggagttcagcatatctgttattgcatcactgtaatataacccaacacactaggctaataggctgaaacatttcacttcaaacataaatatacaaacatcacagttagtagttgagtttcaatacaactgttctctgattacaacagaaactccatgtttgttcaacataaattacacatctacaaatcaagcaccacgttctgttggagacaatgcattgaaagtttcgatagcgtactgtttagctgcatctcgcatcttcccatcatctagtttcccacaatactccattgcgttcactgagtgtagctctagtaagaccacacttgcaattccaaccagccctgaaataaacaaatgtaactatatatgtaaaccaatcacattgcacacaattagtgggagatcacaaatgaaacacaaacagacctagtgaagaacaactgcactgtatcttgggtctactaacagtcattggctccagcctctgtgttagcatgtacccgttaactccatgctttcgaatcaggtacggtagcatgattgttatatgctctacgtacttctccacctgctcgtctttcaacacgtctctgttacagtctaaaactgtgactccccacttcttcaaatctatgacaagcccaacccaatgctgcctctcgacctgcatggggcagtagatgacgtcaatctcggcaaaccatttcggacgcaccatgaaggggactcttgcaagagtgctgaagtaaaaagcactcttatctgcagctcctacaaacttgttgtactggcgtcttagctctgacaagaaacttgaaggtaggaaatcaaaacgcagcggcttatttttatctaatcgcagctgtatgaacctcactaacagatcaggtccctgtggcaggaaaatgtttgttagcacaaattctatacatgagttacattgtctatcagtactcccacagttgctgcaaaagtagatgaatgaagtattctatagtaacttactgattcatctagtagtgtctggccctcaaaaatgttcaaaaattctgtattctccagtacaacgccatcagccagaacatatgagctgcatgttaacatataaaggttgcattagttgataccacaaagaagagcggttactattctatacttagtgtgactacttacactccccgttccatttgtttgagaaaccttttcacagatgatggactaggcacagagaacggtttaaaaggcccaataaaagcaggtgattgatttggagtctgcttctccacttttgcagaactactaacatgacttttaccagcccctctgctagctgtttgatgcggctggaccggtatgctagtcatattctctatactgttgctttgaattggcctgtcccttatccggttgctggaccgcaacacagaaactttgctggggaatgtcttcttcttccctcttggaggcaacctgcttctgttatcgttgatttcttgcgttagtcccaacgaaaaattcggctccacaatgtctacttcatcatccaatttctcagttggtgaaacatactgcaaggcatataaacatgtacatagttcagcggagcaacaacatataacgttacatttacataaatgggaactcttactgttttgggttcatgcacggcctctttgttttcaagctgccaataaccaatagcgaaagtaagtgggtttgctgcaacataaagtatgtatattgtaactcaaaaccagaaataaatataattacctttgtgctcgccacatgctccatatctttcgctcgcttcagtggcctattagattgtgcatccatttgagaacaagattttttctttcctcctttctgaatagaatcttcttctcttacctaagaggcatcaaaaatatatgtcattcttaccgaatacacacaaatgcgtcataatcttcactgtattctcacctccattctagtgttagggttgctgcgttctggaacagacactccaacgtttatgccgcacgcagccggcaagttgtcacttccttcacttaacccaatattaggttcaacctgttgggaaactccatgcttatttcctggctggtcagctcttatttggtcctgatgcatcaacagaaaattgttgtttaatgtgaagctgtccatatacatcaaatagcacctactagtgcaatacttgaagtctcaacaagcaaattgaggtgcttaacctgtttagagtgggcatcagcaacacatttgctgcattctccaacaattccagcctgtctatttagcccactcacagcttccctaaccgattcagtaagtattgcaaccaattctttcttctgcttaaccagttcagcctcaaagtatgacttcaattcatcgttgtttgattgttgaatcttgagaacacgtttctcaaactcatcagctacctctttgatgactgcctctctaagaccatgtccagcagagccactatcattgttttccatctcgccagctcttgggacttcctgctgcaacccttctccatccgcaaaactgacaccatctttatctgtcaccggtccatccttattcgcctcaccatccaatccgtctacaccttctccggctgcacactcttccctctcttctgcagcaacaccagaaccatcaacatccatctcatcgtcaccatcccccttagcctgattcacacagtcatcagccatgaactcatcttcagatggatgttcaacatcattagcatcaacaccaccactccaactgttatgctcgaatgggtgttcctccattatcaatgatagcagatgcgaaacttcttcatcatcctcctcatctgagaaagataagtcgatctctttcgccaggagctcttcattcagcagtgaggttacccggtcctaaaagttaagagtcaatagaatagataagtcaagtacacaatctttctacaccaaatacaaagaacaagctttacaacaatagaattaccatgccactttggtcgatagttcgtgcatcatgcacattgatgttcaaactcagccccaatacatactgaaccagcttctcgactggaatggttgggtctagaatgttaaacaccgagtctgccgtgtatataatagctggacaacatgccactgtcacaagaactaaggcatgaggaaacccttgtatagctgtggtatcttgtgcaagctccttggctgttctttgcttggcgcttcgaatagtcgcgagaaacgaagttctaccccaaggatatttaagaaaggattctacatcttttaccatctctacatggtcaggatcgatgatagttcgcgaacatgtcgggcaaagaatcccatcaactagtagcagcaacgataggcgaaatcgagtcaacgggtctttgtatttcttccccatagatagcttcccaacaatccattgtgaagtaggctttctctctttcccaaataatgccttgtagaacctcgtaggattctgaaccgctttcattttccctcttgtccttgcatcctttttgttgaatccagatttgctgcagttaagcccggtaacaagtgcaaaatcatcaatggcaaatcgaattggcttccctgcaaacacccaccacatttcatacttcttatctgtcaccaactgcctagatagaatgtaatgtaagaacattacagaaaactgatgcgtccccatttgcaacagaaatccaaactgcgaaccctccagctgcttcaaatggttttgatctagagcagccttgatgatctcaatccacctaagagtaaagtaattgtttatcctctttcggccctcaggttcagaacctagccgaaacaaacgctttggcaactctacatcccccatggaacagatacactgaaatacaaatgtccacgtatcacttttttgatgctgctacttacacaaatacaaaatatataaatcttagatgtaaatatatgttattaacagactcaaccaatatagcctcagctttccgttactatcaacaacaacaaatggattacatagaagttgagttaaatattaaaccttcataacaccaattagtggaatatcggattaaccagcaaagattcactaactaaagctactcaaatccgagtttatgctattcaatactgcaaataaaactaaaaatgtcattaacacatacaaccaatttgagtagcttccgttactatcaacaaacacaaatggattacattgaagtagagttaaatcctaaaccttcataacaattacaaatgaatatcgtattaaccaagcagattccctacctaaagctactcaaatccgagtttatgctattcaagctcttcaacacaaattaaaaagattttcccaaaagccaaaaaatggcatttcataccttaatttggctgaatcccttcgccgacaccaattgccacagaaattcgagtgttacagtggagacgacggagatataaacacctctactcccgtacaacaaaactcactcaagtactctcaacggaatcaaaaaccctcgattgagaaaagagccaacataagtgttgtacgaaactcggatgcttagataggctcctcctccaattgcagaagatttatgcagtccgattgccagaaatcgaagcctccacagtccccaaatcgaaacccacaaattcaatcttcgtaaactctagaatcgtcactcggattgcacacgcagtctgctcttcgaaactttcccgggtgtcgctttttaaagcccagaattttcagattttcttactgtaacttctctgaatgttcacctctatttgaatttttacagagtaatacatagaagttatcgattgaaaactcagaagaagaagaataagcgcgtgtgctcacgcacgggttaagtttgtcaatattgcataaagttcaatacatattggttgaagtgttagttttgcaattataatttttttgttggctatatttgcaaatttcccatttttttacatgtacaaactaaaaaaaaaaaaatattaaagtgaacaaactgtacatatgggctaaaaactaaaagtcccacaaacattgagattacaaaatacattttcagtccaacatgagccataaagcattgcttaatggagtaaaactcaatttaacagagtggaataaattaaacaaaataagacgtgaaggagcagaagcaagcatatcaacaaaaacgcctttgaaacgcaaacgctacaaaattgcgtctggcgttacagtagattgagatttgaacgtgaaattctccgagtccagaaacattcctctccttccgtcgtcgtcaagaagatcaatttcattgaaatcgaaagagtgtgcttgaatcacagcttatgcagacgctacaccagtcccaacttctccagaatccggccgaggcggcgaacaatcagtctgaatcggacgcgccgccgaaacaggtggctcaggccatggaacgactcaatcaagcggctagggttatcgccgatatccgcctcggcgctgaccgtatccttgaagctatgttcgtggcttcgcaacctcgtcacacagacatgcctcttcagctctttctcagagaagacgcctccatgcgtcaacatcttcaggatcttcgcttaataggtgctgaaccaaaactgaatcattttcattagtattgattgattctctagattagggcttttaaggatcgatcaatgtttattgcttggttcagggaagaaattggaagaatctggagtgttaactgaatcacttaggtcaagaagtaactcttggggtcttcacatgcctttggtttgtccagatggtgcagtcgttgcttatgcttggaaaagacagcttgctggccaagctggtgcttctgctgttgatagaaccaggtatcagattcgttgctaatcattttaaagcatacttagggtttaggttcgagtctgcatattagggctgttagtgaagcttggtggtaccaacttggagtttcatcagctaaccaattctactgaatctcatgcattctccattttctcgcgttgtgtataatgactgtaggttagctctcaaggccttcacggatcagaaaagacgattcttccctcatattgatgatggattaaagatggaaccaagctcaaaaaaacatcgtgcctcccatttgctattagaaaatggaagagaggagccggttgattacaaaacattgccagatatacaatcgcgtttagagaagctggttccgagtgtgaaggtgtctacttatggacgattgaactggcttaaaagagctaactctttacctgggtcaggtagtgatgatcctacagaagcatcgaaacctattttccagagttctagcaagctgagatcagggttacagactgaagttgtcgacaagattgctgttattgagttatcatttccttctctattcagagctatagtctcgttgagtccagcgggttctgttgatccagatgcagttgctttcttctccccagatgaggtcacttccaacctccttgcattaaaatatactgattctcatgtgaaattgtttaagttctcatgttttagcttcatccctttcttacagggaggcagctacttacatgcgagaggcttctcggtttatcatgtttacaaacacataacggtaataaagatgcgattgatattatatatagtttaacaaatttgattcattggggacttgcattaattagatttttcttgcaggaacatgctgctacagccttgcaatatttcctcggctttggtactggaacagctctctactctcttctggtaaagcattttacaagcacacttcagtctctggataacatgaaccttttttgtctggaagttaattaacacctttctcttcttcttatgcagctatggatatgcagttttgaatccgtatttagcaaaccttgcacgtatgcagactctccgtaattcttctaatacatttgtttcccgtggactaacttttcatttctcttctgatgatgcagtaaatgtggaaggctattagcaatggataaaaagtctgcgttaatcttacctcctttacaccgcgcttaccaagaattgcctcttgcattaaacctggacgtttgtgaagcttaccactccagttgctctcaagatgatacctagtactctagtgattagggaggatcaattaaaagaaaggttagaaataagttctaataacattttgtatggatctttagtatctgctcttctccttgatatacctcttgtttgttgttgatgtcccatgttgaggtttagattaactttctttctttctactctctggtaacatgtgaatgttgtcttctttctagagatttgatctttgttcacgagatgactgaacagagacctttttttttaactcggttcacattactctgttgcagtcagcatcaaagtgagaaaaagacagtgggtgttgatttttgcttccgatccagaaatataaaacatgttaaatgcaagatcaataaattaagttattttgcaagatcaaataagcttacggcttctttcatagagattgtacatgtgaaacctgcaactaacgaagcaaataaaagaaaacactaaataaagataacaccagaggaagtggaagaaggtactacatttacactacaacaagacaaccttcttaaaccaaagccaaagccaaacaaacttctcattacttcttgccatctttaactgcaacgaccacaatgctcactgcacattcctctggaaccacggccattgaccgcctaacactgcaaatagtccaaagatacatagctgacattgcccctacggctccacatactgcagccaagaccagagcaccaagcattctccatatacactcactattttctcggccctcttccatttccgtggaaacgtccggcttcaaaccttcatttggtcctaatggcgctggttgcacccatatcggattcaagatgccatatttcaaagctccatgaatggagaaaatgtggcttggaagagttcccattagcagagcttaaacccaccatgacttcaccacctttccaaagcttctccaagtctaccgagaaagagaagaacggatcaaacatctttatcgaaccacgttttctgaaacgaaccctcattctcttagaacttgcctcataatcaatcatacagctcaaaatccctccatcatccatcatcaagtcacccacaaacgaaaggtttctaattttggcagactcaggtctaccaattaagactcttgcacggtttcctctcttggagatatcaaactcaaaagcaacaactgtctcgttctttgcatactctaatagaaaccctaaagcagaggaactgtaatctttcttaccaaacagactaagatccaaagtacttggaaccattacaaaagccaagacatcaccaatctcattgggcatcgaaaacgagaagtaagtcgagaaaataacggagttcctctctttaccttggaatagattgatgggtttcttgtaaaagactcgtccctcggtccgattcactgagtcagtcagctgaatcgaagaactgtcattgaccagcttcgaatctccaaacagagcaacactcttgtcaaaactctgagattttacgaattcatcaaatgaaaacgtgaaatccacacctgcggttccatgtatctcaaagcataaaaggaccagaaaagatagggttttgaatatcgccatagctatactgagactaaaattggttctctctgatttaatgactacagagacgagctcttctctctctcttactcactcactcactcttctccttctaaaaatggaatttctaggatttgagaatgacttccattttttcaagaagtatttaagtttgttgttttgtgtggaactatgcgaagaaagcagaggaagaagttaaatatcatcaacacatgcagagagattgattcgttctcagtcccactcactttctccctcgtagtggttgctgactaaggttaatgccgtttctgatttgtatctcagttttattacattctatcatgtttagcctcatttacttttagaatatgacatttgtgcctactttctaagaaataaaatgactcaacttgtagatctaagaagattctgcttcatacaaattttatcaaagtcatgtataagaagctcttaactttctcgacggatagataaattgcaaattcatcgtccagacattattgaaaaatattaaagcaaccataagaaaacgaaatctttccaaaaaataaaagacagtagtaacataaaactggattggctaaaaccaagaaaattgaggtccaacatactaaaaacaaagcaacacttataatccacgacaaaaaggtaagatcttaaccgacaaaatctactcttcatcgaacaaaccgaaatcacctccatagtcttcttcgtcggactcttccttctcctctaccttagcagcagctggggcaccaccacctgcatcagcagacaccgcagctactgaagcaacagcaaacttgcttggatcctgcattccagagagttaacataaacaaaatcagtactccaaacttccgaaataaaatgaaaaagatgcacagttttaatgcatactaaccttcaagtattccttgaccttctctgcttgagggaaggtgtactcagtggcaacagcaatagccaaggcattcttgtacgcattgatgaacatatgcggtgcagcagcaagggtagggtacgacacagcaagagccaaggaagtgaccatggagataccagaagcaaacttctccacaagttggtcttcagtaagatcaagaacctctgggctgaagactgagccattgtcatagacagactggacaacaagaccatatgagaacggcctgatgccaagcttggctagaagcgcagcctcagaagacccgaccttgtcaccttgcttgataagctcaactggggtgatgatttcgacggtacccttgttaatcttggttgggatgttaagcacctaaaacaatccaaaacacatacatgttcaattaacttcaaattgtcgtcaaacgaatcaaatcaaacattaaatgtaagtttaaaacaaacctggaagaaagatgtttgggatgggtcgagaccagtgttgccaggttggacaaccacatcaattggagccaccaaacccacacgagcaggggcaccaacctgattcataataagaaaagttccattacaatcgaatcacattgaaaaagtatcaacattttaacccaatcatattgcaaaagcatcaacatattacacaatccaatcacgttgagaaagcaacaacattatacataagtcaatcgcattgagaaagcatcaactttttacacaattgatgagctctacttgggatgactgtaatactcataggaacacaggcaatataaacagaaacgtaagcaagaaatgattacactatacatcagataccatcgaaagcaacacaagtaaattcagaacatgtataaactaatgtaagcatgaaatgattcctctatgcatcagatacttactatccgaagctataatcacacatttgtaaataagatatgaaacaagagcaattaacaaaccttgtacttagcaacctcctcgctcacttccttgaggtcacctttggtaaagatcaaaccaacgtttccctacaaaaaacgaacacagaaccatcgcaaattattttctaaacacaaacacatcgataaaatctcaatcattttggacaagctaagaaagtttacctgaaggagaggaagcagattcaggattgcagtgtttccggtgttctcagagtgaatcctaacggaacgcttcatcatagtgttcttccccataagcacgacggagtctccacgaagaccctttctgatgttctgaagctgagttgatccgacgttatcggccgcaacgaccaagatctgggtgtactcatcgataagctgacatagcttggtatcgtaggcgatcttcttctctgccttagttgctttcaccattttcgctcacaggataagttacgagacacaaactcaatttaactctgtgtatagagagagtttgacgtaaagaaattagggttttggtatcagccgttttatagttcacgatttggcctgaggataagggaacctctagggttttctttgtgaatcttaatctaacggttcgtgcctgtttgcttcattctgatctgacggctcttgtttgttgggccttttcacaaattaggcccatttaaccagtaaaggctctcatctttcaaatgaagatagaacgtcgtcgttgcaatcgtttggcgaatttaacagaacaaacacaccaaaacttccaaaacatgtgaagtgatcatggatttatatttcaaaccaaaaaattcacattctagtgaacaaactatttaagattgaatctcaggaacaagttcattgatgtcaatttccactagtgtctccttcccaaacaaagtaaatcccaccgttgcctgcaaccaaccatacgaaagaatcagagagacatctaaacaaacacatttgtgcaaattgaccagctttgttatcaataacacaaaggagctagaagtagttagttagtgtacctttgcagttttgcggtttagtttctttaggttcccaacaaattcagcaaatgtccctgataaaactctaactgtagaacccgctgcaagtttcttcttcttcgcctttgtttcagtagcaagtgtagcttttctcggggctcgtttcggtttagattctgctacagtctcaataacatctgaattagataatgcgagaagttcctgtgacgctagtatactcgcttcttcttcagctctatctgcctcttcgaactcactatctgctttctcttgcgcttcttttgcttgtttgaaaatagcttccaagtcactgtcatctactggtcttggtttattaatctgtctcttgctacaaaaaaaaaatgcagatacaaattaattcacagaccttaacacacatagggtgagagtgagagtgagaatactactcacgtatttccaacttttgaacctatgaaacctccgactccatcaacgtctcttatggagtcatgtatctctttgttcaatatacatctgatgaaaatgcaaccagggaacactggtttcggtttaacagatatagaaccgttctttagctttctcttcacttgaacagatggtgcataaacctggacaaccaaattcaaaagccacttgtttcaataccaatgtatgaattccccacaaattctaaagatcacacaataacccaaaatcaaatcttttcactttccatcaacaactgtttagagtttgtcagcaattctatcaagataccagtttgatccaatctcattgtcaaaatccaaactttaaaatcacccaacacaacccaaatatccagtaaaattccaattaccgtgaattccatttcagggaattgacgagccagagctcgagctaagatttgagcagtctcatgaccacgaagtctcgaaaccctaaccgcccaccattgcggacccgactcagccaaagtatccaaattcagctcctccgtccacgttgcataccgtttttttggtttcttaatcaacttttcttcaacttcttctcgccagctataccccaatttactctcccgccgctcgttccggagctgccgtctctccttcgccgtaagctggtggttccgctcgatgacacaggcggcgatagagaattgggttttgttgattggcgtataaatcgacgggattaagctgctacgactccactggagaagtcccccttgcagcttcatcattctctgtttttcttttgggaaaattccgttgataaaattctctgtttgttttggataatgttttggaatttgtttaaccgggaacccggtttatcccaaatgccggtatgaaactaaatcagattaaaattaccggattgaagtagtaattaaactgcaaatcacaaaattggagtactttacaaagatatggggcactaactttgtattttaaaattttgaataaatatttttcgggtaatgtctagattacaaatgtttttagcttatgcaaattatcaaaaactgtttttttcttgttctataaaaatgtttttaattagtagaacttttattttggttcaagtgacgttcttttcaaaaatatcaaattaaaacttgtaaaagtgacaaaaataataataaatcatataaattactcacagcacacacaattggtaacaacatatgaatggactacaatacaatttctttaccgactacatcaaaacaaatgtgagacagagagacaaatttttgtcttctttgctctaaataatcttctttttattgttttcgatgaaatatgttttttttatcttgcttaacatttgggaagatctggtggtggcggtggcaaggtggtcgacttggtcggtccgttcttaaccacaaatatcatccctagtccgaatggtaagtgaacatcgatatgacaatgaaaaatccacgcacctgaaacaatgtagccaatatttaggtttcatgcataaacaacaataatagcctttgtaaaactctaaactatataattacatttttagtataactaaggaattggatagagagtttatacctggattattagcagtgaaacggatcacagcccatccaccaacagggacagccaaagtgttacgggattgcgggtcaacgagatttaacttgctccggtcacggctcgggtcataattaccaaacccttgagccaatacatggaaattaaatccatgtagatgcatgggatgactctccgccgctataagcgcatggttctgtaacactacctccaccgtcgtattgaatttcaaaatcttggcgctagttgatttttgagtgaacaaaagtcccgggtttgtttgggttacgttcgggttcgtgtaatcaaacttaaccggaggctggtctggaaaatccgcggtgaaaatccctttaacgtcgtgaaacactgcttccaagatcgatagcttcttgggtaacacgaaagagtgattgctcatagaagctgagaattttggacacgtggtgttatctgcgcatgcctctagcccaagaccgatggttacgagcatctcttcgtccacgtagcgtggaactggaacccagtgaggtccattgactaaggcagtgaggttggagtagaatctgtaagccgttaacgtgtcgaagaaggaaggtagtttcggcatcaacacgggctttgatcgccctgttttcgacgcgccgccatagtgaatgacgcctctggtggtggtgtttgggaaagggacggcgggagcgctggcgtaagggtgagctgccatgtagtaggaggtatcgacggactgatcggcgaagagaagggcgtcgatggtttggcccggtgcgatgacaatgacgtcggtgacgtaaggtgcggtgtagactgcgtcggcggctacaactgtcagtctgtgattggctatcttgaaaaacagttggatgttcatggccgcgtttatgatgcgaagtaagtatctctttcctttcaccacgtttaggctaaacattcctattttcattcattaagaaaataaaggttaatttgcaaactaataagtttggaatgtgaatttaattcttaatatttattcatgcagcgaagttagagaaaaaaaaaaaaaaaaaaaaatgccatgtatgttatacttaagaaaaaaatatcatgagattaggtttctttggactcactgtctttggagcatggatataggtttccgggacggccattgatcgtataagcgtcggaattgtttggaggaactccggtggcgattgctgcctcctctaacgcgactacatcggtgttccaccattcacctgtttactaatatattattacacagtactatataataatttaaaacatagaagacttaatttggtcaatattactactgaagtatatagaagtttcaattttaaatgacaaggaccaacgtccttatccttcaatatcattcaccaactgaaatactaacgtgtcgtctgattaacaatttaaaaaataaaatcagatcaattatgaaatacaatttttttaattatatgtatatactcagaaattgtgtgtattttgtttggtaaaagattttactatattgacgtaccaaataagatgggaacttctttgtgaggtttgggaaacgggtaagagtgaccagatttagggcggatgacgagagcaccgtatacggtggcgcgtaggaaagacgcgtgtgcatgccaccacaaggtgccttcttggccggtgatgttgaatctgtaagcgtatctttggccaggctggattgggcactgcgttatcatactcggtccatctgcccaaaccgttagtttatggaagatcccatgcctgcgtcatgtacacaaaaccctaaagtattcatatttcaacaatttcatcgaacatagcacaaaagtttattcactaacgtaatcataaccctaaaaccaaaaaacaaaaacaagaagaagagccgaagtgattatcctacaagttcacatattttctattcagaacacacaattgaatattattctatgcgaaaaggataacaaattaaatgagagactgtgaaaggctaacgactagacatcttgtaaagtaaaaaaaaacaaaacgtaatcatcgtagtattagttaagcaaattaatataagacgaggttaattcattagttaagcaaacaatataaaaagaggttaattaactaattgagtaccaatgaattgtgatgttgtgaggggaatggtttagaacgtgaataacgagcgagtcaccctccttgacgcgtattgttggtccaggcaggcttccgttaacgaccgttatcacttgccgtttgcacagcctagacaccgttaagttttgtacctagcaaaatccaattatctctcacgtcgttagcgatatacatatcacttggtcagtgcctcaatggtctatactagttattttttggtaagtcaatggtcttactagttcgtaaaataaactcctactgaatttcacacattttttgccaaaacaaaccaaaaagattcacccctttaaccaaataaaatcgaaacatttgctaaaaacatgaattttattttcaaagaaaaatcttgttataagtttgaaaccaataaagaataaccaaaatggcaataaaacaatatatctagttttttatgtagtgctataaataggtctaataaaatacatgccatcataaatcaatattagaggaagaagataggagggaattacgttgaaggtgtgttccacaatggaggcagaagttatggaagagattgcgagaagaattagagcgcaagcaataggaaccctaactccctccatctatagagagaaggatgagagagctagcagagaaagagagaaacgtgttatggagatattgaagcaacgagacttgtggttctacttaataatttatagaatgcagagtggtaagtgataactaacgaaggactaaacatttgatgttaattagggttgtctaagataatggtttgactatacaagtaaatataaatgaatattcaatatgtgctattataattatattttggttgtttggttttctttagaactttaactagctacgtaaacgtaagttctatccaatgttactgccacatcattttgatagtttttcaactttagtattatagttcgttgctctcttattgtttattattatatgatatattgtttaaaatggctatcgaagattaaacttaaaaaaacgataccttttctatacagaaaaaatcccttacaattattaatagctagtgtgtaatttaaacaagaaatgtatagttaattattcattttaatgtaagcttcttaaaacttgtttatgatttttttgttgcacaatttcgaaataattagtcaagaaatattagaatcggagttaatggattgctatatgtacatcgaccagacgaccactgttctctaacataatcaattgtgtctaaatatttgtctacgtgtatttttgtagatattgaaacatttcttgctagcgaagctatgcccataataagtattttcaatctgttagtagagacatcgttgtctaaatttctaacagttgattactccctttattattttagtttatacttttttcgtaaataataacaaaagtcatcaaattttttgcttctcaacacaaacaacctcaattcaatataattcgtattacaagtccaatatagacaactacttatctaatttgatatctaagtaacaaccacaattttagtgacagatttataataaaactgaacatttctgaatttgcaaaatccttcccaaagatcgatgaattcaatatcaaagtaatccaaatcttaatttaaacattgaaaaggtagaaactaaagaaaccaatggtcaaattatttttcattgctactgttctcagaatttaaaagtgaaaagatatccaagaatcataagagatcgtagtatacgtacttaaaagttgatcgaattcgataaaattaaggaatcaacgaatccaaaaatttgctttagacttgatttaaatgcaaaagcaatacatgcgacgcactccagacacaggccaatggattttgtctcagaatatatgacagttgttgtattgtgaaattattctttcaactattgatcaattatttcttataaaaagttccccactatcatattaatttgtttactttaatacatttttatatatatataatgaagaattttgatacgtacgtgcatagaaacggtccatatgttcaagttgaaacttgaaagcatccaagtcaactttacaatatcttcgagaaacgtgttgcatgtattttttgtgtagataactagatatattttctatatacgtttcacataatatatctctgcatgaatatttgtaatattggatgcgacaactgttttctcttgaccggcctagttgatccagttaatcattcttctacgacgtcagtggacatgtaactttatatgtacatacttgattattgtaaagataggttctacatatctggtcaattaaattttaggttaataatgtattttatgtacattgtaaaacgaacgttcttgccataatttgaaaaatcgttttattcaaatctaaagatttgtggtcaggcaaaggtcgttctctattaacaataatctgactgtttactgtatgtgcaagcattggtctgatcatgagctttctttattagctttcggcctttcgccatctcatttcatacgcgaatatggattctcattgacttttcaaattttaaagactacttaaactcaatcaactccaggatcttgcatactttctcatgaaatttcaattttagttgggcaaactgaatttttaaacatggtttgtgagttgacttagaaacccatttaggatgtagaattctttctataattcaaacgtttaaacattaattagattttaatttacccaaaaaagcattagtattttgaaatttggtcaaaataacaaagcttacttccgcatttactattttatcatttgtatttatagattgaaaatacttcaaaatttcttagaatctaatataaatcaaatcctactttaaattttatattaaattagcaccggatttaacctagtatttaaaacccaaaaaaaattaaaaaaaattgtaaccatcttaaaatgtggtttgataaaaaaacaaaataatgaaagatgagacaatattatctcattaacgtgaaacaatattattttgttatttactagtgaagaaaattaacggtgagtgataaatcagaagtctaaaatggatttctaggttacgacaaaaaaaataaaaaaaaatggatttctaggttagctttcttgggtagagaaataagtttacttttcactttcagttttcattatccattgaatgggtcatgaagaggcctgatatggtgaataatgggcttaaataggcccaataaaagtacttagtccaccggtaatgaatttcccgccatagaagaaagtcatcaacttccgaagatcttccgttttaagtgatttacctaaatatcccccaaaaaaggttgaccaaaagttaagacagaggataacgattaagggtaacaaagtaaatggcaattataagggcaaaatagtaattaaaaggaataaaagatcccccgaaacacaagccctacgaatctagtcgaaagagcgagtgtgttcacgcgacctcaacgagactcaacgcttttacagttaaatccggtaggtgagagagagagagagaagggaagcttatggaggcagagatcgtgagacgatcggaggtaacgggattaagaagggaggtggaagaatcgtcaattggtagaggagattgcgatggtgatggcggcgatgtgggagaagatgcggcagggttcgttgggacgagcgggagaggaagaagagatcgagttaaagggccgtggtcgaaggaggaggatgatgtgttgagtgagctcgttaagaggttgggagcgaggaattggagttttatcgctcggagtattcctggtcgttcaggcaagtcttgtcgtcttcgttggtgtaatcagctcaatccaaatcttatacgcaattcatttactggtattttctctcttttgaaagtattcaatttcaattggtgattccatttttcctgtgatcttctcttttttttttgagttttgattcatctgtgttgaattgaggaatctagggttcttatgctgtctttcggagtgtggctgttgagcaaccttgtgtttttttgtgaaatggatgtgaaatgtgaacttggctgagagattgttagtccatttctagttttatatttttagtttgtatcgaaatgttttaaagtttgagacttgcaagtttttttggattttgatctactccttgaatcccaaaagaacaacaaagttaggttggataccatttgactacctctagttgtattgttatagctgatcgaaacacagttttatttagggggacattagtagattattgtgttcttgttctgtaacatatcatcagtaacactaaaccaggcacttctttgtctctctttttgtttttgttttggtttatgaagaggtagaggatcaggctatcatcgcagcacatgccatccacggaaacaaatgggctgttatcgcgaagctcctccccggaagaacagataatgctatcaagaaccactggaactctgctttaagacgtcgattcatagactttgaaaaggccaagaatataggaactggaagcttggtcgtggatgattctggatttgacagaacgacaacagtagcctcatcagaagaaactttatcttcaggcggtggttgccatgtaactactccaattgtatctccagaaggcaaagaagctaccacctccatggaaatgtctgaagaacaatgcgtagagaaaacaaacggagaaggtatttctaggcaagatgataaggatcctccaacgcttttccgcccagtgcctcggctcagttcttttaatgcttgcaatcacatggaaggatcaccctctccacatatacaagaccaaaatcagctccaatcatctaaacaagacgcagcaatgctaagattgcttgaaggagcttacagcgaacggtttgtgcctcaaacatgtggaggtggttgttgcagcaacaatcccgatggcagttttcagcaagaatcattgttgggtccagagtttgtggattacttagactcaccaacgtttccgagttccgaactagctgctatagcaacggaaataggcagcctcgcttggctgagaagcggtttagagagtagcagcgtgagggtgatggaagacgcagttggtcggttaaggcctcaaggctccaggggtcatcgagatcattatcttgtatctgaacaggggacgaacataaccaatgtcctgtccacataaaaactgggagaacaaaaacagagtctctgagattttttatttttctttcttttttgagatttctttacatttatttttatttactcttgatctcggagagcttgagttttacttgtaatcaaagttgtgatgtaattgagtagagatagattttatagttctgaaatcgagtagagaccacagtgtcttcaactttctttgtgacttgtatggcgtctgcattaacatatcataatggttgtttcactttgcaacatgccttgacaacaatctgacgatgatgatcaatgtcataacactactaattagtgtgaatgtgtagtaacaaaaaccacaatccagttaagatcaagggaaaacggcaagaaaatccggttttagcacacaaaaaactgatggttcaccaagattctctcaaaccaagtcaaagaagcaaacatgtatatgtgctatgtgtatattcacatttctacatacttatgcagagaaagaagctgtacaaatctggcttttttgttgtcgtcgtagtaactctaaaaagcttcgagagaagagccatgtctaagagcttctttagcttcagcctccatcccaagctttaaaagacaagctgcttgtaagtagagagcgatcgaaaactctggcgatgcgacctgagtttgcatcgcatcacttagagcctcgcggaacatatcactcattaggtaacatagacaccgtctggctaatactgttggtgataccactggtgctccactcatgaactgtacatacggaaaaaattcatatatctatatctattgtattttctgctggtaaaagatgacggtttcttgatgattcaaaatgatacctctgtgtagaattcgattgcggtttcaaaatctttagcacgaaatgcggcatctccgtgcttcttgtaatccatattctcttgcatttgacccgtccacatttggaatgagaactgcagcaatatttttttcctcatgatgagatattgagatgtgtcaaaagagatatgtttctcaaaaatataatgtacctcatttgtgaccaccacatcatcctctccatacccgagtttctcgagtagttcgtgcataccacttagatccactctccagcatgcttctccgaaaggggtcaagggcaatggctcctttgttgcaggttcagtgtatgatggagtctgtcattattaagtcccatgtacacataagaaagcctgcagaacccgaaaccttggaagatttaatgtagtaatgacttacagggatgttttcttctttgacgttgggccataactcagctcttttctcaagtcttgaaagagctgacataagaaactttatgcttggcctctcgtctggttcagggcgcaaacagcgggaagctagatggataagttctgttctatcctcatcagagaattgaccatccagagctgaatccattagcaccaaatagtttttaccacggaacagatcaagtgcctgaaatgacagataagctaaaaatcaatgaaactgctaaagatacattatgtatatacacattttgctttgtgagaagaaagttacatggtttggtggaatatgtctgccgctcataagatccagtaacaaggttccgaagctaaatgtgacactctccggtatcacagtacctaacaataaaagtaaaagaaaaacatctttgagatttcagctgatgaagttttctctcaagaaaattaaacataaaacacatacctagacgtaaatattcaggaggagcaaatgccaagttggtactatagctctttccctctcggctacacttcatgagaccaaaacaagacagcctaggattcccaacctgttccatcacttttataaataacttatgataacatcaaaccgcgtatgaagtttcttaccttgtcaaacaatattctgtaggtgttaagatcgtgatacaaatctattccccaatcattacagtactccaaggctgttgcagtatgtaacgcaactctcaacctcatttcccacttcattggtcttttctcccctgaaaaaccattttagagtaaaaacaacttagacacaataatgaaactctaaagtaaagtttaaggccaaaagagatcaagaacttgaaatgtttgagtctcacagtgaaagagatgcttagcaagtgtttcattaggcatgtactcagcaacaagcaacctctcgtgaccttctgagcaacaaccgatcaaattggccatatgctcactcctacatctccctacagcttgtgcttcctcctgaataacaaatatgccatattcaagaaattttcctctgcaacagatcaagcatagaaccgaattgaatctttactaagtcaaacagacttgaaatttgcctcctctgcaacaaatcagaatccagaacattgcaacattcaagagaagtatcacggagttagtaaccaataaagtcaaatcagatgaataagcgatcactagtcaaatcttatacaaaaccaaacagagaagaatcaataagtattgatgggtaaaggacacgaacgatgaattctaaagaatcaggccatgaaagccgttgaaaccgcttgacggcgatctttcttccgtcgttgagctggcctttgtagacgatgttaggaaccctctcgttgtgctccgacacgatgttgtcggcggagaatccgtcagttgcgactctcaactgttccaagctgaactccaggaaattaggacaagtacttccttcatcttcttctttattatctgcagccaaaactattaggttagttctctcgatcatcgtcttcttcagaatctaattaacgcataggaggagtggctggcgaattcgttggattttacctagatcgtcgatgacggtgatggtggatgttatcgacggagaagacgatcgacgccaacgtttgaaacaaatgcagcccatcgccggcgacagtagtttctccggtggagaaaaacttttcaagtgcttggttaaaaactcccgcctgcagggagaaaataaattattatttttttcttttttgcctagcgaatattgttggaaagttttacggagaaagtggtaaaatagacccaaaaatatcatttatttatatatcacataattaaatagttgatgaccaatatatactttttttttttttgaaaagatcaacctttatactattataaggataaaatgtcgacatgatctatgtattaatttaaagaaaatattgtttgcttgttccatttaaattactcggtattagattaattttgagcataaacattacaggtttttattttggtaaataatcattagactgttgagtttggtctttactttagcctcaattttaaagtctatattcaatggattttgcttacatacatttcattcacgtttaaaccgaaattaaaatatctcatttaagttgtaaccaaaaaaaaaaaaaacagaaaaattctcattaaaattaatttttgctagttaccgcagcttttcgagactgggtgtgtaatatccatcacactaacctttttttttttaatccatccatacgtttaactacatttaagcaaatatcgctatcaaatcgttttggtatatttcgctcattactggcaaaattcactctacaaaaaaagtctagtttgtaatgggacgctcgtttttaggtgacttatataaaaataaataaatagattaaaaaacaaataaaatcagtataggcctaaataaaagttagcttacggaccatttatgatgaaacttgggccctaatgcaaagcccattaattttatctttggagtctgaagtctctcctctctgtgctttcacataatcacattgcatgattgatcaaatactcgattttccgtgaaatctctttgaatatttcgattccttgttaccatggcgcttcatgggtctggagttttttgtaaagtaagctataattcttctctttgagatttacttccttgattcttcagctctaatctatacttaaatgtttatcatacgtttctcgtaagtaatctcgaaatttagtcgattttcaataagagcccattgatattggatgatttatggttcatatacagagttctaatcttgtctggtgtgagaattcttacggattagtaggtattgtactaagattaaaccctagaagaaattcgatcagaaagtgtttgaatttcaacactgagatgttcaatatccgaatttgttgctactccacttgatgcaaatggttatgtgattctattgttgtgctaatatggccttgaatcgtttgctccctgataggtttcaaacatggtagagatcacttctccgtttggtggttccatgaggctgcttcacttgcctaaatcttatccgattcactgcaacatggtttcagctagcaatacatttgggtcagctcatctcaagctgcaaaacaaagaaccgtgtgagtctacttgattttagttcgagcatcttatctagtagaagatctggttttggataagaccggtttctttagacttggttctgattagtgttctggtaacatttgaagcaggctcccgtttaaggccttgtcgagtcaaacgcgaagaaaataaccaaactgcggatgttgaaagcatttcaatggatgagaacacgttgaagcaagatctcgagactgcggtccaggaagagaattatgtggaggcagctaaaatccgtgataaactaaaagagcttcaagaagacaacaaagcctctgttttatcagccaattctcggttctaccaatctttcagaaacggggatttagctgcgatgcaatcactatggtcaaaatcaggaaacccgtgctgtgtacatccaggggccaaaggcataactggttatgattacgtgatggaaagctgggagcttgtgtggatgaactatgagtttccgttactgattgagctgaaagatgtcgaggttcatgtccgaggagaagtaggttatgtaacgtgtatggagtttgtgaagacgaaagggagtagtagttggggagctcagtttgtgtcgaatgtgtttgaacggatcgatggacaatggtttatatgcattcaccatgcttctcctgttgatatttgatcaaagaatcgaagaaacgatacacattttcaaaacgttttatttttatatgcgtttggaggttgcggtgggatacattggtggtttgcttaagggtgatgaaggactgttttttatttctgaggttggcgattgggaatgaaaacgccacacaaacgagaagaggcataagttgtgacgtttgtactagaagaggcacaaaggatcattttattataaccagagccttgtagatctggcaaatcatgtagacaatgaaaaatgagaagaaaaataaactctttttattagaaccaagacctcatgaatcttggtcactcacaaagtaaaacataggaaaaacacattgaaacagaaatagcttaaagctcatccttcttgagcgcggatggacgaacaccttgactgaggaaatccttgtaatacttgccggattctttctcgtaacgtgtgaggttatttttgaaatcaacgtagtagagtccaaatctgtttttgtaaccatcttgccactcgaagttatccaacaatgaccatacaaagtatcctgtaacattcactttgtcgatgctgcagatattacacaaatgtttttattagattcttcactacaattgttagtatatcagatgaaaaggaaataggacataccaaacagcttcttgcatactcaaaagatgcctctgaagataatatttcctgttatgatcagcggtaccaacagcaacagaatctgaggcccctagttcttctccatatcctaaagaagaacatcaacatcaatatatttagttctaagataaaatcaaccaaataatagttgacagtaacaatagaatctctagttaccgttttccatgatcataatttccggatttgcgtatttgtccttaatgtacttcaacagacttctaaaacctctcgagtaaacgttcaatgcagcggtcaaaggctgaaaataaaacagaggtgagaatgttgcatcatagacaaatgtagcacataaaaatttcagattgctattaaatttataccttgctaccaatggcgtaattttgcgcattcttagctgaaaagaagagataggtttcgattagtaccaaaaacaaacattttccctttgatttgttgccattggttttcttggttcggtttcaagtaagggcaaaacaaacttacactcccatgtaataagagaatcttgcatccatcttggttttgaaggatcaggtttctccaaatggtttgaaaacactgaagtatagtagttgagcccaacgaaatcggtagaagctttcagttttgctttctgctcagttgtaaatttaggcaatctatgtccaacaatgtctttcatgatctgtggataatctccaaatgtagttgtgtctagatgcctacaaaaaccatcaaaatatcgtcatataaaatttcaagatatttagtatagtactaattaattagggatgttataacttatacttaccatcccaaaataaagtcaagtgcacggtcgatggacgcaccgtcttgtgaatcagcaaggtcatgtgcttcgaaccaagcaggactatgtgcaattccgatcttcccacctttacactatggtcataatttaacataatacaaaacaaactattttcagatccgaaagatgatagataactaattatgatttatatatgtgatgtaccttttcgcatttccggtaagcttcaactgcttctgcgtgagagataaggagattgtgagtgacaaggtaagcctcgtatcctgatcgtccgtcttggcatttagcattgacgtaagaagagcaacgaccaggtgcctttttgcctacgtcatagccagcgtgcgagaaaacccatggctcattgaaagtgatccaatgtttcacttttccaccgtattcttggaaaacaaaatctgcatactctcggaaatccttcctacaatattgcaaaaaattgttgaatataccatttatattcgcatatcaaagaaaacaaaaagtgattggggttcgttttccaacagaaaaacttacacaatcctttcgcttaaaaagccgccatattcatcttctaaatcttgtggagtgtcccagtgaaaaacagtaacgaatggagttatacctaattacagaaaaaaataaaaaattagagaagtttaatacgtaagagattataaatgttttttttttcgtttttaagtgattaatatatgtaaccattttttatgagctcgtcgatgaggtcgtggtagaattgcacaccagcttgactcactcctttctcctttctcccatctgataaaattattgttttgtttcattaatatagcaatcatcgtaaatacaccaaattcgattgacactaagtagtgattaataaataactagatttatttgtatatcgatcaatccttatatatatttactcacgaggaaatattcttggccatgcgatagacattctaaaggcgtctgtgtttagattcttcattagttggatatcttcctgcaaacatttttcagatgagaatttttttatcaacatctagtctaaatgaataatcaataaactattaagatatgcatataatatgataaataatttcttcaatctttattaatatataccttataacgatggaagaaatcaacggccacatcgccgttatcgttattgcacctctctgaaatataaaattaagaaaaaatataagattaggtgaaccaaaacattctaactatatacagtatgtaaaagataatgtagaaacactcacctggatatcttctacagtagatgtcccataaggctggtccacgacaagtttcattaatcgcaccttcgacctaatgccatagcaaaatagcttacgtgtttagggaaatggtttagaattataggctaaatttttctacacgatattgttaaattgctgttaagtaactatcatgatacaaatttcattcgataatttagcaaagaaaagaaaaaagtatcagtacaatactcttactttgctaacattgttttgttttgaactatagttttgatgttctatatattttaatgtacaaaacatcgtcttacaaatatagaattctatactctccaatatatatagttttaagatatatatggattcaactatatatactgtcttgaacaatcttgcacggtaacatattatttgtgtgaaatagttcatagatttttgtgtatatatatgtcaagaggtgctcacagaggaacttatattgtacctggtatgccgcagtagccgtgccaaataaaaaaccttcagggaaacttgcccggcttagtttgttcgacggcgggcaaacaggtccatctgcatttgctggagaggcgacgatggtcaggagcaaaagcagcccaatgagaggaagcttttgcaaaaccatttttgtttgtaattctgattttattcaagaaaaaatgtttaggatggttcttttacatatcgaagacgttctttatatagtgatcttcgaatcaattattgatctctctttatgtttttataataatatacccagccaggccatattaatcaatttttaagttttcattttgtatatatcaagatatcgtgttttctgtcatatcctaattattactacgtacatggatattgacgttataggttgtatattgtttctttacctttttatttgactaaactatatgcacagttattatatttaaataggatgatttatttgcatggtctagactctagatccgtcgatcgttgtatttcttttgatttttttaacatttagaacatataatattccgcgtgtccaacgagtgtatattaaaatgtgaaatttatatgattattttatttagtaatatccagtaataccatataataataaggccctaataataactcatatcgaatatcgttgcccgattttctacaactcctataataaacagtggattgttttttttttctctttttttttctgaaggtaaagaccacggtccgtgtctgtatttgttttcaaattttaaacatactccgataatgaaagaatggagtataatactatctcgtgtttcacgagatacaactttatatgcatgatatcggatcatccaatgaatcatattatatcaataatttccccaaaaaagtaatcgttataactgaaaagaaaaaatgtaatcaacatgttatcagctatggtggtcaacagttggaaccatggttgtatcatcttagagcatatttcccaattaagacatgtctatcagataagctgttgcttacaaatgtattaatgctatctaacaagtaacaagggtgactgggtgagcgacaccactcctctttatgtggatactggatacgcctttaatccatatcacatgtttcagctgcagtctagaattttcagataatataaagaaaaagaaaaaagtcaaaacaatattaaactgtagtactgaataaatctttttgatttttttttttttttgtcgactaaaagaatgatgttatctttttttttacttgtgaattttgttcttctttttcttttgccttttattacaataaccacccgaagaataaatgaatcctaacaatgaaacttttattttatattatttgacaatttcgactgttggggaccaaatctaagccgagcgcatgcgtaactataaactattgacgttgaacaaataaatagtgttaaactatatgtttaaaattgttgatctatcatagtttatcgagcatatggaactactatatatatgttagtcatggtagtttaatatagacatcctatacataaaagaacttagaatcctagtcaagttgttggtacacttcgttgcagtggcgagtccaaaaacaattttcattggggcaggatttacttacacccacaccacagcatgtacatgcttggtataaaagaatggtttttaaagatccactaggaaaaaaagactgattctagccaattattccgattgtctctcacaattacttatatagacaaacaaattctgatgtggaactcgcacccacaccaaaacgtgtacatccgctcttgcttggttgcatgtaataatataaattttatcaatacaatttcaatgtatagttatgttttgctaatgaatccaatataatttttaaggactatatctatcgccataatgaaatctgttagatttgaaatagataaatagtagtttacgggtcagagaaagaaaggctgtttgtgtagttttacaccatgccaaattgaaaatttaacactggtccaatagaaagaaaaaaaaaactaaccacgttgtaacttccataaaatctcataagtttcgtgttccttaaggtataaagtaggagttagaatcgctacgaattattttctcgtttttgagtcaaaatatataattccgattctttttttctcgttatcttctcagttcatttcgacggtcgtataaatcgtttactcggtaatttattggtggacggtgggctcttccatttccttattttcttaaaacatttttattatattaaaatataccatgcgatccacgttagtaattttattatataaaaaattaggtcgcgctatttgaaagcgaaaatgatagcatgaccatctgagggatccatcaccgtgcctacaactagatgatttcataacacaaatgtatgtcgccatgctaatttaccaattaattccataagcttcatttttgtctcgggactcatttcttcgtattaaaaacttatctaattaacttcacgaatcatgtataacttcttgttctccaatccaattattgttgtaaacaaccatcaatagaactcgtagctcaacatcgctaaacgctaacaaaaccaacaaaaagtttcgatgtatatatgttcaattaaaataacatatttttatccattttaattctataactagtgttttctaaaaaaaaaaatatatatatatatatatatatatatattccattaaatttttgaacgacatttaacttggaacaaattttgttttaaaaccctttaacaaaaaaaaaccccaaatttattttataaaacgacgttaagattgtaatcgatatgaaaaaaatatattataatacgaaaaatatgtaattggtttgtgctgatattgttgtgttactatttagattcaaatgtgagataataatacatgttggtgaaatgaaaaaaagactgtgtaagcgtttctttatttctttcgtcagattgtagatccaatcttttgactttgagtattacaagaagatattggaaattgtagataagatgcatggtgttcctaattgtgttcaatcaatggctccttcgatcattaaatgtccactgcatatgtacatatacatattttatggtttgaattaatatttggaacaaaaataaattagataggaaaaaactttttcagtggcactgagaatggcaagaaggcataaatctattctttgatattgattagtaacagtataacagagccaataattgattttagtcacagatccgatacgcctgtgatgattttatttatttatttattaaataacattaatttccctttattcatcaaccactcgtcatttcattacaatttcaataatccaattaacaaatctagtgttgaataagcttgttttgttttcgtcaccacttagacagcttgatttagacttaatcagctaattggataattaatcctattgcattataattcttttttacttttctgacgaccctacatggacctttttaagaccaatgaagcaaggtcgtgacactggttagtggttaattatgatgtaaattagtttagctatgtgtgtgggttacaaaggaaatctgaataagggacatttttttcctttttttttacggtttagtttagacactacgtttgtcaaaaaaaatttattttttttctctgaaagatctgtcaatactcaattattgaggcattctaattcaatgaacacggaaagttgaaccaattaactgccaacttatttcttatcttaaaatattatgtagtcactaatggcaccattatacgtactacattaaaaggatatatttgtttttcctaaattgcaaacttttaatatgttcaattttattttttgtcggcttaatatgatcaaattttcagcatgtaccattaatttttatttataaatcctgatatctacttaaattatctaagtgttttaaaatttaaataaaacatatactaacaagtcacaatctactacatatcttcataaaattccaaatatatatttttctcatttcatttacccctttttcttaaattatttactgtcagtttcgtttgtatttatttctcgtttagttatttttttttcttatttaacttaaattatagatttaccatttgaaatagatatgatatttgaactttataattgctttgtcttactatataatacagttccgtaatcatgagttaaaactgtattttataatataaatatattctacgtatagttcgtaaagtcactagtataattttggtagataatccaaaatgtatctatgtaaatctgggagtgatcaagtgtaaagtgtattttccacagaattgagcaataattaatattttaattaggcgttgagtcaaacacattatcatatcaggatgggataaatccataaagtcagaacggatatataaatcgaaagtaataatatctgtatgaaaattaaaactcgccgaaaaaataataattaaaactcacacgtactaatgtctattgcctaatggttataacttcagatcttactctgctaaaatttcttttattaaacatgttttctcctttatttttgtttttgtcagtaactctctgagtccaactccgatttatgtgtttttggaaagtgttatttatagaataaccatatagaagaaaacatttaccaaagaagacgaaaatataaaaataaagatgacatagatatcaatttttttctgttaccaaacaatgaattacgatggtcttattacgtttaattagatgtaacacttccaaacatggccttcaaaacagccacgagcttctccttagggggcaagacttccttaataaagttatttcccacgaaatcttccgaccaacgttgaagttttggaaactcctccgcggtcatgatcgtgacgcctgaagcttcttggaaaatccctaaccaatatcctatgaaatcagctgctatatcgacaaatccaattgtctctcctccgaaaaaaagtttatctccaagctccttttctaaacatttcaaaccctcataagcctctttcacttctttttctctttcactctccggtccccaacaagctttcttcactgctaacattacctgaaacccagagaccaatacaatgctctttaagacatgtagcttgattcttgatattacgtgaatactttgatatccgattcaagtatcactatataaatcttaaaacaaatatatcttaagaataagatcaaaataaatttaccttttcatccacatacttagcccaaaaccgggccatggcacgttcataaggatcttgaggcaagatcgtgtgagttgtcttccacgtatcttcgatgtattcgacaatcaccaatgattcggctatcgatctaccattgtggatgaggacagggaccttcttgtgtatagggttgtacttgagaagcatagggctcctgtttccataaacatcttcttcaatgtactcataaggtatgcccttaagttttaggaccatctctactcttttgctaaaaggacttccccataagcccagaagctttacgtgctcttcttggttcatctatatatcctgtttaaagaaaatataccggtttggctttccctttgtgtgtgtgtgttttattgagcaatgatggttagcagttatttataaccactttggatttggttaaatggatgtatgaagaatagttggtcacgagaataatcagattaatgtttcgtaaaatttgaaattaacaaataggatgaatattaggtggtcaactttttgactttaaatgagggtagtggttgaaggcctgttcttttctcaatcgctcaattagcgacagcgaccagaaaaatagaggtttaaatgctttataattaaaagaataggttcataatacagctgacagagaaaaccagcgacaactttagatttataaacgatggagatgaagtcgctgaaaaaatcagcgttcaccggcgacatctctttttcgaatttaatgtcgttgccttttttttatctgtcgctgctttaactttagcgacactaattagataaatccagtgcttttttcagtcgctaacttgagtcgcgacgattgggaaaagaacaggccctgagtagcgtgctgtgtttttattactacatcaaaattgtttaaaattccacataaattagggtggtaagatacggtttttttttactccctgttttttttttgcataatcgtttcgtaattgaagaaattttttttgagtattatattatactccgtattaagggaaaatttaatgataccgacagcttttgacggattcaatactttcatgctaagttttgttttcgaatcttttatatttgtgattagttttttttgtgaggggctacgtaagcagttacgttcgacgaaaaaaaaaaaaaaaaaaacagcaattacgttcacaagtactgtggaagaaacgggtctctctatccggaattttcaaaataggcctatcttcgctaggcccaatagtaatgaatattgaatacatctttgactttttttggaaatccctgggaaaggctcaaaactaaactaggataaggaatttgattgggctgatttgaaacccaattgaaccgaaacctattgggccccttttttagtgaggtaacattttttttttttttttttttatgttttccaagttatataagctttgattttatgttatcaaaacatatactgtagttcacttaattcgataaaattgattcatttgatgaatataaatgttaaattcgaatgctgtaaaaaaaaaaaaaaactaatattttaatgtaagatataatgtcaaatttcttaacttgtaggttctataaattggcttcttgttgaacaaagaaatacaaaatgtaatcttccaaactatttttctgctctgtccacattatttagatgacattgtgggtttgctttaactaaaatcatcagttatatcgatccgaccctgggttcgagctgaatttgttttaagaaaagttttattgtatatcacctggcttcttctatatagtatgactagcactaaaatttaatgtgacttttattattttgtaagataaatttaaaacttggaaaataaacagagaatgagaatgaagctcaaattatataactaaatacgaagaagacaaaaaataaaatagaatcattttatatcacaaaaaccaaaatacaaagaaaatatttacaaagattaacgaaaagtcaaaattaaactaacactttaggggtctcagtctccttttcatcataattgggtttgtgtttcctcgtagcccttatatagcaaaacactaccacaagaaacgttgtagctaagcctccgagaataactccacctccggcaaccgatctttccaccgtggaatggtggtggcctcgccgtacagtctcttccaaatgtgaaacctccggtgcttctgcctcctctcctggccattcgtgcctgccgagtttccttgttgccggaggctcagcttccgatgaggctgccgccatggagaagacgtacgttagcaagaagcatagaactatatgtttcgcatccatttttttttttttttgagatgattgtgttaatggagttatttataggtcaatatttttctcttaggatatatattttttttcctcttgcaacaattttctttttgtttttatcggaagactagagagatcgtgtggtgtcatatggaaatttccgagtgttacgtttccgggaaaatcgggtagatataagtttagaatttagaccggaatatgattttagtaaagtttttttgataaagaaattaatttccgctgtgttcttcaatggagctgtcgggttggccggaggaatcatacgggtgtacacgtgaactagaattaaaaatattattaaatttaacaattcgttccaaaaagtctacacattgtattgatatgtgtattatacacgtactcaatcatcaaaggaatccagaaattttgctaaagcaattttagaacatcatctttttattatttctcaaattagtatttaggaatattttaaacttattcataacttatgttttctattttagaatttaaagatacaaaccctttgaaaatttaaaatttacactatgaattatataaactaacatagaaatcggattaatattattagatagttcttatagaagaatacaatcaacatgatttttaaaatgacttgaatgtacaaccaattgaaccaatagatctatctatatctcagtttccaaatggcgacacatgtgttatcgcttttcgcctaaaactattttgctaaattaaacacttatattttagaagctgaaacacagaaatttagggatttttgaggagtctaaatgactaaattgaaactgatgattttttaagttggaaaccagagtagatccctagctactattagattaaacatagtaaagtttcttatataagtgaatcaaagacagcgagatctatgatgtgtttatatgtaaagtttgtctgaaatgtgttttgattaaagtaggaagtgaagctactttgtctcgaggcaaggaccaaggtggtcgggaagtagcttcctctttgttttgtgttttattatagttttcgagattatggtgttaaaaaagagatagaaaattggtatatatgtgtttgatcaaaaaagaaaaatggtatatatgtgtgtgtatggatcggatgtaaaaatatatgtagttgggaaatattcgatttatagttagaactgataagtttaaattcatcaataattgagatttagaaacttcgctaattacccatgccaattctgtcaagtcatgggttaattagacaatttaagttttgaataaagagaaaatgtttgcttatataatggtacttttagttgtttatgtgaagaatatgtccacatattatatttttcatgtatgtgtatggtttgcgttaatggatactacacctcgtttgtctaggtttaaactcccctatatgaaaagtggagtcaaatttctacaagaccgagtccttttagagagtataggcaacatatagtctttgccaaaagacatatttgagcacaaattcggattagacacgtgtggtaggttaatttggtttgatttaaaagtatcgcacaaatgtaaagctctcgccttttgaagagccgatgagagcaaaacaagcaaatcataacctgtattttcctttatttcgacaaagacaaacctctttcctcttgtcgttatagagaattaaagaaatagatcattagttacagaatttattctcataaccctttctcatgattagtctactatttttctttgatgccgacaggtaactttattttatttacacaaaaaaaaaaaactcacgactagacagagtttatagataaatctgaaaaatcttaacaaaaatatatatccaaacattagtttacatataaaagtaaaacaaaatttcaatagtaactctaaaaatagtcttcttgtgaatacttttatccatttcctctttttctaaccaatcaaaattttgttacctaacaaaaaaaataacggaaattttctattgggtttcaagtaaataagagaagctgaataaattttacaaaaggaaaacaaatgtttttccctatatatgtactaacgaactaaataaatcaataattgcgaggagaataaataatgatccgagggaagatctcattggcatacaaggcacaataagaataagcaaggaaaggcagtcaaaagaagtcgaatattatttgtctgttagaaagcataatcctaagttcccatcattggctcatagagaacatataatctttctccaatgatttgatgtctcacactcactagtcactacttttacttttcacattttatatgccatttgcttgcgcaaaaatacactgcgaatgaagtggttgtaatttgtggtttcattagtttgatcgatcgacataaaacgatttgtaacaatagatccaaaacagttgcaagtcgatcgataactagtatgggttcaagtccatgaaattcaatcacagctttgcggaattcaattgcttagatttcttgaagagttttgttaggaatttcatgtctcaacaagaagaaacttaaaataacacataacgaatgttagctaacataaacatattcacgttgtaaatgcattacgttttaatcttagaaattcatgaatgtctatattcttaaagaataccataaatttatcagtacagattcgacatcccatcaatcattcgcatagttatagctctaaagatctatccagtacaatcatatcaaacaaagaaggctaagacatacgaatggacatgatagaacatgaacaacaaaattttgttttccactagagcatatgttctcatagcattaaacctttcgaataagcatcttctcaatactatttagcctcacgagggttataaattctcacatttccctactgacttctcaccaaacaaaaaaaactagaagaagaacgatacataaactatgctcacgcaagaacttgcgcgcattatggggggtgacgatgatgagtattggtgaggaccgggtaatctgcatcctgaggtttaaagcttaatttacgcaggaaatttgtatacgcatatacgtatgtgtattagtataccttttagtcctcgggatgcggattacctcgttcttacttacaatacacgtactcggagacacgattactcatcatctagaggttggttttgatcctccatttcttctaagtttaaacatcattaataagatatttaagactgaatatcaccacacatatatagagtcagtctcatagatgatgaattggtaatattatatgacactactgacttaaaattattatcatataatattactaattatattaaagttttttttcgtcaacatacacactagttaaaaatttgaatttagaaaagttcaattgatgactcatttcaggaatgctcgaaacaatggcaacgacgcttgtgtatgtttgaattagtgatatatccgttttattcatacttaattaaactggtaactctaactaatacgctgtatatttacctttttgtctagtgaataaaaaaaaatcacgacgacctagttttatgtcttttatctattgctcaaaggtcgctcattgcctttgactaatatgtttagacttgtgatttctgctattcaattaaattaattaactgcgtttattaaatttcagttaggtgactcataaaaagaaaacatagattaattaagttatatatatagtataatgatgtacatacaaattcaaaagtactatggatcttgctttgaaaacgagtcagtcaattgattttgtagatttattcagttttcatagatgtccaacactggaataattgttgataatttcaggaaaagcatatgttaaaataatgctaataacaaaaacaaagctagtgatgtgtatcaaactaccaattgtgcagagacaaaaacaaaacgccaaaatgctgtgttgtacccttttttgtcaactgcgtatctgtttttttttcagtataaaaaacttaagaaatctctaaacctaattattgagagtaaaaaaaaaaacaaataaataatcaaattttactgaaataaattgtaatgatcaaatatatttaagcattgaattttttttgtgtagtcctaaagttgaatcttgaaaggctgctgatcttaatttgtctttttttttttgttcgtgcaaagctgctgatctttgttattgtctcatatgtaagtggttagcataaaataatattaatttcttgaatatgcgttgtatattttggtgaccatatacaactacttacatcgatcttgtaagaattgcacatagtaaagtaaatatatcacaaatcatatgtccgataacttcatctatttatatatttaatgatgaaaattgtagtttgataaaaaaaataaaaaaaataatgatgaaaattgtagaaacgaaagtattttaatcgtaaaatggaaaaaattgttagatttttattgatcattttttggtagttgctatactgtttataggttttatatttagttgtggaaataatttataactataacagaatagattattcatgtaatgacatagaaacagttgttttcacttttcttgttttgtcttggtgccgtggtagattttgataataaaattagagtgttgattaatttatatttgccaaaacaaaataaacaaataaataatttcaagttgaccaattcatatttcttgatggaaaacactgatctcttctcttctattctttctttctcttatgaggaattttcacaatctttgatcatcttctcctttattctacggaagaaatctatatattctatatatggaaaacatcaaaaaccctaaaaacgcagatgattgttccgatagcatatcaaaaaacagtcatcaaggcgttgatgattccctgaaccagtcaagatcttacgtatgcagtttctgcataaggggcttctcgaatgctcaagcactaggagggcatatgaacatccacagaagagacagggctaaactcagacaaaagcttatggaagataataaggatgatgtcgtcgccgagagtgatgcatccgaagttgtgtctctagaccttaatgaacaacaacaacaacaaggagaagctttgacatgtgatgatcacgatcaatatgttgataacgatataagtcctaaacagaaattagagttttgggttcaagaaagcaagcttgatactaatgatcatggaaaggtcacggaggctagcatagatggttcgagttcgagtcatcatcgtgatattgaagtattggatctcgagcttcggttaggccaaagcgtcgtaaagaagaagacaacatagtctctgaacgatgaatcatatattgattgcattgtatcaatgggaaaatccctatgaaacaccaaactctctaatccgtctattacaaatggattcgtggctcaaattgtattgtaaggtatgcatttgtatcttattgctaccattatcgttgttgtaccttgtattgatatttgtttccttgcttgggttaatttcaccaacaacttttgtaaatgacatacacgtccaaacaaacaaacatatatatagaaattatatatatttggtgtttgctttatagttgtttagggaaaatgaataactaataagcttaacttagctcaacattattgatctggtcatggtagagactattcaaacttgttcactgagaaatattgttacagttgagttatatattggtagtcgtcctcagattttcgagtaagcatttgccaattatgactcttatattcgagattagcactcaacatttaattatatgttagcaaatagtataacattagctagcaaacttataaacgataaatttgaccaaaacaacataaaccaaggtcactttatctactttttgttctctgaattctgaaaacgaatttgaatatcgtattctaacagtgaatattgcatttatactaaaatttacgatcatagccataaataagtagttatgtatagtcaaactatatgtagttatacagtactttaagacgtttgaaccgctaagattcccataatctgcatgataatataatgtatgtaaactgatacatgcacaattgcacatgataaatataactaaattgatacatgccgatttgcgcatgataattataattatatgctctataacatgttaggatttaaaatgaaaagagcaaatggttcaaggctgcaacttggtgacgccaccaatgatgaccttttacgtcttaaccacgttccggtttggttcgagaacttgtttgagatccgctttggatctaaattcagattggttttatttgagatgccgtggaaaattggataatttccaccagagatatatgatttaattaattggattttggattcgattatagtaaaccgataatagtgaggcagtaacgaacaaaacaacttcaaccggatcattgggttggtttagtttactaattgaaccggtttgataatgtttaaaaaataaacaagtgacaacgaagaccagcaggtccagcacacgatcctaaatcctgtgagcatcgtctccatcgctggtcttccattattgacgaatctctttgcctttttttcttccttcttaaacaaacccaattcgatttcaacgaacgcctcttctctctcactctctttcgatttgttctttgccggagctcgtagtgtaagcgtgatccgcggcggagagatggctcctaatgatcctaaaaaagccgttggtggcggcggaagtggtttcttcgcctctcttgcttcgtcgatctccaatttgggatctgctatgaccaaatcagttaatgggtgaggtttttgagatcccttttcttaaacccggatctgccactcagctcgattcgtcattttgatttgaaaaatggaaacttttttgcttttggtgtctcctatgtttagatcttcttctaacgtagattgttatttctcccaagtctgcttctttggaattgatattagactagagcttaactcacatttcacatagatggagaattttgatgcacttctaaaatgggctttgcttaaagttaagctcttttgaacgattcgttgtgttttgatttgcttctcagtttggttccctatgagggacttgaagttatcaatcctgaaggaagtacagatgatgctgaggaggaagcaagcagaggaagatggaagcaagaggtatatatacttcttcctttactattgttgttgttgacataactgttgatctaatcatctgagaaatatacacaattcttaggatcgagatggctattggaagatgatgcagaagtacataggatctgatgttacatcaatggtgacccttcctgtgattatttttgaaccaatgacaatgcttcagaaaatggcggaggtttgtgctcatgatcacatctgatgatttgttcctgtctgatatagttttgtaatccgatgatgccaatgatatgtgctctgtttctggtagttgatggaatactcgcatctgctagacatggcagacaaaaccgaggacccttatttgcgcatggtgtatgcatgtaagaacattttccctcctttgatttcttctatgatcagtatctgtcctgcgtggctaacttgtaagaattgatttttaacagcatcgtgggctatatccgtgtattatgctttccaacgtacctggaaaccattcaatccaatccttggtgagacttatgagatggctaattacaatggtgttaacttcatatctgaacaggtcagggccatttctttaaaactcaaataaatgtcaacgtgctatacctggcaacatctcacagatggttgataccaatgggtttgttctcaggtcagccatcacccaccaatgagtgctggtcatgctgaaaatgagcattttacgtatgattgtacttcaaaactgaaaacaaaatttttgggcaattccattgacgtttacccagtaggaaggtacttctgcaaaaccacagcacgggctgaaactctatatcctgaatttcagattcttcatttgtacattatcctgaaccttaaatgccatgaatctatgattgtaggacacgggtgacacttaaaagagatggagttgttcttgacttggtacctcctctgaccaaagttcacaacctaatctttggacgaacttgggtcgattcgcctggggaaatgatcatgacaaatcagaccaccggtgacaaagtcgtgctttactttcaaccatgtggctggttcgggtaagtttttttcactgcaacctcatttcctgttatattttttccattcaaagctgaagaaatgtgcatttatggtctctacagatctggtcgatatgaagtggatggatatgtctataacgcctctgaggagcctaagatactcatgactggcaaatggaacgagtccatgagttatcagccgtgtgatggtgaaggtgaacctctcccaggcaccgaactgaaagaggtttgccaaatcttcctctgtcattgactcaattctctttttgtaaaaatctcagtttgatgaaacattttaatgctgccttttgttcataggtatggaaactcgctgatgtgccaaaggatgacaaatatcaatacactcactttgctcacaagattaatagcttcgacactgccccgaaaaagctgttgccctctgattcacggttacgacctgatagatacgcacttgagatgggcgacatgtccaaatcaggctatgagaagagcaggtatggtagcaaaaacttgtccttaggatctgaaattgaagtaaaagctaataaattgggatttttctaattcttctcctcatctttgatatgaagcatggaagagagacagagagctgaaaagagaacccgcgaagagaaaggccaagcctttactccaaaatggttcgatgtaacggaagaagtcactgctacaccatggggtgatctggaagtttaccaattcaatggaaagtactcggaacatcgtgcagctgcggataactctgaagataacaccgaccctaagtcgatccaattcaacccatggcaattccaagatctgtctacttaaatgtatcgctccaaaagacagaaaagatcaaatctttttggaaacaaatgtattcttattctctcgtagttacaaaaaactttgttctacatctgctagctttcccattgctttctctagtattagtgtacaacttctactgttttgtcttaaattcattcaaatctttctttgatcttcgtcgtcatagttatcttcttcttcttcgtctccttctcggagcttgatcccactctcaccaaaccatcttggaggatcgaacccagatccaccaagaggattgcagcgacagagacgccaagttgtgagaacagtgcctttaagaactccatatttcttgtaagcttccattgagtattcactgcaagtcggaacgtaacggcagcttctaggtaacaccggcgatatctctcctgtttttcaccggaaaacgctagttaaccaccggaaaaacactcgtacaaaccctaaaatcagaatcagatgatgaattactcttgtagaatctcagcattgctaaagctgctttgactcccacactctccagctcttccccatctgaactcaacccaatcaattatttgttacaaaagatacaaactttattaaccccgatttatggataagagaaagagagaccttgaggggatgcagggtctggtttcgatggcgtcgatttcgcagataagcaacggagctgatttttggtgttccgaggaagatgatcaaacctcaggcaggattcgttgaattgtcggtgaggtttaagaggattacgatttttagagattgtgagggttacataaggacgatggatggagatgacgaccgccatttaatgttaagctcaaaaccaagtttccaatctcgctaaaacagaaaactctgtttctctgtatggaaaaacgacccattaccgactatttatatttttgtattaaaaaacaacactgtgctatgcatatagtgtcggaatccagtttttgtggtgaagaattgtatatgacacgttagagaaatttgtacgaacgaaaaatgcatctgaatacggagcacatccacaaagagtcatacttgatctttcactatgaccagattctgaacagaggaattcttcagttgattggtgttgatgttggaaaagggcttgatcttcctctctaattctgatcttcttcttcgtcttccaatctggtcatacaaatgtcacaaactcttttggctttttttctatacaaagtgcttacagctataattctgcatagaaacaaatacatattgacaactgtgtctgaatctgataacaaaatatgaaagccttaaattatcgtacaatgatgtcttttcgcctgttaagtggtatgtataataagcataatcagcttctgagttctgtatccacaacctaacttcctttttgaggaatccaaagaaaaacaaggaaaatacctaaccgataccatatttttcacaaatggatgctcttaatccagttacaaggatgcgagagggagaaccttgccaagcagagtctagtactgattacgggccagtcttggttttaagctgaggcgcctaaaatgcttgaaaaaggacgagccagtgtgctgtgaagttcaaaatctgctgccttttcggtggaactccccagaaaaaggtatacatgatttgggtcttggctaatgttttgtttcagatgaatcagggattgaatcaaaagctgtacgaaaacgcacaccagaaccgatatgccttgatgtagggcagagccaagaaagtatgttcggacccaaaatctgtagaagaaacagttaaaacttgacatagaataaacctttgactgatactgaccatctaagaaaaggataagaattattaccaaggttaggttttcatatgcgccgatgtcatatggatgcttatagacttgcccacctttctctgctaaccacatagctctcactccttcatggtactgttcaatttccgaaaaattgattagcagaggaacaatatctaactagggctaaggagatccataatctagcaattgaagaaatgaaaagacagggaagaaagaaagacaaagagaaaagaaaaagaacaacctcaatagtcgtcttgttttgtaaaatgaggtagatgtgccaccccagaagaacacctaacgcgatgcttaatgggataagaagaaaagctgaaattacctgaaaagaaaaaccataaaccattagcacaataatagttgttggtagtttgcaaaacaaaacatcaatcttaatcattacatatatagttcttaaatagcttcccatctcttcctcttcatcttgaggttcaacagtaaggcttcccacaagtaaaacctagaaattcaaggaatatatataaagctcatttactaagtggcacagagagatatgcattgaactaacggaagttaagaaatgtaccagagaatatacacatgcagtcaccgcatagacaacaaagacaaagaagaccttgtagttagtgtgtcctacgcagttgttgatccagatacaatggtggtccttcaaatcaaagacgactggttaaacataatatcacatggatttgggagatttcatgtttagtttggcaggaaacatatgtgttcagtagagcataccattctaagcacacatcttttgcaaactcgacaatggtgagctcgcggaggtttgaaatgtgaacacttttggcagtacctcaaatctcctccctgcaaataacataaccaaagtaacaagtgaatcccaaagccacaaaacatgaggtcacatatggaatatcaaaacctcaactattaaggtcctaattagaagttagctggaaaaaaatctgatcacttgaaagttaaattgtctcatacatgccatcaaaacaacgttagagaaacaaacaaaactacaagaatcaccactctaactaatccatgtagccaaaagatgaagtttttactgcaatccccaagagtcaacctttaatgtccctcactaataattagaagaagctaggaacaaatttgaaaagttgaaatttctctagcaagccaacaaaatctatcaagagagtcaacaatctacaagaatcaccattcaagtaaattcatagagcctaaagattgaattttgatatgtacagaaaatgactacacaccatagactatctagagaattattttgacaaatatggtaaagttctaatgcagagataatggcaaatctctttgacattgaaatgaactaaaaccgatcataataataatccaaattccaaactaatactgataaatctctgaattgactattcatcaccaagtaacagctaaatgggagagaaagagatgacctttcgcttaatctcatgaacaggactctccggatcttcaacatccggcatgtaattgagtggaacccgacccggatccctgaaaaccgcgatggagtaattgtatatacacatcagagccaaagcggtgaaagcggcggcgttagcgattccgggagacgaagtgaggctgaaccaccgatcgatgaaagtgaaaaccgaggcaaagtagatgaaaccgatcaccaacatcaccaccgtgacggggagagagaatccgactcctttccgtttcatattttttttggagcaccggcgtcgaaacgacggcgtctccggcgagtggatttttaatttaaattatttgttttatttattcgctttctctcgattgatgttgttgttgtactttgttgttggagtacgtctgaagttgtcgacgattttggagatctcttgaactcgaagctccccacctaattgaaatgaccccttctttattatattatttcgtatttgccccttttgttttaattttatcattaaggtcctctattattgttttcaaaattttgctgacacatttcttaattcctaaaatgcagtttctgattatccgtataaccgaaattatttagctccatttaaaaatgtcagagcattttcgataattcgcttcgtctccaataatttagctatgtaacgttcaggtttgtaattggaactagaatcatggcttgcaaagactttcatgatgatatctcttaatgagcatttttagttgctcatatataaattcatttaataaaaaaaagaagattgcaagttaataaactgtaaaactgtactaaaattagtgtttaaagtttcacaaaacttgattacgtatttgatagaacttttattaaagaaaatctcttattgtttcacaattctatgttgtttcattgttcactattctaccatcaatccagttttcctactaatcttccaatggcggagtacgtcccgcagcaaccgcttacaatgccagagattatgatgaatacgcatattccaatctgccaaaatatcaaatagataaagcttaaatgaaattatcatgtaaaaatatattgactctaaacaataaccattttactttatggcataaaagaaaaaaaaatatatcttacttgagtcttactcaatctacccttcaagatactgagataacaaagacaaggaaagataaaatcctgcacggtaaacaaaaaaatatgaatccttttaacagatgtgatatgtctataatcaatgatagctgtaattttcttaaacggtgacttacgacaagcattgcgaggaatgatcccatcaaagcccccatgatcgctgcaaagttataattagaacaaacgacgataaattaagatgctttttgttgttgttgtatagtttcatgcaaaaagaaggtaagagtattttaccgaagaatgggaatgtaagtgcgacaaccaaagtagagagaactaaaatcgttttaataaagatagatactccatacgatctcatcttctctgatggcagcataagttcttctagacctagcacaattggtgtgagagctaacgcgtatttggtcatcggtactaccacctaaagtaagagaaaaagaaccaatcaaattttagtaattatatatatgtcgagacaaacatgtttaccgagttttaaagttatatctcaccgctgtccaaactgcgattttagatgctgtgtactgctgtggcatgtttagtgtaaactgtgattgaatggcctcaccaaacatactgtagccgcaaatcgctacgacaatgtaaaagaatacgcagaaaccaaaactgcaaaaagaaacggagaaatgaaaattttgacctagtatctaacgtccattataagtaaccttaggcaaagagatttttcacctaatgagaagcaccaaaggaaacttggatggttctttcatggaagagtaaatgctgggtaaaactgcgtgaccactgaacccaaacccgaatatcccaatagcgacgggtaagttagcgagatcaagagattttccacccgtgtgaaacccgactccatcaaccgacccaacccagaagagacaaagagcaagcaagatcgaaacaaagactcctccggctaaaagaatggaacacacatattaaagaatatatgaacgaatctcgaagctatattggaaggatcttatgatagaaaatggaacctgagagataggagagtaagctaaggtctttgagccaaactgtaggaagaacaataagagtagctgatatagcaaagatctgaggagaatctagagatactccaacgatgtttaatgtaatgttggggaaaactctcgataaattatcgctcatcatgattatatactccacacaacatacgtataactccatgtacaaaagtatctgcaactctcatgagagatcaagaaccctatatattagtttggagatatgttaagtatatatgtaaatgatttccatatgactaacggagatgatgaggcggccggtaaatccaaaggcagcttgaccaatgtccgggtaggtacggagatcagaagagctctcaagacatcgtttgaggaggataccggtgtagcaagtgatgatagcaaaggataagagtatacaaagcccgagccatcctccttctttcaccgcgtaaggcattgtgagtagacttattccacaaaggacattgattccttcaccaaaaataggttcaacttaaagagagattgaaacttttctttttgttatgacgataaaatctctgttcaaccgaaccgaatgcccaaaccctaaagacttttgagacaaaatcaataccgatactatgtcttaccatttagaacagattgaggaaacgagcagaaatttggttctccatacgagagatcggtgttggataacccgatctgagatgaaaggaataatacatcgtctttctcagagagcagcggttgtttgcttgtggaagacgcaaacgaatttgcaatagaggttggacgtctcttgtataaggaagcgacagaactggtgaatgatgtctgagaacttctccggtgaatgaaactgattgtaggaggtgtaactccggtcaagatatccacagattgtctatattttccagaaaaaggaagaatcttcacaaacgttataaattaattcgttagatatcgaaaaaacagaggaatttcttttaccgataactccgaggccatggagctgaatcgttctgagataatgaagaatatgaactagaatcatcgtcttcgtcatcgcaggagacatcaacttggcattcctcgtcatctgtcggaaacaatatgtctctttcttgctcctcaagttccatcgtcgttgtctctgtttcaaaacagagtcgaatcagagcaacaaaggagcgaaatgaatactataagaaaaaaaaaagagatcgagctctgagttcgatttgctatcacgtcgagtttgtattaatccaattgatacatgatcataaacaaattaatattctggttattctggtcgtgatatgtagtgtggaagtattagtggcggatctacattgccactagggtaggcacgtgccccatactaattagaaattttaagccataggataatgagactatgaagtcattgttctatatttgatccattggtaatgattattctccaaaacattgagatggtggagtttcacttccttatttgttctataaaattattgttataatatgtaattttatctttatagccacctttcagttcaagttttgggttaaaacatgttgtaagattcaattttcttcttagacagttatttttcctcttcatttttcacctcgctatatttcatataaatgtatatgtgccatatactagaaaagtttctggatccgcccctcacatgttcaaaagtcaaaggtatatgcgtggaattggaaatttggaatggatttgatttgtcaaaaataaattaaaaaaaagtaggtcgacgaaggttaagatctttttgtgaaaatagaagattacaagttaaaacaaagcttcattacggtattaaaattactgcttcacgtttcacaaatcttgatcactctgttaaatttcatataaaaagacaatctcttattgtttcacaatttaacatatgttgtttcattgttcttcattgtaccatccaattcaattctcctactaatcttccaatggcggagtacgtcccgcagcaaccgcttacaatgccagagattatgatgaaaacgcatattccaatctgccaaaagatcaaatagataaagtttaaattaaattattatgtaaaaaatatattgactctaaacaataaccattttactttatgacagaaaaaaagaatatatatatatatatcttacttgagtcttactcaatctacccttcaagatactgagataacaaagacaaggaaagataaaatcctgcacggtaaacaaaatatgaatcctttttaacatacgtgatatgcctatataatcgatgatagctgtaattatgttaaacggtgacttacgacaagcgttgcgaggaatgatcccatcaaagcccccatgatcgctgcaaagttataattagaacaaacgacgataaattaagatgctttttgttgttgttgtatagtttcatgcaaaaagaaggtaagagtattttaccgaagaatgggaatgtaagtgcgacaaccaaagtagagagaactaaaatcgttttaataaagatagatactccatacgatctcatcttctctgatggcggcataagttcttctaaacctagcacaatcggtgtgagagctaacgcgtatttggtcattggtactaccaccttaagtaagagaaaaagaaccaatcacattttagtaattatatatatgtcgagacaaacatgtttaccgagttttaaagttatatctcaccgctgtccaaactgcgattttagatgctgtgtactgttgtggcatgtttagtgtaaactgcgattgaatggcctcaccaaacatactgtagccgcaaatcgccacggcaatgtaaaagaatacgcagaaaccaaaactgcaaaaagaaacagagaaatgaaaattttgacctaatattatctgaagtccattataagtaaccttaatcaaagagatttttcacctaatgagaagcaccaaaggaaacttggatggttctttcatggaagagtaaatgctgggtaaaactgcgtgaccactgaacccaaacccgaatatcccaatagcgacgggtaagttagcgagatcaagagcttttccacccgtgtgaaacccgactccatcaaccgacccaacccagaagagacaaagagcaagcaagatcgaaacaaagactcctccggctaaaagaatggaacacacatattaaagaatatatgaacgaatctcgaagctatattggaaggatcttatgatagaaaatggaacctgagagataggagagtaagctaaggtctttgagccaaactgtaggaagaacaataagagtagctgatatagcaaagatctgaggagaatctagagatactccaacgatgtttaatgtaatgttggggaaaactctcgataaattatcgctcatcatgattatatactccacacaacatacgtataactccatgtacagaagtatctgcaactctcaaaagagatcaagaaccctatatattagtttggagatatgtgaagtatatatgtaaatcatttccatataactcacggagatgatgaggcggcctgtaaatccaaaggcagcttgaccaatgtccgggtaggtacggagatcagaagagctctcaagacatcgtttgaggaggataccggtgtagcaagtgatgatagcaaaggataagagtatacaaagcccgagccatcctccttctttcaccgcgtaaggcattgtgagtagacttattccacaaaggacattgattccttcaccaaaaataggttcaacttaaagagagattgaaacttttctttttgttatgacgataaaatctattcaaccgaaccgaatgcctaaaccctaaagacttttgagacagaatcaatatcgatactactacgtcttaccatttagaacagattggggaaacgagcagaaatttggttctccatacgagagatcggtgttggataacccgacctgagatgaaaggaatgatacatcgtctttctcagagagcagcggttgtttgcttgtggaagacacaaacgaatttgcaatagaggttggacgtctcttgtataaggaagcgatggagctactgaatgatgtctcagtacttctcccttgtatgaaactgaccataggaggtgtaactccggtcaagagatccacagagtgtctgaattttacatgaaaaaaagaaggaagaatcttcacaaacacttcaaataatttcgttagatatcgaaaaacaaagtattttattttacctataactctgaggccagaaagcggaatcattctgggataatgaaaaagatgcattggaatcatcgtcgtcattaacatatgagacatcgacatggcagtcatcgtcatctgtctgaatcaatatgtccctttcttgctcctcaagatccatcttcgtcgtctctgcttcaaaacagagttaaatcagagcaagtaacagattccaggacagaacaaacgaaacaggaaaaaaaggagggaacagagaagtgaaatgaatattggaagaaatataaagagacgacgaagagactcggtattgagttcgatgtgttgtcacgtctgacgtctgtcaactttgtattagtcttaggaaaaaaacactttgtattagtccattgatactacttgatcatatgtaacgaattaaattctggtcgactggtcgttaaatttagagtggaaggtaacgttcacatgtttaaaaggtccaaagtcaaaaggtacatgcgtggcatagatttgccaataaattaaagaaaaaaaggtaaattcaagaaaggcttatcgagctaatttaagcccaataatactgaactatttgggcttgagtcttaaaggcccaatttgtggaggaggcgtcatcgtcttcgcttttccttttcccttgagaggtcgtcgacgaggtttaagatttttaagaatgttgtagtagcttcgcgaataatctcaggtcttctataaaaccaaactagcgattagccgactcttcctctttattattacaaagacgaaaaggcttcgagttttgtaatttcttcttctgttacaagttcttttcactgtgaaagtaattcttcaatggcgaaagacggacctaattgggatggtttgcttaagtggagtctctctcacgccgacggtactcgacccactcgccagttgaggtacggacattcatcttgtagttggttttttaggttctgtcttttgatttgtctgaaactgatgggatgcttggtgggtagtttaggtatctgtgtggctatgattgagctttcacttgaggagatgaatcttatgagtgaattcgaatctgggtttgtttaaagtagttttcttttttgaagatatctgttcagttcatcggtttggttaagattcaattatcgaattctgctgttatgtaggtgaaaggttatctattttctcgtttttacatgaaactctgttaattttttttaagggaattcacgatttgttcatgtcaaatcattctgtatgtgttttattgtggattgttttgttgatttgagttgttttaatgagacagtgaggaggatcgaaaatggtttatggaggctatgcaatcgcagactgtagatgtagtcaaacgcatgaaggagattacactagttatgcaaacacctgaacaagttttggtggaacatggagtaacacctgaagatatccaaggtgcgtaatttgtggctataatacatagcttagatctttatcttttgccattgtgtgtagggtactaattgagtttattattctggtagatttgctggatgagctgcaagagcacgttgaatcgatcgatatggctaacggtacattatctctaacttggactttgctttttttttttttttttttttctttcctgttctggttagctcaatttgaacattgcttgtaacaacttgtttacttactattgtgtagatcttcattcaattggaggcttggttcctcttcttagtttccttaaaaactctcatgctaatattcgggcaaaagctgcggatgtcgttagcacaatagttcagaacaatcctagaagtcaggaacttgttatggaaaccaatgctctggagtcattgctctcgaatttcacttcagacactgatattcacgctcgaacccaggctcttggcgcaatatcatgtaagcctgcttctgatagttcatttttagtaaagattgagatgatcaaaagcttttgtgatttctattttacttggtttgtgatactaaaagagacttatcttttcaatatgggatgtagctttgattcgccataacaaaccaggagtaacggctttcaagcttgccaatggttatgctggcctaagagacgccttggcatctgatagtgtgagatttcaaaggtaacccacacaaatattcttatcatctgcggatataaaatcgtggaagattcttgaattgttgctcattttctttattcaaattctccaggaaagccttaaacttgttgcaatatctactgcaagaggatgattcagaccgcagtattgccactggacttggattcccccgagtgatgatgcatcttgcctctagtgacgatgctgagatcagagaagccgctcttcgtggattacttgagctttcaagagagaaaaacgatggaagtagcagcatagataaaagcgatgagaaactgaggcagctactagaagaacggatcaaaggaatcaccttgatgtcacaagaggatcttgaaacggttaaagaagagagacagctcgtggatttactgtggagcatttgctacaatgaaccttcttctctgagagaaaaaggacttgtcgttcttcccggtgaagacgcattgcctcctgatgtcgctagcaagctctttgagcctcctcttagagcttctgcagcaaaccgtaatgctactgagaagaaagatgaacctatgaaactacttggaccatagacgagaaatcaaagctaaaactttttattacttttccttgttttttatgttttgtaacttttcaaattgtcagaaaagtttcatagatatatgtattatgtcaatgatcaagggctatgttatgttaatttttgttttcatcattcgagatctttagtcttgttattgttgagattaagaatattcagcttcaatgctttttcaattcaacaagtgttctatacgatttcggtttagcaacagctaatacggacccgatctaattgatcggttaaaattggtaactttgaattgcggtgaaccgaagaacaaaaccaaagcgaacgtcacaattactttgcaatccctaaagggacagagttcgaatcaaggcagtctcacatatcggagaaatctctcgtcacgtctctcagcttcgccttcaacaccgtcgtcgccgtcacggccaactccggtattgttatatagatacaattacagtgaactagataatctcatcaaaccctgattctttccacttcctcgcacgattgtgtgaaaacagttactttcgctataaatagtctgatcttctttctattgagcagtaagattggaagctgttgtttcgaatcgattcaagcctcgaatctgagtttcggatcgatattagaagctaaggtaggagctttttgagtgaaggagttatggtatggtgtaaccattgcgtgaagaatgttcccggaatacgcccttatgatggtgcattgtaagtgtttttgattattcactgatgttttgttatcttatggtttgctctttaggagctcagtttctgttggatttgtggtttccaagcttcgaattatgaaatatcatcgtttttgatttttacagggcatgtaatttatgtgggaggatattggagaatttccatttttctaccgaagttacattcgttaagaatgctgctggacaggtatacgcagctgagctttagcttcagttacctcttttgaagctcttctgttttagtgctacatatgtttcttcggatgttctcgatgtgtctagtggtttgcggatgtgattaataggatgtaggattagagagatgtgagaatatgagttggagaatcttggaactgttatcacatctctgcttaaatgttctgtggggtttgtatgcgaagatgaactttttccttcagactgaaactttgcaaagaccatattatatgaaaggtcaaaactaccgaagtataagaaaatgcactaagcaaccagctttatttagccacaaccagtagaaatatcatcgatagacttgacaatggatttgtttccaagactgttgtctctttagtgatgatatccacagagttacttgagatttatacagcctttggtttctttgaacaatttggttcaagcttacaaattatttctgtttctgcagagccaagcatcaggtaacatagtgaggagtgttcaaagtgggattacaagctcacgtgaaaggagatttagaataggtatgcccctttttgtatatgtatatgtatctgtgttcgctgttggcccaaattctgcaactgatacatctattctacagctttcgcttatgtttgacagagctattcccttccctttttattgtatttcgaacttttcagttcagtaattgcgtatgtgtactcattaacccatccttaaatttacttccaaattcaggccatgtgactgtttcaaaaaccattgcattgttagactctttacattaatgcaattttgattcttatgatctgacagaccttcgtctttttggcagctagagatgagcttatgaatttgaaagatgcattggggattggtgatgagagagatgatgtgattgtcatcgcagctaaattctttgaagtatggttggtttacttaatctctgaatattaatttgtaaagtacttttaccccttcttttaactccattaatcttctgcagatggcagttgagcagaatttcacgaaaggccgcagaactgaactagtacaggcttcctgcctctacttgacgtgcaggttagattcctagtaatcgtcttattgctctcctatgttttttcctctttagaataccttgctgaattatgtagttgatgttttattcgctgtatgttaaccataaaatttcatgatctgtagggaattgaacattgcgttgcttcttattgatttctcaagctaccttcgagttagcgtgtaagatgattctttttcatttccctactgttctctttcttttgcaacctaattacatgttaagtctattgcaatgacaattcaggctttgctgttttggttttatcaaatattgtgcagttatgagttaggttctgtatacttacaactctgtgaaatgctgtaccttgtggaaaatcggaattatgaaaagcttgttgatccttcaattttcatggatcgattctcaaacagtaagtatgtcatgttttggctaccattcgtttttgtatttggttgatgcagaacatcagccaagaaacaaacagttatattgaatacttaacccagcctacttgtttcatcatactcttgcaggcttattgaaaggaaaaaataataaagatgttgtggcaacagctagagacattatagctagtatgaagagagattggatacaggtgtgactttgttatgttagtgtatcgtttcctatgtacgctttgccttagagttaattaaattatgagttatgttaatattagctacgtattggcttgcagaccggccggaagcctagtggaatatgtggagcagcactttacacagctgctctttctcatggtatcaagtgctctaagacagatattgtaagatatgattggctataaagaaatattgttttagatgagaggaaaagtgttttagcctttaattcactaatttagtactgatttggtgtgttttctacttccaggtaaacattgtgcatatatgtgaagcaactctcaccaaacgattgattgagtttggcgatacggattctggaaatttaaatgtgagttaaggctaatgagtgtctagcagaattacatgctatctggtcatatcagcacacattgggttaaatatgaggatctggttccgccgtcatagtagttataacttataatattgcatgttccactgctattggtttgttgtcatatgcaatagtgtcacaggctcgatttgctttgcctcatatcagttgaagaattatgttcatttttaacggttgtacatatgtggctaggttaatgagctcagagaaagagaatcgcataaaagatcttttaccatgaaaccaacctcaaataaagaggcggtgctctgtatgcatcaggatagtaaaccttttggttatggactatgtgaagactgctacaaagatgtaggtcaccggttaatttcctgatttttctaatcacgtcttctgtttacgtagttgcgagtcgttgacaaatggttcccagagttaacaatcaaatgttttcttttgcaatttttaatgcagttcataaatgtttctggtggacttgttggtgggtccaatcctcctgctttccagcgcgcagagaaagagcgaatggaaaaagcagctagagaagaaaacgagggaggaattagtagcctaaaccacgatgaacaactatatgtaagttttggtgctcttttatttgaggattgcagtttagatattttcctccctacccaaagcacctgtattgggagcttgttcacttctgcttgtatgatattataataaaatctttcttgtgccgaacttttaacagtcagactattgcagtatgagcaaaaggggaaaacaatgttctggtgagtgcaattgttttctatcagattaaagttcttcactatcgtttgagcacttgagaatctatttgggctgtgtcgcagagaaaggtgaaaaagataaagatggggctgaagaacatgctgatacttcggatgaatcagacaacttttctgacatcagtgatgatgaggtcggtaattgtttagtagtaaatgctatgtcaaatttccaacctcgaatatggaacatgaaataaagaagaattctcaacagtttcaaagtcttgttttctcactacagtttcccttgttatatttgatcgtcagtcatagtattttactgttgctcaggtaaatggctatatcaacaacgaggaggaaacgcactataagacgatcacatggacagaaatgaacaaagattatcttgaggtgatttcagaggctatataatatgtatcttctcttggattccttttgatttatcacctaggagatcaaatcacatacaaaattatgttgttttgtaggagcaagctgctaaggaagcagctctgaaggcggctagtgaagctttaaaagctagcaactctaattgcccagaagatgcaagaaaggctttcgaagctgccaaagctgatgcggcaaaatctagaaaggtgactcagtttgaactttgaaattatgttcctgatcaagcatctgacttttggagaataacatgatacccattgatgacatatggtttctcaatcaatttctgattcttttttctctctcttcatataggaaaagcaacaaaaaaaagctgaggaagcaaagaacgcggctcctccagccacagcagtggaggcggtacgccgaacgcttgataaaaaggttagaatgtcagcttctttgataccttgatacttgaaaacgaatatgcaaaaaaagataaaccgagtatgccatgtatcatctgttaaaaacctggcctggaagtacatagtcaacaacatggctgtcgaaattattagcattgaagaaactttagagtctgtgtttcttcctttttcctgattttgagtgttgactcttacagagacttagttcggtgatcaactacgatgttttggagtcgctatttgatacatccgtaagtttttgattacctcttcttgtatcctcaattctcatcactttttgaggtctttacaattttgcttctcttttcttctttcaggcacctgagaaatcacccaagaggtcgaaaacagagacagacattgagaagaagaaggaagagaacaaggaaatgaagagtaatgaacatgagaatggtgaaaatgaagatgaagatgaagaggatgaagaagaaggcaatgtagaatcatacgacatgaagacagattttcaaaacggcgagaaattctatgaagaggacgaggaagaagaagaggatggtaatgattttggattgtattgatgatatgtattgtgaaacacaagagttttaatttcttttgttttgccggattagttgattttatttgcattaatataggagaaccccaactaaatttattctttattatcagtaacaaatatttaagatttaaaagaaaaaaaagttcacacaaatgatctatttatttttacaattcaagtggtactgactaagaaatgaaaaaccactaacttaattaatttaataaaatctatatgtatttaattttgataattttattttccttgtttatgataattctaatttctatcagataacaactaacaatcactgaacttatctcacctatttgatgagctaaatgtattttaaatttatttttctataaagatataactgaaacaaaagtgatgactttttatgaaaattcccaaaatcaaataccagaaaattcaattttaaacaaaatgtgtcggtccggatgatcttacatctagcttggttttacaggatagtatttaagaagaatcataaagttcatctcaaaccaaatccgacggtccagagtcacctgcaaagcttggcatcgtatacgtgttcagtggtcaacggatcagctacgagtgccgtttgaggttcaaacttctgtttctgaggttaactctctaccgttaacgtccgttagtgtaccttctaaccttgacgacttttccactttccaaaagataacgacggcgttaaattggtctattttactgaaccagctttaaccagaattagattgcattacattcaactcgtgcttatggataaatatcagttcggtttggagaaaataggttacttaaggtaaaaagaacggcaagtaacggtgtgacgtcagcagaagaagtattcgttataatagtgagagagagagagataaaacttagggaacccttttttatgttttattttctcgctttgtttcgatcaagtcttctctttctctctctatccctctctctctggttcaacgggcaaagtatttttcgaataaagttttggttttttttttaacgttcctttcgccttctttcttcttcttctgctggtgaattcgtgtatctatctatctcgatgagctccacttttaatccagccgcttcttctccagatgaggttagtttttgtgtatcgaatctgaatttttaagggttttgttcttgtgatcagattctagtgaaattgagttctttgttgtttggctctgattcgaaacgaatttaactttattgaaactataaatttttgtgattacaattgttataaaccctaattttgctgtggttggtgttaatgttgagctgtttactgaattcgtgatttgtgagatctgggttctgtctgctttgtgttttacgatgattgcttttttagggtttctctgtttcttatcaaagtctggatcttttttttctttcattgagatgatggatcttcaggaagaaacaggtgaagtgaaaattgaggatcagtgtgtagaaaataagcaatcaacacctgcttcgtgctcttctgtatctgaaggcagtgctggtagttcccacaagtcacctacaattgcaagtcctgccacagtatcacctactcataggtacctcgggttagttcgtctccttcttcttcttccttgttttgtatctcctccgcagcactcgtttgcgaatttgcatcttttctacaagagattgatgttgatagtgtttggtatgcaggaggacgagtggccctataaggcgagccaaaggtgggtggactccggaagaggttagtattgagtattgactagtgattgcttttgaccaatatcaattttggatcagtagttcgaaattcaagatgtgagttgttttacttaatgcaggatgagacattgagacaagcagttgacacgtttaaaggcaagagctggaagaacataggtaagtctcttcttctttttagattctagttctcatattaacaagagtaatgtcagtgctacaacatactccatagatttgtggttcgaatattaaagttggagcctacttgcttacagtaactattagttccatactcttgtctctgtagttttatgagttactcttgtatgttaacttgatcatctgaggctgagcatctagtagaaagactttcttttacgtttgtttccgttttgttccgtgaagcatttagtattgtttgaattggtgtattcatttttgcagcgaaatctttccctgatagaactgaagttcaatgcctgcatcggtggcagaaagttctaaatccagaccttattaagggaccttggacacatgaggttgattctgtttctgattttatttattatttggcttcattttttatgtgaaatacgaaggcttaaagtttgttgttttgcaggaggatgagaaaatcgttgaactggttgaaaaatacgggcctgcgaaatggtctattatcgcacagtctttaccaggtcgaattgggaagcaatgccgagagaggtagttaattcatatgagccaagcatttttcttatagttatattggaagctttaatgtgttttgatatgtatgcaggtggcataaccatttgaatcctgatattaacaaggatgcttggaccacagaggaagaagtagctctcatgaatgctcatcgaagccacggaaacaaatgggctgaaattgctaaggtcttacccggcaggtatttttacttttcttggcatgcgtcattggagttgagactttagagaagggttagcttctgggtttaatgaaggttttacttaaaacttgctgcaggactgataatgcaataaagaaccattggaatagttcattgaaaaagaagtcagaattctacttattgactggtaggttaccaccaccaacaacaacaaggaatggtgttcctgatagtgtaaccaaacgttcatcgtctgctcagaaaagggtttttggttcagttgctcaaacctcatcagtaactacagatgtaaacaatctcgctgaagacggaaatggccaaataaactcatctgttcctgtcgaagaagtagtagctgcttcacgaatgactagtcttaatgagtatgctcgttctcctcagttgcctaacccagagccattgccagagaatggtggagctgcaaataatggttatcatctgtactacacgcctcaaatagactattacagggcgtcagaagtggatacgcagcgtatgtatgggaatgaatgtggttgcagtccaagcgcatcaccagttagcttcttcactccaccgccgtgtaggaatgtgcacagtaacggttcgactccaagaagtcctgaatcttacctgagagaagctggtagaacttacccaaacacaccatccatattcaggaaaagacgacccagggttgttgttcaggataacaacaacgccaagaaaacagatgaagctaaagaggttgatcaaaaggtgaatgatggtaaggatagttcagagattcaaaataatggatcaaatgcttacaatctatctcctccatatcggataagatcgaaaaggacagcagttttcaaatcaagacagcttgagtttatatctagagaggaagagaaagctgatgatgaaaccaaatcatctgagaaagatatgttgattgatggagattctcaactcctaggctaaacagtgactagatgattacacgctgaatgttgtttcattggttatatttttatttttgggttaatgttagagatgttagatgtatttagtccaaagaataatttacacctcatagttgagctaggttttttttttccataacaaaaaaaagatcttcagtagtgggccatagaaattggtgcatgttcttgattatttgattgatatgcgtctttgattatttgaacattgaatcattcgttcaccgatgtgaacaatatcactctgctttgaatttttttctaaatagactttatgatgtcattattcaaacgggtaggtaatttacaaatcataagatagtttcacattgacaaaagtgttttagatcaaatcagctatattctttggcaactcgtcaatctgagtactgtagtactgctcaatgtcccggagaatcttgatctcgtcgattttaacaaagttgattgcaacacccttacgtccgaaacgaccagaccgtccaatacgatgaatgtagagctcacggttgttagggagatcataattgatgacaagagaaacttgatccacatcaatcccacgtgcaaacatatctgttgtgatcaaaacgcgactttcacctgtccgaaactgattcatgatctcgtctctctccttctgaggcatgtccccatgcattgatgagacagtgaagttgctgctcctcattttctcactaatatagtccacttttcgttttgtgttgcagaagataacagctttagtgatgataagtgtgtcgtaaagatcacatattgtctcaaatttccactcctctttctctacagaaataaaaaagtttttaattccctcaagagtcaactcatcacgcttcacaagtatcttcaccggatccgtcataaacttgcttgtcatctccaaaatctcgtgaggtagagttgcagaaaccaagcaaacctgaatatcaggtggaagatatctgtaaacatcatagatttgttccttgaatcctctgctcagcatttcatctgattcatcaagaatcaaaaggttaatagctctggtgcctagacttctcctctttatcatgtcatagacacgaccaggtgttccggacacaacatggacaccatgctccagcttccttatgtcttctccgaggctcttcccaccaatgcatgcatgcgtcttatctgtttgtgaaagccagctctcttgttggggataatatcaaggcctgaaccctgcaatcagaaataccaacaaataagatgagaataaatttggagataacttggcagaaaagttaaaattggaattagggtatgaggaagagaaaacgtactctctagacgaaagtgtcaacgacttggcagacggagagagcaatcatagaggtctttcccgtaccggactgagcttgagcaataacatctcgcccttggagaattggcatgatcgccctctgctgaatggccgagggcttctcgtaaccgtactcgtataaaccacgaagaacatcctctttaaggcccatatcttcgaaactctcgatgggatcgacccctttggtcgtctcgaagtcatccattgttccaacgcctctcctacggtctccacggccaggattcgccaccataataatctataccctaatcgatctctgtttaaaagttgaaaagctttttgattttttgtattcaatagaagaatgttgtgagctctaaacaacaccaaaggtcacgtttatatagcaaaaatccaacacccttttcctatcaagaatatgtttctaataaggaataccccgatccgaaaccgactttagccatattataaagaaaaataaaaaaaaagaacgaattacatacgtgttattggttaccgatttaaatagagttttagtaatttaaaatattgtggagaatctgttgttatttaatcaagacttttaaaaagtttgttaaagttaggtgttaatagtttaatatttgtaaaaagtaatctaaaatcttcataaatttagagttattggattcatacttttataaaaattcattaaaagtttgtttcaaataaaataaaagaatttatgattgttaatgaattaaattattgtgttattggtttatgactttctacgcttttcgttaaaaaaaataaagtcatgaaaaatatcatcaaaatagagagattgtttgaaaagctaatcaacaacattatagaaaattctcaaacaatagtttagaatttttgatactgacacccaacttcaacaaactttttaaagccttcaaaattcttggtaatttaagaatcaataacacaccaaaaagaaaagaaaagaccaaaacaataacactgactttagcaataaattaagtgtaatgggcccatatcaagatgaacaatgatgcttccacatgaccagggttactaacatccagtttataatacattgttttgtactaactaaagagtttgcaaaccctttaacccttctatgaccagcgttaataacatccagttaagcgttaataatgaagctaaggaaggctactgtacaagtttcaaggagagaaggattgcttgaaattcatgaccaataacgaatacatgatatgttaccagttaccaccattatgtgaaaatgttacgttaagaacaaatatttggattgttaatttattaaaaatgatgttaaagaaacattagactaacatagcttattactgattcatgtcaacaccacaaactctcacaacttgtcttatactcttattagtaaaaccatcaattccattccatctttctctgtttcgattcccatccgtaacgttttcatttggtcaggcgaaattatgtcatgattttgactcattagagaattaccaagttcctgattttggtaagaatatatatatatagagacaacaccaacgacttttcataccatattttaatcatttagcaatgacaagttgtgactagatatttgagaataaagtgaaaaacagagtaaatgttacgaggctcttgttttgagttaatgtcatagaagagattgaaacaagaaactgaagacagaggtaaatcatatatagacgatgtgccgaaacttagatgaatcaaactaacacacttgcatcattttattaagcagagccaccaactcgggattctctaatgctgcagtcacacgttctttatccccaagttgtttattgactgcattataacatcaatttgaggatcaaattcaaaacatttacttccactgcaaccaaaaaataaaaatgaaagtttatacctgtcgtctctttatcatgactccctggtgctactctcacatcaacctgagatttcattacaacaaaattagctttaagattacaaagaatattcttaataaacaaaaattgaacacaacacaacaacaataccttgaatctagcaggtaagctttgcacaagtttgactaagatgcaaagaccaatatgggttggcaagtgacaatgaggaagagttggagtgaatgtaattctgtaaaaagatagcacaacttaatagattggagtaaagagaaaaagctattaatcacaacatttgttttttctttttacctaacgtaactcttgtgatcatcaacttcaactgattcttcagtaagaacattgagatcttccaaagaaagttcaggatgctctggatctttgatatctcttatacgatttgtagactgttaagggaaacaaaaaaaagaagatgatccaataacaatataaacataactacgagaaagtcattgtcttagtaatgaataacaaaaattaaggatatcaaaaatctcgagctgatcaattggttctactgaaaactcatcggtactgctctgatcagtacgataacgccgtgttctcttcggataaataattgggttcttattggttaatacagaatccatgtttttctctcctgaacgcataaaccctaacgatcaattagtagaaaaccgaagaagcttatcgaatgagacgtgggagacctcaataaacctaaacctaaatataatctgagtcatgaagttaattatacaaatcatataaaggaaatatcgggaaatacttaaacggcgccgtactctcggtaatgtaattctcgtatccaattttcgttttaattgtttccttttttaaaaaggaatattttcttttacatatacactatggttttcctattcgaaaagtgaactaatatggttaataataatacatggtggattaggaatgataattccctatataaacactttaggtggtattggcaaaaaaaaaagaagaaaacttgaggtgagattggtcgagatttctggatacataaagaagttaacagaaggaacaagcgcaagaaaaggccatccatacaactatcgcaagtgtgcacttccatagccatgaatggagaagagacgacaccttttaaaagaagacagatgacaattctgatgcttcctaatgatttgctattcaactgcttagcccgcatctcaagattgtattatccaactctctcgttagtctccacgagattccgctctctccttgcttcaacggaactttatcaaacccgaacccacctgggccgcaccgagagatgtctttatgtgtgtttccgactatttaccgaatctgaccaactacgttggttcacgctctgtcagggaccatttaactccaaaaaaattttggttccgatttcatctcctaattttccatctgcatcctggtcggatgctgcaatagtcggtcctaacatctatgctattggagggttagtaaataagaattattcgtctagcgtcatggtcatggattgttattctcacacatggcgtgaggcaccaagtatgcatgtggcccgtttgtcccactctgtttgtgtccatgatgggaaaatatatgtaacaggaggttgcaaaaatcttgattcaacgaattggatggaggtttttgatacgcagacccaaacttgggagtttttgcagatccctagcgaggagatatttggaggctcaaagtacagaagcgtagagtatgaaggaactgtctatgtaaagtctgaggcaaaggatgtgacttacaagctgcataaaggtagatggcgaacagcagacatagcgataaataaagggtggtgatgtccttcattatcccattattgtgtgatagagaacgtgttctaccgttatactgatagaagaatcgaatggtatgactccgaaaaaagattatggacaactttgaaaggtgtggaaaaattgcgtagtttttctcgtgtaaacttggtgaattatggtgggaaaatggcagttgtgtcggtagagtatgtgttcggtaagaaggaggcaaaaatttggtgggcggaaattgcgattgaaaaacgtcaaacgggagagatttggggaatgctagagtggcttgacattgtgtttagaaccaatgacaagtcatatagtttagagcgtgctcttgctactaccatttgatggctatgaatcatgactcataattgtgtaaacataatgaatcattcaccaacatatatgaaccaaaggacaagtcaaattgtgtgtataagattatgtgcatatcgtagagatttatgaagcaatttaatagtaatatgactagattacacaaaaataaagtaattgactttgtttgcctttgctaatcttttgtttttctctttgaaattatcagcatttcacaagttttctgatttcaacaaatctaactatcatagaaggtttctggttatgaaatgaattattaatttaggaatcgaatccttatgatgtttctctttatctcgagacttttaagttgagaacatattgtgtaatgaatagtgagtctactctttaacacaaaagcatgagcttttaaattatttggttattggatgtctctagatgctgatacaaacgaacgaactgtattcaaatacattaaaattagtgttgcttttatgtgcaataaaagaattaactattatttggaaaagaaaaaaaaatacattaacactacatgtatgtgtaggtaaaccgtatccctacagctgagagtctccgaccgctgtagcgtaggggagtcatctgctaaagtcgttaagtgagcatgtgtgaacctacgaaaaaaccactagtacatggagaaaatcaagagcgttgactctcgcatagtcaatgtcctgtaaaatattatgaatcatggatctccaactctgatacactaaaatgaattgtgtcttcgcggcaccgtgcttagcgtttatagatccgtaagctaaagaaaaaatataatttatggtaatgaaataaattttcaataataacttatagttataatataaaaatgtagtttaatatttgataatgtattacaaaaagttatgcaaaataatttataaaatagttagtcacaaaaattgtacaaaactaaaaaagtcttatgtgattaactatgatatgcctaatgatttgtgctagtgccattgtcgcatgtcgtaattttgtaatcgggtcttttgtcacctctcatttttaaaccggtataatgcatgcatgttattgaagaaaaaaaagttgtaatatacaaaatttgttatttaatattaaatttgtaatacacatttcaaaagccggctaaaaccggcgaaccatcaaaaccccggttcttcaagtttttagtctttcaccattgcttttttgtgtttttttacagtaaaattagttttctatcatttgcattgatttatttgatctaaatattgtgtgatagagaatgtgttctagattgtaattgtacaatgatccaatggtatgactccgaaaagagtttatggacaactttgaaaagtttggaaaaatggcctagtttttttttatgtaaacttggtgaattatggtgggaaaatgacagttgtattggtggagcatatgttcggtaagaaggtcacaaaagtacagtgtgcgaaaattgcgattgaaaaacgccaaaagagagagatttggggaatggtagagtggtttgacatttgtgtttacaaccaatggagtcgtgcatgctcttgctactaccatttgaaggattcattcaccaacgtaaggaataaatcactttgtttttacttttttttaaaaaaaattattcattaatttttgtcatatttgaaattctagaattaatccataaaattttcgaactcattaaccaagccaaataaatccataaaaaattaattcttcaaaatttagaaacaatggaggaccaatgaagaaaacccaacgaacaaagagatttaaaactataatattattatcattccactggaagtacaaactcatcacatggcagagttgctagacatctaaaagatatgatcaaaacaaacacaaaagacaatgatcggctaaaagataagctgaagccattattacacataaaccaaacctaaaaacaccatcctatatatggtttacttattgaataacttaattaattaaagagactcgattatctctgcttatttaaaaaggcttcttcacttgcaggtgcaaggatcacacttgcagtcagatccacacttgcaagcatcgttctcagcgttgttactctcccctgaagcctcgtactgattcttcatcgccggtgcaacgcccaagacaaaagtctcagttgtggttgtctcgccggagaatcccaagtcagggtacattttgcaactgcaacaatcgaaagaaaaaacccatcagtatcctatgaaaacagagatcgtgtaaattcaaaagagttgtatctttttacaagaaaaatctccaagaaaccattcatcaaaacaagatatcatcatcgattcacagttgttgcatacttgcatgcaacgatttcaccggaaaatataaatacaaacgagacgttggagacttaccctccacaaccgttgccgcacttgcagccagatccacatccgcagtttcctccacagcaagacatttttctcgagaaaattcaaattgaagaaaaatttatgaatgaaaattaatgatagaggaagctcccaaatttataagctaaatgagattaatattgaccatacatgtgtcgcaatctttctccgctcttatctccaaaactagttcttcatttacgtctttaccctcagcgcattgattctcgtacgtcggttcaataattgtccagtgttcaaataattgtggagtgtttgtgtgtcgtcgattcttgtacgttcgagagcgtaccgatgttccgtgtgttatggtcttatcaccgtttagattctcaccgcctttcatgcagatctttattctacggctagatctattaacctcagtcgtccacttggtatttcgtgtttttataataatcgtatatttgggtttgtctacactagataaaattagcaggaaaaatatctaaaaatatctataaaaaaattgtttgatattgttagacttcttttttgtcgtttctgatcaaaagataaattacgttgaaaaagagaaggagaaaatcttaaaagggtgttcagtgtgtgtggtccagagagaacgtagcaaaattcagttccgaattccttatcctagttcatcagaaaagtaactttttcttttgctaaaccgattttgtttgtttagtcaaaagtgtataactatagtttatgaaaatataaaatttatgactttattagtggcaagcatatctgcaaaaagcaaaaattacgtatactacgagtattataaagttcaagtctgttattttcattcacggtaactaaagttcgagttcaaaatttgcgttagctttgctagtaggatagttatataaattattcttacattatatttttcactaacaataacgtatatgggacacaaatgcaacatcgttaaaatatgctgagtaacaaaatggtaaaacctcagcgaaatccaaaaaaaaaaaaaaaaaaaatctattctaaaaagattgaatcaattctaaaagttactttagtaagagtctcttcaaaagattagtattcacatggaagatctccaaattcttccttcaagtgaaatcacaatcacagaaacatcgtcatgatacctccgacgatctccttgtggtatctctagcaattcatgaaagtccatacctaaaaaaaaaaaaaaatgcacgtgagtttaatcaaagattgcgtttcgaatcttaagtgcgtttgcgttttgttcttagtattaccatatttcttggcagctctaaggaggacttcttgaatgagatgttgagcaggatcgccttcagggaaggctgagatgaatgagtcaacctcgaagatggcttcctcgttcgagaagtattcgtatagtccatcggatgagaggattaggaatttgtcacgtgatgagagtctatggtggtgtagcgacggagagcacgtgatgtacggcgatgttccgacgtagtctattctgaacatctctagaagcgcctcgttccattttggctgaggaaagacattgaacaaaactattatcaaatcgaataaaaacaaaccaggttttgtaatagtatttttctgcattttgatatttctacaaaccttgtagacctaataatccaaccctaaaaactataaaacatgcaaaattttgaaactatctgattaaaatcatgagtatatatatacctgtttaagaaatccagcgccaaatgcacgagtgactttgagataacctttcactctattattctctatcgctaatatatcatcaggatgttccttcttgattcttctcacttcctgtcacatcaaaagatcgttagtgtctaatgttcgcaaaacaaaacactgaatcaggactcgcaaaaagattcacctcttcaacacttgtgctatgttccttattgagctgaacagggaccagaagactcagtcctctttcggtgatgaacaaggtctctaatggactttcttctttgactctctcaagctccttttgcatcttcattttctcgacattaggtcttcgagcaagaaccgctcggctatctccaacgctcatcacgtaaacatcttctcctttcatcaatgtcacaagaacgcaggatcccatcaaggctaattctggattctcattaaccatcagatcaaacgattcttctgttttctccaacgcttgttgaagagctctaagaacgtctttgtggttaatattattagacttgttgcttgagttatgctcccactcgcacctccattgcaacttcttcacgtcactcgtaatgtttcttgatccacaagcaacatcgtttccattcatcacagggcagttttcttgatccgaatcggatgcatgctcgactgtactctgtttctcgatgttggactcgccgtttctattatatgattcacctttgtcgatccatagtaaccctttgagctctctgagcacggcagtgtagagatttttgataagataatccggtggatctggaccgctgaatccgtcgtaaattccgacgaaaagccaaccgttttcctcggagaggatgacgtgtactcgatcttcacctgctttcccctgtgcccattgtatctttggctcctctaaagcagactcagtcttatcttcttcttctttgattctaggtttctcatggctgctcacaatcgtgcttaaggagttgatctcaggtatgtaacgatcagtatctgatgatccatcgaatgaatcgaaaccgttgattggcttaatcacactcttcttcgaacaagataagttggtgaaaacgtttttgaatgtaaagattttgctttcacttttcttcagttttggtttcgtaaaggatttgcttccacttttcttcagttttgctttctccttggtcttcttccctgaaaccaaaccgctttcaatcggaccggataagaaccggcgttcgaatagacccgacccgtgatccgatttcttaataggactacgtggtacaggctggagaggcaaggaagcgaatctattggaactctcgaacgcggaggctattccagacgtatctgttgacagagaagttgagagcgcggttgaagtattggcgctaacagaggcgccggagattgatcggaaagtggtggtggttccgggtatcgggtcgggtcggaggggcggttccggcgggaaagaagattttgatccggtgagaactggacgaacgtagcagaaagagtggccgaggttttcttgaaccagtcctactccggttacgtatcgaccggaaatttctccggcggtggttccggcgcaacagccactaaaactcgcgactccatttcccatttgagaatgttggattacgcagctaaaaacgtcaccgttcagtgaagaagaaactgtgccgtgtcgtgtcacagaatgaagtcgaaacggcgccgttagtctacaaggagatttgtcgagatttatgaacgagaagttttttggctatttatttatgttggagccaaatggtgaagaggatgaaaagggttgactttcaatgaggtttattctcttggaattatgtttatgccgatttttatttgaattagtaaaaaaattcatgaaacttttgacaagtttctttaaacaatatgtccacgagttccttttaacactgttttctgtgaggaataaaaaaaagatttgccctctttggcctttgcaacgctggaattaactcagtttcctataaaccataagtccaattttacttgacattctttaaaccaatgacaagtttaccaaaaaaacaaacatctgttggtaaaaaaattcattgttattttagataaatttgtttattttttggtacgagggagttgacttttaaagaagggtacgtgtgttttgatttcataaataactgaaaaattatgaatttataaactaatggaatgcaaaaagtcaaatggcttacatgttaattcaatgagtaacgtggttagaccagtcacaaagaagaaactaaatgcaggaaacttgctttacctgtctctctagggaaggcaaatctgtgtgctgatgacttagcaaatttagctattcaaaactttaaaaagtgtgaatgcagaaaacaaaactattagttttttcatataggaaattaatagaaaaaaaaagataccagatattcttgaaagagtagctggctgcttgcgttgcagtatgtattgcatgaactctgcaatcaaatttctttttcttcttttgaaaaattcaacgtaccatgtttctgtttttcacacaatgatattaaattactaatattgctactagtcgatgagactaactcgatgaaatgccatgatcaggacagagtagtgttggaacattcattttttaattaatttatgaggcaattagtttatcaacataaccatatattatgcttaagcacgtaattattatattttgcggatcttataaattttgtcaacgaatatacggggattggatagaacgtggaagcaaagagtttctcaattaattccacctagctgacttttccgtatcgtgaaaactttttaactatttgtaaaagaaaaatgaagaagatttattaccccaaacatgctcatttagggagataccttattcatatggttcgtcacatccacacttatataattcacgtttcggttatataaaaaggaaaaacatgcaccgttaataacatgcactattacatttctactgttataaaagctatcgtaataagatcaaaacgatacaatctatttcagttccaatgattaacatacggaaaatccatgttcaacaagaggcattgcacggataaggacaatcgattagcttcaccggttttcggttgaagtaccaatcacctacagactctgcaatcgtctgtttcaacaaaaacaaaaagaggagacatgagtttggaaagttcattaatttgctagaagagatgctcgagagaaaagaaagcaacagattgcgtcaattgtctttttctaaccttattttcgattcttgttgaggttgcggaatgccatgactctcttatctggcaatgagaattgcacgaatttataaacatcccaccctctttgttcacatgaaattctcctatcgcatcgatcagggaactgcggaaacctgcaaatcatagaagatttataaaatatagagctgacaaaacataacttatgctccaagaaagaccgaagatttaacctttgctccaagggttgatagaatcagttaaaggtttattaatgagtagataaattaccatgcagaactttcatttgtgcggcatcacattcctgaatattgagtctacaaattttccatctttcatctagatccggagaatctggtaccaggccgttttgaatctgaatgtgtgcttacttttagtaaaatcaatcatgaattgcagtaaaaccaaaatggagataggacaaaagttctcataatattgctaggattggtaactctaacctgccaataatcgtaggctgtgttgacaagaaataccggagttcttatgtttttaagagattcttgaggaaacatacactggaaaccgaaatcaagaagcctcagtaccaatcataattaggcacgaaagatttttcgaaggaagagacaaaagctaccttagatggttccattttggcaacacaattctgatccaagctcttatctacgctctggtcggtgtcaaccgcagcaatccaacccaaaaccatgacatgttcttgattatttcaatgaagacttattcaagataatattgacagaaagtgaatacaaacctgcagggtaacaacatcatgaaagaaagatcccattgttgggtttccaaggacatcaagcctgaaagtgaaggaaaatagcttttgttgatagtcattgttagctgcttttccttagctctgtgggagtatcaccagcttcattgaaggaattaatgaaagagcactgaaaaggtaaagtcatgacttgtgataaaaggaagttacatacacattaagaatatagcctccatcggaaacacatttaacagttgcatctttaggcagatggtctcgaaagtagtcacaatgtattagagtagacaagccaccagcagaacatcctgtgagcatggcctgcaatttatcaaacatgtaaaacaaaaagaaacattaatgggatttcaagacagagacttaagttctacaaattaagatttataagataatgaggacggtacacgtttcgcatgtgacatgcccatcgacaacaattcatccatgatagcctcccaaatgagctggccgcggaagaaaagccgtgtttcattctgagacgaaagaaagagagtcaaagaatcatgaaaactagtcaatttttttggctatcatccgaccaaaagccttattaccttgaattcagcttcagggtgtccagaaaaacaagcaccatcacagtaccgtatcataactctgttccagttaaagaagtctacaaacaaacaacaaagacaactatatagatcttcaaagaaactaccatatatatatacaaaagcaacaacggagaagctactaaagatttctcgtaatgtaccagggttttgagatgggtcactgcttaaaacgccaaaaaaaggcacttcatgttcaaagaagttggaagaacctaacctagtcattgctctagcagaacatgactcaattgtacggcacccgcctccacccttttataaaatctcactgtaatatcttctaactcccaagtagaaataaattcaaattcagtcgacaaataagaatacctctaaataaagaagccagctattggagccagatcctgaacccttatgaaagtgataaccaggtaagcttccatctaagcaaactgcgaaacatagtatataaatactccgaaagttaaaaaaaaagaaagtattggagatgatacagtacaagctcctctctctttagctttactcgacagcttcagtttaactagatcgctacggtcaacggaggggatagagtctgaagttgaattgaaggacaaagaaaaggaataaacgatcaagactattccgattgaagcgagaagccagtcactcttagaccatgttctgcattgtagcagagagcgaatcaccattgaagaacagaagcaaaggaagtgagcagtagtatgtaaaatggtgatatttgtgttgcttttgtaacttgtaaggaagtttctcagtgattaactgtacgtttgaaaaatctagttgtatcttattgaccaaagatctagttgtatcttatagaccaaagaaaaccgaggatctagctagttgtatcttatagaccaaagatctaacttatgccccaaggaaaccgaggatcttaataataataatatatattttaatagagagactgaaaagattgtattttacgatctttatatttaaattcttgaatgatgatgcttaagttttcgtcgatttaaaattctatgtagcgtatcttgcccttgacaatcgggtaacagcgaaaaaggagcagttagtgaaggaggagctggaaaaggtgacattttgggataaaacattaattactgggggttttcgaaaatcctaacactaaacttgaatgtgttttctctgatatttgcaggtgaaataagcaggtacacatacaaccgacatctgggtcttaccaccggattacgtcaaaaattatacagactggtcctgaaaaaaagattttattaaccgttacaatggattaaaatctaaatcaaatcacatcattaatgacccgaaaaaacttagctaaatattccataattgtccatctttgttgtttcgcaaatattgtcctagaattttgtaaacttattagagatttaacaagtacaaaacttttaggactcacccggattgagaattttgaggaagtgactgctcccttgctgaagaagcttctggagaatcgaaaaagtccacaagcagaggaagtggtaaaatgaggatataaggcaagttcatgtgaaattcatgttgtaacaagaaggattgcacgggtatggacaatcgattagcttcaccggttttctgttgaagtaccagtcacctacagactctgcaattgtctgttcccacaagaacaacggaaaaaacagacacgaaacaggtgaggtcatttgtaagaacaagcaacatgttaaatatcttttaccttattttcgattcttggtgaggtcagggagtgccatgtcacggacatgactgtctggcaatgagcatagcaggaatctatgaacatcccaccatctttgttctgatgaaattccccaattgcagtcatcatagaactgcgaaaacctgtaaattaaataggatttatataaatagagctggccgtattaacttatgctccgaggaagatcttatgattcatataaatattcaacaacttgtatcttgtatcttatagctgcttcacagcttgctcatatctactgattgtactttgaaacagaggatacttttgataatcaggttacaagatcaatttgctcatccttgtttggcatcatttatttttattaaggagtaaattaccgtgtagaactttaatctgttcggcatcacattccttaatattgagtctgcactttgcccaacttttatctggatccgcagaagttggtaccaagacatgttgaatctgaatgtatgtttggtattagtaaaacagtaaacatgaattggagtcaaatctaatggaagcaggcaataagtgctgctcatgcttggattggcaactctaacctgccaaaaatcgtaggctggattgacaagaaataccggagttcttatgtttttcaggaattcttgaggaaacatacactgcaaattttaaaaaaaaagtctcaaataccaatcataatcaggtaaagaacgattttatcagtagatggaaaatacaatcaaagtaagagacaaaacctaccttagatggctccgttttggctacacatttctgatccaagctcttctctacgccctggttggtatcaaccgcagcaacccagcacagaaccaatggaaaaccccatgatatgttcttactcatttcgatgaagaattcaagatatatcacaaagtattatttcgactattgaaagaaagtgaatggaacctgcaaattaacaacatcatgatagaaagacctcattgttgggtttccaaggacatcaggcctgaaatgaaggaaaatagctttactgagactgagagacagtgtgagcttgtttcacatcaacagtaacttcttagctctgtggagtatatagtctgctaaaaatctaacatgtgtgcttcttaaaactagtttagacccaaaaaactaaaagaaagagcagtggaactcatgaatctgtcaaaaaaaaaatcatgagaaaatgaatatgagcacaaacatacacgttgagaaagtagcctccatcagaaacacatttgacagctgcatcttttggaagatgatctcgaaagtagtcacaatgtataagacttgccaagccaccggcagaacatcctgtaagtatggcctacatttactcaaattacaaagaagaacaaaaattaatctgtagcaaattacctaagtaggcgaattcaactaaatgcagaagatatatggtaggtcttgttaacatagatggatattggagtgcaagacagactttcatggtaaccagaagaacattattaacagatccatttttataagatcatgaagacgttacctgtttggcatctgacatgcccattgacaaaagttcatcaataatagcctcccaaataagctggccccggaagaaaagccgtgtgccattctaagaagagggaaaaagagagtaaactaaacatgaaactattgaacttgaattgctttcaacaaaatctgacgcaaatcctcgaaaccaaaagccttattattaccttgaattcagcttcagggcgtccagaaaaagaagcaccatcacagtaccttatcgcaaccttgttccagttaaagaattctgcacaaaacaaaaaaaagactacctaattaattcatactagaagattgtcaactataaaagacaacaatgtaaaagctactagagatatctcgtaccaggattttgagatgggtcactacttaaaacaccttgaaaggccacttcttgttcaaagtagttggaagaacctaatttagtcaatgctcgagcagaacatgacgcaactgtgttgcaccagcctccaccctttcactcaaatatattctcatccccatctaaactcattatatttaaattcaatcaatacaaaagaaaagacaaatacctccaaatgaacaagccagctttgggagccagatccagaaccctcatgaaagtggtacccaggcaagcttccatccaaacaaactgcgcaattgaatcaatttcagttaaaaatccaaacttgcaaaagtgtaagacaaaaaaaaaacgagaggattagtaacagttacaagctcctctctctttagctacactcgacaacttcagcttgaccagatcgctaggagatatgattggccgagatcggtcaacggaggggacagagtctgaagtgggatcgaagaagaaagagaggaaaaaaacgatcaatacgcatcctatagaagcgacaagccagtcacttttagcccattttctacaccgtaacagagagctaaaccttggaatcgccattgaagaagattagaagaagaatcaaaggaagagatcacttcactgtttcaaatatgttattatttacatctctgggactcacgattgcgacagcccaaccgaatgattaatacataactgaaatcgaaattaccggtttaaattggttcaaagaggagagattttaaccggaatggaataagaagggacctttatgcctaaagcctctatcccaattagcggattttcgtgtaaatttgaatgtattaaaataagctatttgccgctttgcacgaaaaaacagtgaacgctttcaatggcgtcgtcatcgtcacgatctctggtttcttcctacacctttgatgagaaagacctagacgacgctgatttatgggcggtgattgattccgccgccgctgcagctactatcgccggcaaatctccgaaaccccttgctattaggtatccaaattacaattctcctccgacgcctgtttcgtatccttctccacagtcgaaaattcttcagatccccaatcgtaaccctaatcttggccgaggattgaacgaggagtctaatcgtccgagcaaaatggccagatctcgcatcttgtctgaggtgaagagtgagactccgatggctcttgttacgacggcgcaccggaattcgaccccgaatatcatcaattcgacgaagttttcttcgccggagagttacttgtcgcctgggattagacagcctacgccttttgcggaggtttctccgtcagcgagctgtgttaagaacgatccgattaatgagatgcgacatagcttgtccggtagctttccttctgctactctgttcaaggagtaccagaatacagcaatggcggtatcatttcgattttcctctatccatttttgtttatttcggaaatgagttttgtgcactgaaaggtgttcgatgaaatgtcaagcattgttttgcttgattatttcgatcatgacttgttccttcataataatttctaaatttttctcaatacaaaaccaaagaacccaagctagatcactactcttggattcactcaaccaatatcatatttgtcattggtacatcaagtgctatcgtgaactaacaatattgcttcatcattttgcagattctagagaaatctgattacacgatgatatcagggaaggcatacatcaaaaagtcaggtgaagattatgcttgtagtctgcttattgtttcttttacattcaaaattggttttgatgctacattgtatggaaatgtgaaggttggaggaaaatatcgttttacttcaatgtgtcttatgaaataagagacaagactattgaattcgacgaaaacagaaatgtccagcgtgctgagttcatcgttcgagccattatgcagtaatgttcttctatataaacttgaatttgatggtgtgtttagcaaatagtgtgtagtgattaattggtgtttaaccttttggttgatggggtctcgcagtggaggaagattcgctgacggatggggttcttgtgagcgacgtgagaagaaatttcttaaaccgaatcacgatatccctagcacagcggagaccagagccaaaaacagggcttgtcaggtaaacttccacttctaatgctccagttacttgagcaagttgctatgtcattttgtcacagactgtacttgttgaatcttaaacatctgcatattcaaggaaacaaagaagcttagagaatcaagtaccttaacatgtagaggttttagcctaaaggtcctgcatatttgaaagagacaagacaacacactgatatcttgcactttaccatccagaagctgttccctaagaagctgtttttttctttcctgcaggatcttcttggaatcggtgaatatcgagaaagcccagctgggcttccacgatgatcagacaacatcaaatgtatttcccgaccttgccaatcccaagctaaaccttatcaaacccacaccaaccgatgtcttttatgggtttttaactcttgaaatcatacgatataaacgaatagaacttggttgctgaagtatggtggattatgatttgtgtcgagtattctaaaatcaacaaatcacagataatagtcaatcttagatgattatgttgttgaatctcagcaagctttttccaaagcaactcaccagagttccaaagggagacttgaatcatgcggttacagtatctcattgtttttgagataaagtatctttcttaagttaaaaaggctaaaagaataaaaaccttgcagaattaatcaaaacattcctgttatagattaaaaaaaataaggagctcatcgaaacaagcgagccctcaaaatagagtcaatacaagaaagaaaaagaaaaaaaaaactaggggacaaaacaggaaaatgttgaaatacaaacacataaagactgagagtaagagagtaagagagaaagttattagtcgacttcctcaatcttgggacctgcacctccggcagaaggaggaacatcctcgtccattcctcctgcagctggaccaccagcttcaccgccttggtacatctttgctatgatcgggttgcaaatactctcgagctctttcatcttgtcctcaaattcatcacactctgctagctgattcgcttctagccattcaatggctgcttcaattgagtcttcaatcttcttcttgtcatctccagcaagcttctcgccaatcttctcatcacggattgtgttcctcatgttgtatgcgtaattctcaagagcattcttggcgtccaccttcttcttgtgctcctcatcctccgacttgtacttctctgcctcttgaaccattttctcaatctcgtcctttgacaatcttcccttgtcgttggtgattgtgatcttgttcttctgccccgttgtcttgtcctcagccgagacgttgaggataccgtttgcatcaatgtcaaaacagacagtgatttgaggaacacctcttggtgctggagggataccagaaagctcgaatttacccaacaggttgttgtccttggttcttgctctctcgccttcatagacttggatcaaaacaccgggttggttgtctgaataagttgagaagacttgctccttctttgtggggatggttgtattcctctggatcaagacagtcatgactcctccagcggtttcaagaccaagagatagtggtgtgacatcaagcaagaggagatcttgaaccttctcattaccctcaccactgagaatagctgcctggacagcagcaccatatgcaacagcctcatcggggttgatagatttgcaaagctccttgccgttgaagaagtcaacgagcaattgctggaccttggggatacgggttgagccaccaacaaggacaacatcatcgattgagttcttgtccatcttagcatcacgaagacacttctcaacaggctccatacactttctgaagagatctatgttaagctcctcgaatctggcacgggtgataggagcgtagaagtcaataccatcgaacagagagtcgatttcgatggtggtctgagccgtagatgacaaagtcctcttcgctctctcacaggcggttctcaacctccttagagctctcgggtttccactaatgtccttcttgttcttcctcttgaactcttgaacaaagtgattcaccattctgttgtcgaaatcctcaccaccaagatgagtgtctcctgcagtcgccttcacttcaaatataccttcctcaatggtcaaaagagagacatcgaatgtaccaccaccaaggtcaaagatcaaaacgttcttctcaccaacacttgtagccttcttgtcaagaccgtaagcaatagcagctgcagtaggctcgttgatgatacgcataacattcaaaccagcaataacaccagcatccttagtagcctgacgctgagagtcattgaagtaagctggaacagtaacaacagcgttcttgatcgttgtaccaaggtaagcttcagcaatctcacgcatcttgatgagaatcatagaagagatttcttcagcagaaaactctttatcttctcccttgtagttaacgacgatcattggtttttcagcaggtccagatttgagcgtgaagggccacaatttgatgtcactttgaacagagctatcagtaaatcttcgaccaatcaacctcttcgcatctgtcacacaacaaaattgaacacaattagaccacagatactatacgaattaaaacgatgctatatgtatattttgcctaaaggctaaaattagtaacattagatcgaaaattgaatctcactagctccagcaatgttaaaacattcttatgaaaccctaaatcatcgctatggatctaccgattacagatctacttataatccaagttcgaaagacaaatttagcaagaggaaacgagtgaaacgtaccgaaaacagtgttaatcgggttcatggcgacctgattctttgcggcgtcaccaatcaaccgttcgctatcagtgaaggcgacgtaagacggtgtggttctgttaccttgatcattagcaatgatctcaacacggtcgtgttgccaaactccaacgcaagagtaagtggtaccgagatcgataccaatcgctggaccttctcctttaccagccattgttaacgctactcaggattaagctaaaaaatcgaaagaaagattgtgaaagaggaattgtgaattgcggctaggtttgttttcttttttccaaaatatcaggtcgaaggagaagtctatatagagtcttgtactcgagtttcgagaaggttcgatggctcgctatgtaaccgcacgatcttttggagttggatctgacggtccaggaatgattcttttctcctacttttccttttcctttaacaaataaggaaagccgtttaaaaaggttcgagaatgttcggttcgatggcttagtccataatcaaaagtcggtcattggctcaacattttcttgcgttctcattggctttgagtcggtccaccgttcaccgtcagtgactcattgatagcttttttccttttcgtttttctgttttttttcccaaaactagctgtaggcccaatgggcttatcttggagaaaatttgaaaaacaagaaaaagttaatgtgtttatttattgtatgctgcataggtttttgccttttacacaaatgataattcagggcagttgttgacatggtccatgagtttgaatagtttgagttgctcgagctatattcacaataagcccaaagaattgtacacacaattgaaagagattgacgagagagtaaagagttttgggtttcctcttttgatagctaaaataagccccaaacaatacgtggaagaagcatgcaaagtggacggtatacgtaacgtaactatgtaataactttaacattctcaaagaaaataatttataaatgcaatgaaataaccaatatagaaactcaaccaaaaaaaaagggaactcattttcagattaaaatttctattgaaaaaaaaacgaatttttgtggcacagaaatttgtagccacaaattggaaataaaataggtgtacaagtaccaagtatatgatagagtaggaccaaattgattatgccatggaaattacctggtgaagaggaaacaatactaaccatgaagcgtgcagcttgtgattaatgctctcgatctctacttgaactcgaactgttgatgagactaatgtctttcatatcacttcttcttcttctcttttgtcttattcctatatttaatcttacccttttttcggtctaccacattttaaatcgagaaatgaaaggtcgattacgtggagaaattataacattttaaactctcgagaaacttgtagaaaatactgttttatcaattagtatttgaaaccattatgttttagttttagagtatgaaaccagctggttttgactcgtttccaacctatacgtgcctcaattttagagatgtcccatttggtttaatctgaccaagctgtatccaaaaagtgattcaagttttatttcggtttatcaccagttacattttcttcgatatatacgaaaagtatcggaaaataagaagacacaatcaaacttgaaattggtaccaaaactagaacagtgtaagtcaaaccgaaaccggatatatgggcatggcctaaaccaaactaaaccgtaatccattcggttaaaattagtttcccttccaactatttgtatatggcatggcctaatttaacccaaactatttgaaatatcagtgtctcttccctcctttgatgtatgaggcactgcctaaaccgaaactaaccagatgcagtacagagactggtttggtttggtaactacacaatatagaaaatgaaagtacttggagttaaaagacagctgctcaaaagtcttaactctttgacgttgccactttaaatcccatcacaccttatatatacgtagtcttcttgctcaccataaccttcatctcatcatctttatctaacaagtattcctacatacaaatccactaaaacaacaatccgttaaaagaatgcgcgacacaacatggctcgagcgacttggcctggctctgcgaaccgccatggcttgtctcatcgtgagcttaaccactttgtacggtcccaaaccactaagacacttcacaacgtttccagccttttcttacctgaccacaatcttgatctggctctccgatgctgaaccaacatacggcgaagttctcaagtgctgtcttgatgtctcttacgccacttttcagacaatagccattgcgctagtgagtgtcttggtggttggaccagcttcactagggaatggcttggtggctccagttgctgtggctctagcttcattcatagtggctttccccgtgtccacgagtctgctgactaaacggattgcctttgggcagattgttgtagtctacgtgacttttgtggtgttcaatggagaggtggctcatgtattcatgctcccggttcatgtggcaggcagtacagcacttggagccattgcttcactcatcgcagtgcttctcccgtttccaaggctggctcatagtcaggtgagtcttgagttttttttttgtttttccacgacgatgagatggtcacaaaatacttaccttgggttttaaatggtttgcagatgagtaagggttgcaaattatatgctgaaaatgctcttgagaggttgaatatgtttgtggagatcatgatggcacgagacaacaccacagctcaggttttgatcgcacgggctgcttcattgtctgcagcagctaaaaacacactcaagaacatcaaaatccaccatgtaagccaactgtctaaacaaaattaagcataatcactgaaatatcatctgttatataactgtaactcttttgttttgacccgtcttgtgggactaattatctgtttctgactaatcaattctttggcaacaggagcgtatatcatgggagagaccagatacaagattcttgagcaggaagcagaagttggatcctgcagagaaactgcatgcaacagattttctgttgaggggattggagctggctttgggctcttgcagttcctttcctcaaggcatgagccgcgacgaactgactcgtcttttagaaggtcccaggacacatattgctccacggtcagaatctactctcaagtcccaagatagtctagggtggcatcatgaggctgagtctctgtctactgcagctttaccggtttgcttcttccggtactgcgtagaactcttcagaggtgatttcttatctttgagacaagacagtaaatccgtaaatggaaggaccacggaggaagaaattcatccagcaaacgaagggttgtccatggccagaaagttttgggacattctctgtgtctggatggccagagaaaggtttgtttttgcattcaagtgctcaatttctcttggccttgcggtgctgtttggtatactgtataataaaaataacgggtattggtcgggtctaactgtagccattagccttgtaagcggtaggcaagcaacactaacagtagcaaattctcgtctacaagggacagccatgggatcagtctacggtctaatatgttgttctgttttccaaagactagaagaattcaggttcttacctcttctcccttggataatcctcgccgtcttcatgaggcacagcaaagtctatggccagcctggaggagttacggctgcaattgctgcactgttgatacttgggaggagaaattatggagctccaactgaatttgcaatcgctcgcatcgttgaagcttcgatcgggttgctctgttttgtcttcggggagattcttgtcacccctgcgagagcagcaacgcttgcaagaaccgaaatttcacactgtctcgatgccctcttagattgcatccaatcactcgttctttgttctgagcagaagaaccagaaagtggttgcagatttgagaaaaagtcaggtaaaactcaaatctcatgttgaagcattagagaggtttgcagcagaagccttaacagagcctaagattccgttcctccgccggctcaacacggacagttacaacaggcttttgggctctttctcgaagatatctgatctttgtctctatgtttgtgatggcctcaaaaatctatctggagttcaaccaacacttgcatttccttgggacaacatcactcatgagcttagagccttccaagaaaagcttcacccttcggtgaaatgcttaaaagagatttctcaaaccaagtctcaagcaagactccaaaaggagttgcagaagagaaagatctgccatgatgttgaagcaggaacaacatcaaacgacaactactcatacatggagctgggtccaagccaggctgatgtggagaggttttcggtttctttcgtcatgctactgaaggaagcaacagacaagataagttgtaacacagcagacgatgcgttcaagagtgaaactgccctatgtctgagcagtctagggttctgcattagcagattaatgcaggaaacaatatgtattatgacagaaataacccatacaacttgattttggaagaattc

SEQ ID NO: 1283 - DNA, 72902 bp, Arabidopsis thaliana
aatgcaaagatacttcccattctttcaatctttcttcttcgtccatatgagacatatcatttctttgtttatgtttcttcgttaattacgatgatggtaattaatcatagagatgatcagatgaatatttccaatatataatactatgtttaaaaataacctttatatgttggtcaacaactctatatcatggatctactatactgcgcatattttttggtgccgaaaaataatgatttaactctttggattaacttccgggaactggtgcacttagccacttaccatttttttttttgtcgaagttgagtatttctaggattggaatttcgactgttgacattaaactatttatcatatacattgagttactacataaacctttttaccgaaaattaaaatccactcctaagaatcaatgtacacttgattacttgaatgacccaaatgaacgaaactttctattaatgtcaaaaagatgatctgttttgacataaacaaataattgccagagaaagaagtgatctagtctagattgctgtctggaaattctttggtgttgtattgtaccaacagaactctgtacataatattgtcgaaactcgtaattatggaaatctcgtgtcgaattattttgtcacatatttaatatataatgtacacacattccttcagctgaactactagattctgcgtcaacaaccatattttaactgaaataaataacataatccagcaaaattgtccaactttcacgttacatacatttaaccaaaacaatttcaatatttattttttataaaaatcatagaaaatgatgttcttaattttgtcaagttggatgtcgcaattttttcgggttacatcagaataccattgtcctagaaaaagttactagtttagtcgaaaaaaacttgatggtttatcaacaaatcgagtcgaattttggttatccgcttacttaggcttgggaatttgttcatatacaaaatccgattcacgtgaaccaaccgaagtaaacagctgtcattgttttatactaaaaattaagtaagcatgtgtttgcacattctgacaactccttttcttatctgtccttttttgcctttttattgggcccattttttgttttttctaatagtattgcggaaaaataatttcgattaaaaatggattatagcatgttttgtttgggcttttttgaacaacccaaaagatttcgagctacattacaccactagaccgcttccaaaatctgggcttactctttcagaggcccatttattttctttgtaagaaaagtaaattcaatttagtgctaaaccttactacatttattttgaaatcaaaattgactttggtacaatagtagatgagaaaaacttaactagacaaattatcggtgtcacggataatcttcttggaaggaagaacaattgctgccactggtttatccgggaatccaccgccttcatcgatgatcaatctcataccatcgatgtgaagttttccatggtgcccgctaacaacaacagtatgtttatcatccagctcctgaagaatgtttcagagaaagagatttcaaaaactaaggaagatcttaacacaaagtttgattctttcgatgccttacctgtgggatgtcccaaacgtttttcctaccacttagatgttgtatttttgagatgctagtgtctttagctctcaaaagcttcagttgttcttctacgttattccctttctctaaaccagcatgtacggcgatcaacttacaatgcttaagcccttcctctgtttctatacaaacatcgtcctgcaacagaataaccaagtggacttatgatagctcctttgttggaattagcatggatgttaccatctaaggggttgcaagagattaatccgtaagtctaaagttcgagttttgtaaccactaaactactattcctacaaacatcacagggtagcacggtaggagaaaagagcccgtacctcttcatgaacccataccatattggtcaagaacttcttgtgactctcaggtactgccttcatcaaatctatcaacggaatagataacaaacaagtattaaaatgtcatcatttcatcagcacaaagatgagactcatgagaacatgtaaactccaaatcgagaaagattcaaactttagccaaccacgtagctctatattgaaatgtgaacagatccaatcgttgcatgaccaccaaattcacaagaatgacttgtacgagagaatagaagtgtgtacagattcaatcgcagcttaaataaccaaatttcacaaacaacttcaaccagcttacaagtttccaccaaatgtaataacaaattaaaacctatgaagaacccaaaacacaatgattgagaaatttaccagaagatccatgtggaacgccataagattcaaaagtcgatccagcatcgtaaatcgatcctttataagccatccctttcacagaattgaacgtagccttaattttaccagcccatcttctaccttgaagatgcatatcttcgaacccttcacctgtataccatccttctgtctcctcactttttgagtactccttccacgtatccttcaaatcagatccatctgaaggacgaggcaacaaacctaagaacccagagaaggcaaagtcatggttcccggcgagaaagacatgagtttgatcgggatgtttctccggcagagagattaagaaatcgatgacttttcgagtctccggtccacgatcgcagtaatcgccaaggaatatgacgagagctgagctgaaatctgatgggtcgatggcagattggagattaagccagaggttattgagctttgatatgtatccatggatgtctccgacgcagatcaccgttcgtggtttttgcgccattagtctctctctgtttcttgaaatgatgataatgtacttgtgggcttcatgggcctttggctatatatattatttcgaaataataacatgtttttttggtcgtctagtttttcttagcttcttcttatctcctttctaagttggtggttcataagctaacaacatgcaaaagaatttacaagtttcaaaattttttttcataacagtgttaagtagttataccattttctaattttggaaaaaaattatcaagttatacaagtagcggaaaagaccgaaacactaattaaaaagtaacaacagaacaatcacaaaaaactactagaagtttcaattttaatatgaagacatgatatacttaattggaaaaattatcggtgtcgcggataatcttcttagaaggaagaacaattgcagccaaaggtgtatcggtatatccaccaccttcatcgatgatcaatctcaagccatcgatgtgaagtttcccatggtggccgctaacaacaatagtctttttatcatccagttcctacagagtatgttccagagcaaacaaagtcatacaaagagatttcaaaagagagcaagatcttaatacaaagtttggttctttcaatgttttttttacctgtgggatcccccaaacggttttccgaccagttagaggttgtattcttgggatgcttgtgtctttatctctcaatagtttaagctgttcttctacgttattctttgtctctagaccagcatgtacggcaatcaacttacaatgcgtaaggccttcctctgtttctatacaaacatcatcctacaatagtatcaacaatatgataactattactacatgtacattttcctacaaatttagcttatgctttcttagacaaaaagtatttgctttataacaactcaacatttgttcctaagaaacgtcacatggtaggagaaaagcccttacctctttatgtacccaaaccatattggtcaagaatttcttgtgactctcaggtactgcctttatcaaatctatcaaggaaaagaaaacaaacaagtttcaaaaccaataccaatagattcaaaacagttataaaatttcataatttcactagtacagagatgagaacatgaaaactccaaatcgagaaagattcaattatatttttggttaaccaaagatccaatcattacttatttgactgatcaccaattacatgatcgatcacttgacctatatttacagtttccgacaaagacaaacgtctaatcataaactataaccagaaagaagaatcaatggagaatgtcaccagaagatccatgaggaacgccataagattcaaaagtagacgccgcatcgtatattgatccattatacaacactccatatgcggaataatcgaactgaaccctaatctttcccgcccatctcctgctttggagatgcatattctcaaacccttcacctttataccatccttctctctcctcactttttgagtactctttccacgtttccttaaactcagacccatctgaagggcgaggtaacaaacccaagaagccagcaaaagcaaagtcgtggtttccggcaagaaagacatgggtctgatcgggatgtttctccggcaaagagatcaagaagtcgatgacttttcgagtctccggtccacgatcgcagtagtcgccgaggaagatgacgagagctgagctgaaatctgagttttggatatcggattgaagattaagccagagtttattgagctttgatatgtttccatggatgtctccgacgcagatcacagttcgtggtttttgggtcatcattagtcttgtttcttgcaatgcaatcaataattctaagcattatttgattcgatgatgtttgatagttttgtcaacaaaagtcaactgtttcaatggttatgattacataaggtacttcatcgcaaccgtcgaaatcttcgcgtgtaaacatttcagatcgtacggtcaaattcctatgtactcaatgacttttcttcattatttcataagaaaaaaaagactaattattattcacattactattacagcatcatacaattcttcaattctctcaatcgctcttcttgattctctcgtgtaattattattctgtaattgctctttttgacataaacatgttttggatattgttgtgttgtgtggagtataaaacggattaattttcttatagcggaaaaaactgggatgatgatattagctggctttttaactgtaataagatatcaattaatttgtactttcgtagtgcatgtggtaattaacataaagttttaggaggaatcaattaatccatggcaacatgtggtaattaaaccaactccattttaaaaattcttataaactacaatttatataagtcaatttcctgacaccggaagtatttttaaatattttatctcaaatttttattacttatttcgatggtggttcaaagaatatatacttgcccagagcatagcatgtggaaaacattggactgacttttgaggcataacttttttttttaaaacgccaacagaaatttttcttcatgatatattgatatgcttactagtttcttcacgtccctaattcattaattctcttacgttttctggtttgtgtaaataatatacattctttttctttgggcaaaaatataatattcattcttaaacggaaagtaacatggtataattgaatgagacggtgacgtatatacagccagactgcagtaataatattcgtgaatcgtgattataaattcataattacgtacatctccttcttaattaacttactcacgcaattccattcatggctaaaataatgtgctcttcaccaaacgttactaacttaccaattttatacacacatcatcttttcttttgataaaagctcttcccctttgtggtattgttcttaattacgataaatatcttcaatgattaaaacccaattcattccccttgttgcttctttaatcgaactcatgaggtggcttatataaatggtataattaatgtggattaaaattgtaccctttaattcatgtaatgtgtcatttccgtttcttcacgtaatctcaccgtaatctctatatataagcacacaagcaacacaatcgatcataaaccaaaaaaaacgagagagagagatggggaaggggggttggcttcttaactttctgaaccatgccaaaaatcaagaaagtgtggagaatcttgacaaaaacggtgccgtaaaggccccaagcagtgggtttaagatgccgttgcattacccaagatacacaaaggaggattatgaagagatggaagagtggagattggatttgcttctctcggaatacggacttcttgccttccatgacaatactctccatgagaagcgagcttttgcaatcgacacttttatatggcctcatcacccataatttcatctccttcatttatcttgtttatatttcttaagagtaacggagattgtagagatacaacattggaagagatgacaaaaaccgggatatcaatctaccggatatatatgtcacaaaaagattttagtatatttttagtaatttgatttctactatattctttagttttcattagatctctttatgttatgttatctatataagtttggctttggattttgcatatattaacctttccgttcaataaaatatagttttaccgcttcttatggtatcaaagccttcatccaaaacttactcaaatgagattgactctcatgttaaaacagagaaaaacagagaaaaaacaaaagatcattaaagtcactatataaacatcatgattcatctccatctccacccttaatttctttactagtccgttcgttctcgccactattgttgtccgtgattgtacttcttcataagcatcactgaggaagcaaattctaaaacaatagtatcttttaacaatcataaagtaaaacagtttttttttttttgttcttatatatatactacttattacacatttaaactttggttttgaacagtgaaaatgttgcttgcaatttttttaactttgtagaaatcaggcaagttcttaagttgacaaatgacatatactagtaattttcacgaacgttatcccactaaagtagtcatacccaaaacaaaattgtttaaataaaagtaacttaattatatcattgagattcgagtgaataatgccaatgaaatttaatattcattatctgacactctgaaactatgattaactacataattatttaatttaacgtttgtaccagctaatagtatacacgtttttatgacaaacatttttgaattttttgagttaaaaaataataatggttttcgtcgtaataggagaggacagacaattccaacgtgatatgtacgtttatcatgttacttagtcagcagatcatttcttcggattatataatagctatttagaaacattaaaggtgtggattatattatagtcaagtctttccaatatgaatattatatcatccaccaatacataattattgtcaaatacaagttgagtcagattagtcaaatacaggcaaccaagactcgagatcctcatcgtctctccactttatataaaccccaagtcagtacttctcataatataccaaaaacgaaactgagaaagaagttttatttattaattaatggcggaagagaaaagctacaagtacgtgatcattggaggtggtgtagccggcgtaagtaaatgcattttcaattttgaacttttcttttgacaacaacatatcttttatcaagtttaaattcgattgtaacacaacaacaacaacaacaataacactaatacaaaccagtaaattacatgttttgcccaacatttttatcaactcgcattgttcagttttgtagatgatgagactttttttgttgactctgttttttttttgtttttttttttggcttaagaatcattgttcagtttgtgttcattctttgcttacaaatcatcgcttatttcgcatccgtgctttgcttacgaattcctttctctaactctctgttattttactctcacttttacatgtaaatccctttatgcttattaagttattatacacaagaaattgtttatgattttcttctattaaatgttattcatgtaacgaatacgcatctctctgaattgacttttttttttttttttttttgggcatttcggaatcacagggttacgcggcgagagagtttagtaatcagggcctgaagcctggtgaactcgcaatcatttccaaggaaccagtacgttttttcactcttatgacttatgagcgtttgcatgttacaatttggtgttttgcttttccaaataataataccactactttttttgtttgcaaacgtcaattgaaaacacaaatacaagcgcaaactctggttgcatttgcatttgcgtctcaagtttatgaaaactatttttagaaagtcgaaataattaaagccatccttaatatttgattgtctagtctgaaaattgatgttgaagtccataaccatgttttttttgtgtgtgtgtcaataggtgcctccttttgagcgtcctgaactaaccaaggtatatattgacctcgaaggtaaaccttttaactctaaaacatctctgtcaatggatatattttaattgctatcggattttggttaactttgatcatcattacagtcaatccgacccttgcaaatatctatgtttgtgctggaactggagaagcgaagcagtaccctaactggtacaaagagaaaggtaatgttttgtttatgtcttctccgagaaatctctgtgatttcacttgcaatatatttggtgatctgagatattcaaattttacagggattgatctaattgtgggcacagagatagtcaaagcagatcttgcttcaaagacacttgttagtgatgatggcaaaatttacaagtaccaaactttgctaattgcaaccggttctactgtgagtaaaatacttatgatctcttcctctctctttctgttctttgttcttagttcatctcgagaaactctaatattttttgcagaacataagattgtcagaaattggcgtccaagaagcagatgttaagaatatattctacctaagagaaatcgaggatagtgatgagcttgccttggctatggaactatatgtgcaaaggggaaaggccgtcatcattggcggcggtttcttagggcttgagataagttctgctctaagggctaataatcatgaagtgaccatggtttttccagaaccttggcttggtaagttgatacttaacaaaaaacattttagctaaataattacactgtattcgtaacagattttcctctgttttatcgttgtatagtacaccggtttttcaccgctgagatagcttcattctatgagagttactatgccaacaagggaatcaaaatcatcaagggaactgtagcaactggatttagcaccaactcagatggagaggtcactgaggtgaaactagaggatggaagaaccctagaagctaacatagttgtcgctggtgtcggtgctagaccggccacctcactcttcaaaggccaacttgaagaggagaagggtggaataaaggtttatgatttaccctaccggcgaaaaacagagctcttgtcaattaccataattagtgattaatgattattcgttttgattgtagactgatgggttcttcaaaacaagtgtgcctgatgtatacgcacttggagatgtagccacattcccaatgaaaatgtatggcgggacgaggcgtgttgaacacgccgacaatgctcgcaaatctgctgcacaagcagtcaaagtacgagcatttactagcttgattctatagtcgaatataccaaactcttctatatatactaatgatggtgttttgcaggcaatcaaagcgggtgaagaagggaaaacgatcccagattacgattatcttccctatttctactctcgatttttcaaactatcgtgggaattctatggggaaaacgttggagaatctgtactgtttggagataatgacccgaaatctccaaagccaaagtttgggacgtattgggttaaagatgggaaagtagtaggagtgttcctagaaggaggtactcaagaggaacacaaggctattgctaaagtggcacgagcacaaccttccgttgagagtcttgacgtgttatccgaggaaggcctttctttcgccaccaagttctatagcacctctctttgagacattgggtcttgtttagtcacattgatgtaataatctcctttgtctttgatttcatatcgagcccctattgtatttcgaaaaataaattaaatataataatgcattttgtttggattatcaaaacattggattttaagttctttcattcgtcatgatagacattcagttttggatgcacatgaacacatggcattggtcatgcttttgatgacactttgagtcagaccaaaattgtcacattttaaaaaaaaagtcaaaacacaactgaaactttaaattttttgagaatcaactatcaattacacacataattcaacgtcaatttaattcataagtaatataacacatgtactaccaaatcacacccaatattcgctaacttttttttttaacaacagaatcgtgcttctcacgagatgccttctcgaattatcccatgtcacggaagttgatatcatctcaatcttcgaaaccctaatctcctgctttatcaaaacccaggaaatgcttatctctctccaagccccaccaatctcaaaccctcggcaagatctccactttcaacccttcctctgcccacaccctagccacgtagatattcgtcactgtcgggtaaaaaatcgccaacgcttcgatcgtctcctctgtcgtatgacgatttcattatctgtttatgcatcgatgggtagtttagctcatcggtccctagcgccgccttagaaactcatgctgatgtcgtagtagatgagactcgggtgaatcgctctactagggtttatttgacccgactcggaaaccctagctttgcttctcgacccctttgattcctttttgaatattttttgattaaagtttttggttgtgtaaaagagagataaaatttggaacttggtgttggttttggacatagaacatcaagtggggtttgttgatttcgttgcaagacttataaaaagtggaacttggtgttgttttctatgttgcatcaattctaattgagaacaccgactaattctctgagtttattagccatctaggtctcaagctatcaattcaaaaacagcttgattcaacaagatcaaccgaaggtagtaagatttcatatttttataatcattgcttttttttttaatctatgaattcgacgatcccttataatacccaccagtttctggtgttgacattcgaaccagtgagcttgacttgtgaaactctctttactacaaagacaagccgagacaactgagtaaagatataaaaaacaaaaaagaagaacatataattagtcttactcttaaatccaaatagctttgagatgtttgtgtagaactgagtaaacagatctccatccttcttcactcggatgaaagatgtcccaaaagaaggcagcctttggatcttcacaaattatgtacttcttctcacccttctcatccacatttgagcagtcgtaactgctgttgaccccgacacaacacggttttaacgggttcccaaacctcgaaacacctgagggattcacaaaagatatatatatatatataaggatcataaaagaaaaatgaacattttagctaggatccaaaatttaaacttttctttttgggtttaccaggttccggtcctttgttcttgaaaacagtcaagaacgcgttgtagtggtcaagaacgacgaaagtggatggctttgtctcattattaagcctagcgatggctttatgcaacaaatagttgtgaagattcgttgatgcgttatctgtggcgttgcaacgttggaatgaattaaagactgtgatgctagggaggcatccgagtggctgcattgaaggaattactattttatttactcccaacttgtggatgcgcatggcgttaaccgcaatttgatcaacaacttgcttcatgaatgccggtaactcctgcaagatacaatttcgggcttaagtatacaaaatgtaagtacgtgcacacaaaatctgatatttttacttacggtcagtgggcgttttagggccaagaaagtggcgtagtcgttgccggcgacgctgaccagagcgagggaggaggggagatcggaaggcgagtagatattgccggcggcgaggacacgttggaaataatcaatctgagttgtcatgtttggcaatggattatctttagtcttaaacactcctgttcctccatacgcataattcattccgtacaatagccgttcctttccggcataatccttccacgtgtacggaattggtgactttatccccaagtatcttgctgcacacatgcattaaaaattgaatcaaaactttataaatggttcaaaagtaataatcgtagtatgtaaataaaccgtgtagatcatagattaagcagcaggactatcccacactatttgcaatcagccgtttgtattcggagaggctagtttaattaatttcttgtttttttttttggttcgattctaaagatttaatgtgattcaaaaatgaaattcaaaacataactcacaattttcaaaaaaagttgagcagttactaatctttttattttgtacaaacagcttgaatagtttactaatctaacgacaaaatcagacctataaaggtttctaatatttccacgtcagcatgatggtagctagtaacatacccatacgttttcctttttcgataattaacacattaatctacgtaacctacggtttgttagtgttggtgttgaatctggtggccggatcacatcaccatatcctcatttattgtcacaaaaaaaaaaagtgtgttagagagaaaacctagaaaatcggtggcgacgcggccatcggagaaacgaccggaaggtttttgggggaaagtgatgccgtaaggaattttccaagaatcggagagagatttccttatgtttccggtgtctgcataggaatctccaaacacgaacagtctattcggtctcagtctcttcaagttactatgctgaggataatccgattcagcaccttcaaaatattaatcattagtagtgggtttcagagaacccatttatgtgattaagagctttttagatgagtatgagtataattacctaagaagaaagatgagaatgagaagagaaagagtgagattaatagttttggtaactccattgttgttggtgtattgatgtatcagattcagaccaaaaggcttgtgtgtgttttgtgtgtgtgtgtgtttgtattgttgtgttaaagtacgaaacgtggagcgaaaagaggaggaagaataagtatatatgtggtggggataagtttaaggagagacctttgtgaactttatatttttatcttctatacattgtctatttgactttgtaaggacaattaccaaaagagatttaaaaaggacacaacaacgaagatttggtcaactttaggttcataatcataatgccaccaacaaaaattctttcacatttttgtgaaattgtgaaagccaatataaacatttcctgttttaaatttttttatgaaataaaactcataatgttaacgaaatgaattattaaatgattgagaccataaatggaccgcacgtatagtagtgcccttccacacatgtaacgtaatcttctcctcaaccaaaaagtctaaattcatattatatatacacgaagactttcttacatcaaagaagcacaatctgaaaatcatcgaatccaaaatagttgaagtcgtcatggcgcagaggatcacaacattggttctgctaatagagatattgtttctggtgagttgtgtgactcatatcactacgacagcagcgtataacaatggagataagattcacgtcgccggaaaagtaatgtgtcaagattgttctctgaactacgacgaatggatcaacggttctgaacccatcaaaggtatccattaatagttccaataatatactctctttatatatatatatatatatgtgaatttctgttaccaaaatgaaataaagagtttaattacaaatgaaaatttctctattcacgaataagtaattagtatgaaaaacatatgaattacattttataccatacaacatgtgataatcactcataactgactaggaatacaaacttcaacgtggttgtggtagacaaaactatttactgttatatcgtaaaaggctataaccaacgcaaataaaaaaggaaatggtttttctttttctatttagtttatattcgatttttctttttctattttgcaaaccgtgagaaaactctcaaacccgaatttacttaaccaaattattccactttgtatctttcaggggcagtggtatcaatcacttgtatggacgaaaggagaagagtgagctactatggcagcgatttgaccgatgagagaggccagttcgatctaatggtcaacaaagtcctctcccacggcaaggttctcaagcctcaactttgtaatgtccggctcgtgtcttctccggacctgtcatgtaacattcccaccaattttgggaacggtcaaaccggagtgaagctagttcgaccattcacagttttcagggatctggttaagtatgtggttggaccattttattataccacgccaatgtgtgagacgcctaaatttgaaaacaactactaaactcggaggagtttgacttattggccaaggtcattttgatttattagtggcccttcgttaaacaatactatattactctatttatgtgtattgtgacatggtctgcttccgtaatcttgttaatttcttgtatatgtcaaagtataactaaaacaataacacataaacttcaattacaataaatattcccttgtgatattactcttccaattaagtgagtttcttctagtaaaatgatcattttaaaagtaccaaaagtaataaatagcagaaaactgttgttgcataaatgtgttctaaaggcgatgattttatatttggtctaaaaacataaataaagaggaattcactataaagagaatcggaagcaaatttacatgcactggtctgactattctccaaacttattagatactaaatgaaaaacaagaatatcaataaaactactctagttttagttctcaaatccgaatatttttttattcctcacacaaagaacacacaacgcgcgggagtgggtacaacccaaacataatgaagaaaaacaaagcatagagaagagagagagtattacaaaattaaagatacataatctgctgattccgaggggaaccgaagcttgccaaaggatagaagttgcccaatttctagagggagataaacaaaactcgcagtctgaatcagccttctgcagtcttcattgctccatatcttaaaacgctttccttacatgaacacaaaaccacttaactagagagttttcattttgtatttaggccatcccctaaaagatgaataacctctagataaattagaggttttcattcttcttcacctagctaggggatggccatttttcttttgtttttgtggtgtttgccaagttaagagagggttcaacaatggaggctctaggggggttttatagcatatttctttcttttttgcgttttattgttgttgttgtctttggtcatgaagacattaaaaagatacactgaaaccccatatatatattacataagctatattgttctttccacctttcctcatttctttttcattagaaaaaaataactaaactttttgtaacaatcaaccaatatatttcatgtttgttaaggttctttataaatgatttcttttcttttatagttaatagatcgtatatgatatttatattttggtatcataaacacgtaacatacaaaataaagatacgaaaattcaccaatgtacacgtttatcttgatattaaaattctggaaagaagaaacacaaaggaaaaagaagagagtatatattattggtgtaaaggggaataaatatatatatggtgtaaagagagtatgcaagtaatttaaaaatataaatgtttataagtggaagcagatgatggaaacaaggggagtcttacgtgaatatgcttttgagaattttggatcatccgatggaatatgccgttaccaaaattgccttttcagtttacacagacatatacacactcatctgatgacatacacagaaagttgagttgatttttaattcaatacttaattagtcaggtataatgccttgagctgtcaggaacgtacatttgttttagtaaaatacaaatgcaaattactcatgaaaaagcaaactgttttatataaataattactctgtgaaagtctttttactgaaatatacaagatttttttaattctgtgtgttatgttaataacttgacaagttcttagctctttcgttttgttataaatataacaagctctttctttatgatcaaattggaggacattcttttaggaaaaatatgggtcccaaaatatttgttcgcttgaaagtaaaatatttataaacaaataagacgcattacgtttatctttttttttttggaacgattgatcacctaatgaacaagcttagtgttcttataattaaagatacctctcgtgtctatatataaaaacacttcaagtatatagacacgaaagtgtgatgtattcatatactcatgtaaaatttaagaaatctaaatggttttctcctactgattcagtatatagacacgaaagtgtgatgtatccgtatacggatgtaaaactaagaaatctaatggtgttctcttactgcttcaattcaattgttttatttggttgtcttaatggtgctcctagactggatccacctagtttgataaccaaaaaaaagaaatggatttagttagtgtgatgggctcctgctacaatcaaatattagccccaattatcaaattctaaaaaaaaaaaaatgggttaacaaatgtctctacatatatatatatatatatttgtctaaggctagcaaccggattacctatatctgtgtcaaacactctcattcttggaatcccaatcttgagtgccatctatgagatgaagctgtgaggagaaaaaaaagtaatgttacagtttaattacgctgaccaaattggttagttaaaccggaacctagtggggaaaagaaaccggttttgattgcaagccttcgttatttgatgatatttggaacaattggattggtttacaatatttgaaaacgctaatagctgggctttaaaattactcaattgtctaattgggtttatgaagcccaaattgatcagtaaatataatctagtctagacgttacttttaatacacggattctggattcgtttatcctggatatgtttggtgataacagaaattgaaagtgacaggagaagacatgcatgatcaaaagttttgtacgatgttttcaaatcaaaagtatgatgttctgtcaatctgtctctccaatactactcttttgtcctccaatcactacacagcttaatgggtttgctatttatttattttaactatatttttcttttgcaccaaaaaaactgtatttttcttttccatgttaagattcaaaaagcctttttcaaaaaaaaaaaaaaccgttaccaagattcaactatttaacttttttttttgttctcaatatcttaatatgtagatttaaatggtgacataacgacaatatttaacataagtaactgcaccagaaattctgatcatatatttaaaaccattaaataccatttttcaatgccatttcatcaaatacagttttttaaaaaaattaaggctatttttcagtcaaattagaatcattgacttttgtcattttaaaaaacgtttgcacttactcactagaattgcaacgtttataatttttgatattttttcttacttcaaaatattctataaaactaattaggggatttcacatcttgtgcatgctaatatatatttgcaataaaactttactatctttgtggtaattttcgaagtacaatttagagtttatggtattatcattttttaaagttaatttgaccatatgaaaaacttttagaacttttatatatgtggcataagaaatgtttttgtttttcatctgagatactcattagggtaaaatggggcatccttttaatatcatcattataacgtcatttttttttattgaataaaaattcattataatcaaaacctatatacatactgtcattgatatgatgaataaaccaagcatgcaaccactacttagaatttagaagaagacattgactaattaggattggccttaattagagatattatattaaggtccattaggacataaaagaagattatcactaagcactttggtcataatccacattaaaatctaacgctatgatattgtaatctatagttaactaagttatctaccaatatttgaatatgattagatattgatgtcttcaaaacatactttaattcccacaagagatatacagaaataatatatgtgatctatcaaaaatgaaatctatagataatatttgtgctagattccaaatccacggaaagagttcatcaaattttaaaccaataattgatactgtgtgactcgatttattatcagttgagctagatgtatgtacttttagttaaataataatatctattatatagtattgtaaaatccatggatttgtaactttcaatcggtttgcaggaaaccgtacttgtcattttcaatacttggtagggttacttatcgtataggggaacaccacatgcaattttgaccgagactaatcctgagcgtggtatatatatttatgaacaaaatataaaatactttatttgtaatactatatacgaaataaaaggaggaaattgtatttatttgctgtagcttattttaagtcaaaaaataatctcgtagtcaaaatcaaatagtcacttatcaactttgttgaacgatagttgttaatacttatcgtcgacataacccatttttctttgtcgttgcatggagaatgcaatggacgtgactagacctaacgcaaatctctaaattaaataccagtaataaaatattagcctcaacaaaggaaaaaatagtctagaattgtacgtgatgcatacaaatgtgacatcaatcatgggtccaacgaacctatattagatgaattttgtaagactaactctaaagcttggttaacagctatatgtatttattaaatatatcgatatatcaagacaaatggtgatttttatttaataattataataatttcccaagtcaaataaatgtatgaaacagtttagtcggcaactagcaagagacgaaatttccaccttttgagaagacctcccaatagtatatggaaaccttcttttttttttttttttttttttttttttttttttwagtatatggaaactttgttctctgatggtagctaagaaattaatatgttatattttacaccagactttttaatgagggtaacaaaatttaaaagctcgaacatgttatgttaaattggtcatgaatatacggtgataaactgataacaaatccttaagaaaaaaaaaacaagaaaacaaaatctgtccgtggtaaccacgtgtattgtgcactagccactttacgtgtattgagaaaatgtttttaccaaatcatctaactaattgtctttctccaatgctaggaagttgtttgttaatttaaattaaaaatagaggaaatatctttatgaatctgcagctaatatcatgaatctacaaattactatgattataacaaaactccaacttgctgtagaattggcaaacaaatagtcaaatgcagtaatttagtgtttgatatacaaattaaagaccactaattaaagggacatgtacatttgtaatagctatgataccatgaacactttaatttttaaaacaagactgttgtttcaatttcagttcatataattagtgattttatttttctctttttacatacggtggtgagatgatttatatccaagtaagagggagaatattgccctagtaccaaaacaagtatgagaaggtatggcgtactttaaaaggaatagaaatcgagatcgagactttctctttggacgttttcttgaggtatacggattgaagtatcgatttatgattggccaatacttaaaattttatctccatcggatatcattccatactatatgcttctctcgatcgttaattcgctgaatagactctccacgttaaaatacaactaaaaaaaaatgattgatgatgaagaacgttttttggtctcgcaaaattaataaattattaaagtaatgggactgggaatatatatatatatatataacaagaaagagaaaacgacaatataatggaattttcttttagtaagtggtagccaaaccccactactcggatcggtggctgtagttgtttgattttagataatatgcaaaacttaaggtacttggatagctaggtagatattgtgaaattactcagattctaaaacgaaaatatgatgatatgatcatttttcttactaatatactgtatatcattctcgattgatgtctaagtctactaataatgggaaaagataagttttgttttaaaaaaaatagaaatgagaaaataaaagttgtggctataaatgccctatattacagatttatactctattttaagacattttcataagacggtagatcgattctatttctattcttctggtttttctcgcgtctcatatgtaattcgtaagttgtacgtagcatggggatatcatacttttttctatacttttttttgtcattataaagtcctttttctattgttaattaagcttcctttttttttggttagtacgtttccctgaatacaaaaataataattaacttttttgatcactagctaatcccagcatcattataataatgcaccgaaaaagatatgtaaaagtgtttaatcatatagcacatcacaatgactacatatcattagaacattccttcgttaacagtattgaatatttatactactttctaatgaatacgattaaattaattccctcataattaatactactttatagctaacccccagatctcgttattcaattaagagtaaggcatgtaatgccgatttagactgatttcaaaagattttctcgaacaataaaaatatgtaatcaacttcttttctttttctttcaaactcaaatttgttgggtcaacttgtagtatattcaaactcaaattggtgagcagaagttgacttaaaaatattgggaagcacgtggattagtgtaagaaaaacacaatgtaatgtttcccttcaccggccaagcaggtcaacatctctaccttctaaacacacatcaattttttgttgaatattatatttcatcgattaaacaactaaacttatatttgaaaaaatatctcaaaccactcggataatagaaagatcagagtattgataattattaaatctttgattatttcaccagctacaaaacttttctaaatagatatgtatataaacaaaaccactcttgtaagagtaataagtggggttagatcagaaaatacccaaaataaaagaataaaagaggcattaattaatgcaaaggttatatccgtcattttggtgtaaagtaaaaagcttgaatttttatggaagctgaaataagaaggctgttattgtggcgcttagctttcgggatttggtccagtcgtctcttttagaaagatttgaccaacactgaggctgaagaagacgaagaaagaagaagaaagtgaagagctttgagcttgtccgtacggtttgtgaatctcctttacttccccagtttccttatttagtgagcttgatttggtttttggatccggtttcattctcgaattcgggcatttctctgtttttggttctctttggattgaagaagtctttaaccgggatcttcggtttttgttgctttcgttttatctttgttgaagattgaagattgaaatggagttgcttgttgattgtgttaatcaaagtttttaacttttgtttccatcgacacgactctgatatgtacttatatagagctctgatggggtttcattatgaatttcaaattcagattgaaacattgaaactttgttatgaacattttttgtttttcatttgctcaattcctaaaaagtaggattctttctagctttttggtttggtaaatttggcatactctgcctttatttgggagacgtggaggaatctcttctttttaaatgtgaattcaatataaaagtttagatttttttttatataaaggctttatgattgtagactcgtcttcttccataaaaggctttctttttgataggaaaaagggatttttgtttgctcctctctcattctctgcctctctctgtgaaatttagaagttcttgttctttcaagtgggaccaagaatcagatgcgtgtcttaattttcttgtttgatagagatttgagcaagtctttgcttttgtgaccatttatctattttcatgttttcctcattagttttagattattgcatgcatcaaaagttagttactcttttttattctttctgattctgattctagattcatacatcgtgacttggaacctgattcttgcatctgctttcttcgttgaatagctgagcacattctgtttcaccagtttactggaggtagcttcatgttttgttgaaagaatgttctccttaaggctgtgaagccttttgctctgcggtttgtctgagcgtttctgctttagcttctttggagatttacatgtctggccttgacgtacgaggagcagtttcttttgctgaaagaactaaatctgttgatgcacttactaagaaagagatcctatcggcgctaaacagtggagaagtttccgaaacttctgaggatgctaggttcagagttagggagctggttctccccgatggcgaatcctacagtggttctttgcttggaaatgtacccgagggaccagggaagtacatatggtcagatgggtgtgtttacgatggagaatggaggcgtgggatgagacatggaattggaaatatgagatgggcttccggggcatcttatgatggtgaattttcaggcggttatatgcacggttcagggacctatgtggatgctaacaagttaacgtataaaggaagatggcggcttaatttgaaacatgggctcggatatcaggtttaccctaatggagatgtctttgaaggttcttggattcagggattgggagaaggaccagggaagtatacttgggctaataaaaatgtctatctcggggatatgaaaggcgggaaaatgtcaggaaagggtacacttacttgggttaccggagattcctatgaaggaagttggttgaatggaatgatgcatggtgttggtgtatatacgtggagcgatggaggttgctatgttgggacatggacacggggtttgaaagacggtaaaggctcgttttattcagcgggaaccagagttccggtagtgcaagagttttatttaaatgctcttagaaagagaggtgttttgccagatatgagaagacagaaccaagttgcttcctcggttaatatggaaaaccttagagttggtgtgaaccgtaataagctctcaaaagggagcttaataaacttagaacagtcccgcaatggaagggtttctttagaaagacgttggagtcttgaagtatctattgagaaagtgattggacatggttactcggatttatctacggcagttttagatagcggaagtagtgtgcagtataaagctaacataccaatcttggagagggaatatatgcaaggtgttctgatcagtgagcttgtggtaaacaacgggttttcgcgcacatccagaagagcaaaaaggaaacacaaaagacttgttaaagaagctaagaagcctggagaagttgttattaaaggtcaccggagttatgatctgatgctcagtttgcagcttggaatcaggtatgcttgctccttctaaacctgtgccctgtgagcgtgtttagctctaaattcatcaccgaatattgttgttactgaactagttcaaacgttagatacacagtggggaaaattacgccaatacaaagacgacaagttcggacagcagactttggacctcgggctagtttttggatgacttttcctcgagctggctccacgatgactcctccgcaccactcggaggattttaaatggaaggactattgcccaatggtattcaggttagaacttgtgtactgcatacttttttcttagtagtatgttaactatagtagttgtgtccttggtgtttatattcattgctaaaccttgtagaaacctgagggagatgttcaagatcgatgcagctgattatatgatgtccatttgtggaaatgatactttaagagaactttcttctccagggaagagcggcagcgtcttcttcctgtcgcaggatgatcggttcatgatcaaaacactcaggaaatctgaagtcaaggtttgtgactacttacatatccaccatctctgttttcacattatcttcttagttttctccatgtctttgcgtagactctttgtccgtctgcccattgagcttccagatttactgtgtaggttcttctgaggatgcttccagattaccatcatcatgtgaagacatatgagaacaccctcattactaaattctttggccttcacagaatcaaaccatcaagtggtcaaaaggtcctgaaccaaaatacctcaagattctgattttgattttttattatcattagctttgaagttgccgacattgctgcctctaaatatgatgtagagtagaactctaacattagagcaacatttggaaatccaaatcaatcttaaaactaactatgtttgaaaatttctcttccattgcagttccgttttgtggtgatgggtaacatgttctttacagatctaagaatccatcggagatttgaccttaaaggttcgtccttgggacgctctgcagacaaagtcgagatagacgagaacacgatacttaaagatttagatctgaactacagcttcttcttggagacttcttggcgggaaggtttactgaggtattactctctccaggaccttcttgtaagatatatacatttatcaatccatattccgcagtttaaaatttcttttcttgctgtgtaaacaggcaactagagatcgatagcaagttcttggaagcacagaacataatggattacagtcttttgctcggtgtgcatcatcgagctccacagcacttaagatcccaattggtccgttctcaaagtataacaactgatgctctggaaagtgtagctgaagatggtgagattctttttttcatcacctgtaaaatgattcatactatttttcttctactgatgatgatgaaagcagatacaatcgaggacgacatgctgtcttaccacgaaggattggttctcgttcctcggggaagtgaaaatactgtaactggccctcacatcagaggcagcagattacgagcatccgctgttggtgatgaagaagtagatctccttcttcctggaacagccaggtaactaactctcacctggttggaaaaatgaaaaactaagacttaacaaatgctgatgacaaataaatggaatacatatgatccagacgacatggaactgattgaaacttagtccagttcggtttttgaaaagaatctctataaaatgcaggctgcagatacagcaaggagtgaacatgccggcaagagcagagctgataccgggaagagaagataaagagaagcagattttacatgactgctgcgacgtcgtactctaccttggcattatagacatcttacaagagtacaacatgaccaagaagattgaacatgcttataaatctcttcactttgattctctttcgatctcagccgttgatccaacattctactcccaacgttttcttgagttcatcaagaaagtatttccacagaacaacaaatcatagacagagaattgagtacagagttttatgtttttttttgtagagataaaaaagaattctatgttgtaagtatgttgtatacagatcttgagagcttcaataaataagtaaaaaactaattctccttttcttgattgcatgaagtatttggtttaattattaaaaggcaaaaatataaataatcaaaagtcacagaaaagccctaacgtgttgtcttcttcttcttcttcttttgaagagtaagaaatcaatgtcgtccctggaaaagaagaggaagaggaagactacgactaggacaaagaagaagaagctgtccccaaatcagtcaatccctatgatttgctattggacatcatcgcacgcgtcccaagattgtactatccgactctctcactcgtttccaagagctttcgatccctcctagcttcaccggagctttacaaggccagcaggtcattcttgggtcacaccgagcgttgtctctatgtgtgcttacggtgctgtcctggttatcgctggttcaccctgtgtcggaagccagatcaaaccctatccaatgacaccactgaaaagaagtcaagtgggtatgttttggcaacagtccccattcctagttttcataaaccgcgcttttcgagtctcgtggtggttggttctgatatctactacatccacgggccctcctctaacgtctcgattctggattgccggtctcacacgtggcgccaggttcaaagctcgattctagattgtcggtctcacaggcggcgcaaggctccaatcttgccggtggaacattcgtcacttactgctagcgtccttggtgaaaagatatatgtagcaggatgttacagcgatatgcatttaggttcttctttctttgaggtgttcgacacgaaaacggaagtttgggttagtgagcccatcccttacagcgacagaaaatacaactttcttcaccccaaaagcatttgtattgatggaaagatccatgtagtgactgacagtgagggggttgttgcttacaatcccaaggaaggtatatggttggatttggatcagtatatgcgttcagattcttattgtgagatagatgatattttgtactctgtttatagcagaacggttatatggtatgacactgaggcaagcaggtggagatatttggagggcttaggacaacttacgtttcctcttggtgcttctattagggcttaggaaagttagcggttttgtgggacgaggatttgctttatggtttgactagtttcgtctataagaagaagatttggtgtgcggagatttcgcttgaaagaagcaaaagttgcgaaagttttgggaagttgaatggtttgatcatgtgcttacagtgcctaaagaatgtgaattggtgaaagttcttgctgctactgtttaataattgcgtcacaaggcttgaaacgaggtctctttgtctctttattcacttgtaatcatttgatttcacttgctgattgattgttaagcttactttgttgtgaccaaaatgcttttgataactacggtcgtctctttacatatgtgtaaacaaaacaaaaaaacactttggagagtaattgatttgaatggttaattttgcaacagaaagagttttttttttttttggttatgttttaaagtgtaaaaaaagcctttgttcatgtacttgttccaaaactgatagtaacttgtaatccatacaagtgaacttgtgaacactctttataacaacttatctttcatgagagcttcactaagaaaactagttttcctttgtgtttttttgggtctgaatcgccgcaaaccgcaaaagataattgcaaacgtaacagtagtgctttgattgcatgaaatatttggttttataataaaaagctaggaaaaaataaaaaaaaatttgggagggagcaacaaacacgtggatacaaaacaagacggactttggaagaaacgttgaaacagaaacagatacgtgtcgtgaagcgaaatgtcggagaaaggagaagaagcagtaaagagttctttaatgtttttgacagtatttgttcaacaattctcattaacgtttttcattatttgttttctgctctgtaaagaataaagtttcttaatttgttgtatgaatcatagatttctctgcagaggcaaagttttctctcttcttttttcgattcattcttttacaagataacataaaaatcacttcttttgtttgtttgtttatctaagttgaatttgatttgatctctttactgtagtattagatagagtgagagattgtagaagaaaatgggatcttcttctgggcaaagtgggtatgatctatctttcaagatcttgttgattggagattctggtgttggtaaaagcagcttgcttctcagcttcatttccagctctgtcgaagatcttgctcccaccattggtaatttatcgttcgttcttaacagtcttagagctagaatcttgactggtcaaacttcaaatatctctttgtcgacatgatttttttttgcattgaaggctagcttattgtttgtgagctagaccactgtctggtcaaaattcaaatgaagttgaagtttgagaacttgaagttttctttatgattttctgtttgaaaataaactcggaaaacataactcttgatgcttatctgaatttgaagcctgcttgagtctgatcagtataacattgtaggtgttgactttaagatcaaacagatgaaagtaagagggaaaaggctgaaacttacaatctgggacacaggtaaaaaagcaataagagcaattcgagtttttggaacgtgtgtagttggttactacaaaactcatggtccatgtgatttcttgtttgtgattgttgtgtagctggacaagaaaagttcagaacattgacaagttcttatttcagaggctcccaaggaatcattctcggtaatgatatatgagatcatataattgtcagtagctgttgtcgtaataagttctcaagacttgtattaatactctctccggattttcttggtcatggtgcagtttatgatgtcacgaaaagagagacatttttgaacttggcagatatttgggctaaagagattgagctatattcgactaaccatgactgcattaagatgctcgttggcaacaaagttgatagagtgagtagcagtagtagtaacacttgtagtcaaacaacttgagatcggtttcactgatagttgtcattgcaggaatcagaaaggaaggttagccgggaagaaggaatggctctagcgaaagacctcaattgtttgtttcatgaatgtagcgcaagaacccgagaaaacgtgaacggatgcttcgaagagctagctttgaaggtaagaaagaatcttgatgatcccttttcactttcaaaaccggtcgaaactgaggaaaataaataataggagagttgcaaaatgaaacagataatggaggtacctagtcttttggaagaaggatcaagctctgtgaagagaaaaccggattaccgagctcatcaaggccggtgttgcagctcgtgagtcaccttgttaaaatcgggtcggaagtagcctcttttgtgtgtaaatttctcaagaagcttgacttctctgtaaatttatcaattccttcgatctttcttcttcttgcctcggcggagattttgtaataagtttgtaaccccagaatatatgaaaaaaaggcacttcatgttcttattatctcgtgattacttttagtctgaaattttatatctgtcacaaaacacaggaacgagataactctctaatttcgagccttgaagccgtagcttacacacataacatctgcatttcattaattcaaagtttaagcacttaaacattgtctaccattaccagtacagtgtttggccatcgagatagcaaaatacacacagctatcaattaagtctatcctcctactaataagaacataggacgatcccttgaatgatgcgaagaagattaaagacggtaagagattagaaacaggttcagagaacttctaaacataactgcagcaagctgatttctcatttgtagaagacgatgaggctttgttagcatcttgtttagtgatcttgatcccttggggctgcaaatcaacaaagacagtatttgattttcctcagcaatatttacagtttcataatccgagtatcaagcgaatagtagattccatgtgcttctttacctcggcttttgtatcgctttctgtgagtctttgttttatgtctttagcgatagaaaggaaaacctgctcgacattctggtttgtttttgcactctgcaacagtttccaatcatatttaagaaaatgaaaatcttcaaacaaacaatgaatgaggagacaaacatattatatattttcgcactcaccgtctcaaagaatttgattccatactcatcagcaagagcttgtccttttgatgttgggacagcctgtagaataagatgcagcatcagtatcctacgaaatgtaggcaaaacatggtcaggattgtgaacagagtacagagcaaaattacccttttgctttcgtccatgtcggctttgttaccgaccaatatcttgttgacactatcggacgcatgctgctcaatgtttttcatccagttcctaatgtctggagaagcaatttgtgttagttcccacacaaaggtgacttttaagttctagtaagaatatagttcctggtacaaagaaaagccagaagacctactgttgaatgatgactcatctgttacatcatagacgagtaatatacccatcgctcctctgtaatatgctgcaaagaaaaatggaccaaaagagttacaaagaaatgtcatctgaactttattaacaagaaagaaagtaaacaaatagacttagaatgatgagtaatcatctaacagaggaatcagcagattcatacacaaaacataaagagtgatcttcacttcacatagagcagagagaagttttaacctgtggttatagttctaaaacgttcttgtccagcagtgtcccatatctgcaatttgatacgcttcccatcaagttcgactgttcttatcttgaagtcgattctgaaaaacatgaaacgtacttaaaccgaacttttcaacaatctaacaagacaagatacaaagtcaaagaaagaaagacatacccaatggtagtaatgaaactcgtggtgaaagtatcatccgaaaaacgcagtaacaagcaactttttcccacacctgcgtatacacacacacacataagtacgaaatgaagagaagaaaatttaacacaaaaaaatgatgatttgtgcaactctatctgaactcattgtaaaatcaagttaataaaactgattcattagttcttcacaaaatctaagtttgagatattgcttataattgagccaaaacttccaaaagggaactacgttgatacttcaattaaaagagagtgtagctcatctactttgttgatcaaacacgaaagaaaaacaaaaaacgcaaaaaagttcaaaatcataaacctaattcagatcgcaaaacaggcaggagagaagattctcggataaaaatgcaatagtctctgaacctcgtttgttcagtacttcttaagagatagaaaggcagagacttaccgctatcaccgatgaggagaagcttgatgagataatcatagtctgaacgagctcttgccggcgcaaccgccatcggagaagatgttagtaatcactattctgtatcctctttctaaacagaaactaaaaccgagcttttgctattttcccccggaaaatctcttctcgccggagacagccaaaaagaaaggaaagaggcagaataagtgctctgcttgctatcaagttcaaagctgctcattggtggatcatattttattactttttactgttttagtcttttatttctcaagtattcacacttcaatccaccaacttattaaaccgctcaatttccttcttgttaatatagatgtttgaaatgtttaaaattgattccagttttcttacaaagaaactagtatattttgtactactcaaatctgataataatttcatgattaaaaccgacacggaagttcttaattccataggtatcaaaatttgaaaccttttgtatatgaaaccaccaaaaaacaggattaagaaaaagttaacattttgctactacttcactgagtcgccaaaactggccaatgaactctgcagatttgcagcatcactaggagatcattgagttgtttatcgcttcttcgagtatcctcttagcatcagtgtttaaatcagctaattcacctggtgtctgcattatcacaaccttgttattatcgctaaccatacttcaaaagccaaagatagaaattgctttcaaatgttttttttcaccttcccataggagttttgtgtcgttggtgaagccccggaacccagcaaaaacctaaccacgtcaacatgttcacctcttgctgcgtgatgcagaggctgtgaacaagaaaaactttgggatgaattacattatagagagcaagagctagagggaatgaggcaattgaagattgagaatacttacagtatcaccttctatatctgctgtttcaatcattctcttcacacattcaggactactagctcggctaaaaagaagctgtactatttccaagtatcctgcgagcccaagttaaagagaaagaacaataagccacagaatgtgaccatgccgtgagacagaattaccaaaagaatggtaggaccatgacaaactttacctccagcacaagcatcatgtagaggaattgcttcgtcttcatctttcacttccatatcagctcctctttctaagagcagctgcagtgaaaatcaatacaaaaattaatttacagatacattagctatcagagtcgatggaaatgacaaagaaaaagcaacctgaacacaaggtaggtgaccatatagacatgccaagtgaagtgccgagtcattatcctcgagtggctcatcgactctcccattcaaattgtctatcaaaatcagaaaaggaatatgattgcctttaaacatttcatcttctcaaaaacagcagaaagtgcacaaattaagacatatccacacaatgcaaaatctgataccattacttctaccagtagaaagatgatctagactaaactaattttcatcagttcaaaagagtatgcaaatcttacgtcagatcaatcacagccccaagcaacaaacaaaacaaagatagacatgaatacacacataggcataaaactagaggtttctcttatccttcctaagtgaacctaaactagattgagcaaaccagtgagtcaaatggaaaatgaagcccttaaggtggcttaaaaggatgagacgaagatcaaactagaggaatcttctgcaatgaatgtgggaaattttgaggcttttttggtctgaccagctaatcaagcaatacgcaattgaagatgaaattgaaattgaaatttgttaaaagcagcaacgagaagaagtaaggaaagtaccgatggcggtgcgcaaggcggcgacatctccggcctgagcagcggcggccaagtcacggaggtgagagggaagctcggaatcggtgtcgtagtcaacaccgttttcctcaaagatagcgttttctccgtcaacatcttcttcttcattcaaaccatttcctcctcttggaacagccattgtagtctctctttgtctcgctctcttttgttttttctccaccgccgtggaatgattttcttgtaacaagtaaaacaactaatcgccgccgtgcaataagctacctcaataaaatttaggttttctcgtggtgaattggcgcagttaattaactgtatataacttggtatattctctcggtctatgttttcggtccaatggctctgaaccaatttggttaataataaagaagacgatattgtgtttagtttaccttaagagttaaaatgaaaactcttcttatcttttggaaattgaggaatcaaatacattgtcctggatcagttggaagactagtttcctcctatatacaaattcaaagttttgatacaaataacacaaaaagtagggtaagaatggatcaaaacaagaaaaccaaattggattttgagatggctaataacacaagctacaaacatccatccacagtatatataattaaaattttacaaaattttaaagtgcctttccacgaacaaaattagacagaagatcacaaacacatttcttagtactaaagacatattctctgatagtaatggctcacttctctctctctacttctctgagcaatcagattttgaacccatgattctcaaaacaacaaacaaatccaagtttgataagaaaattaatatagtaactcatttgataaaatgagaacaaacaaaaaaaaaagtgaaagaattataccctttttgatcgatctaggaagtgatcatatgatcttcttctcctcctcctccatctcgctccgccgctgcttctgctaatctcttccatgtatattgccgttgttcttctacttctttggatttcgcttgtttctcttcatactgtctctgacattcttcaaacagttcaggatccatttccatgaacattttcttgatatttgtggttagaccatgaactgcttggttccagtgagactggatgttcttctccagtgtgggatatatgattggaaggatcacgcttcggttttgcgcgattagacccacaatgtgctcgttgttccacaagaacagtgctcgttctgcaacctgtatcggatttatgagatatacatatgagcataaggcaaaccccacatagaattctaggaaagtttgagctgttgcacaaagacataacgggaaacttgtgtgattcctagaaatcagtaagcacagtaacaatacattcagagagttaattcactccataaattttgaaacaactgaatcatggaaaatgaagatgatctaggaatccaaggatttaatcagagtagaagctatcaaaagcatgagatataacgcatacttatgagagttagtaccaacaagatcattttatgaatgaaaatcaacatgtggcaaaaatgaagagaaagaggcaaagcaaaaagaaaaacagaacaaaaaaaaacaatttgcactaaacttgatgaagcactagttcttttcagggaagaaatcagaccagagtcaaaagagctaaataacaaaatctccatatttaaggtaatatgcataataagccttccatgtggggattaaaaaaaaacaccattgcaaacacgacgactaacctgaaagtgggagctagtgagacagcgaccaatttgttggaataatggaaccatgcaacgctggaactcgacaggctgtgttgcctcaagaacttcttcaagttctccaaggaagagattctcctttgagcagtttgtcacgggccaatactttaacaatcccctgattactgtatccgcaagcttataatctttttccacaaactgaacgatgcaataagataactgctgatgatatacaacgattggttttggcttatgcaatggtatcaacaccctgattaagaatagcttgtgttcctccttcataggcaatgcaaacccgtttatgatactgcctagaatctccaagagttccccaatcccactgtgtctctctgtctcataaataaacctatagaatatgttgttgattgctttcctaataaagggtctgtggaccataaacttcccatatatcctatgaagaatcgttttcaaatactccctctctcttgggtcctcagaatcaaacaaatcgagcaactttaacacaaaagaatggtcgatataccgtttggccacctttgtatcagtgtcagtcgaaacaacatatctcaggagcaactcgtaaactagctgtaagtgaggccaagaaggttccaaataaggttcttcttcctcaggatctgcaggctcttgacccgtattctcgtgtgatgctggtgggagagaccggaaaatattaacagaaatcatcttaatcatttcttcctgacacgactctgagatcttactagatccagactgtataaaatccaccagctccaacaacgtttgcctcttaatctccttgtctctagcattcttaatcgtgtcagtgaaatcgaaaaggaaacagcaattctgaagtttcctcaagaacaaagtttgcctctctgaaaccggcacatctctaaacaacgggagtggctccaccgagcccaaaggcggaggaggtggagttgcagtcactggcgacggagaagaattaaccaatgcaccacgagaagcgtgactaacgaccacattggagccaggacctgacctattatcaggtagaccaatcccataactagacggttcattagcttcggatttagagggctttcgatgcccacctttcatgattttcttaaacatggcttacgcaacgaagagcaaaggaccccaaactaaaccctaagtttccgagctgaggagatttacactagcaggggagctcaaaattgaatcagcatgtaacggagaaggaatcaaaaagcctgagtattcagattcaaatcctaagaattcacagataagctttcactatgcctctctcggatcaagctcctcattttcgtaatctggcggataaggatttggaggaaaaaaaagcgagaaatgataccggaatgttgtcggagatctgagctggtgaaaatcagaagaacgttgaagtaatcgaagagatcttctcggagtacacggtggttgatcggacggctaagattttccggtgatcaaatcaggaagagagcgagaaagagagagagaggagagaaatgggaacaaagggactaaaatcaaaatggatacggagaaaataaattacaacttgagtgtccatagatttttatttatttaaaatttgtccacttattttgtttggtactctatttatccactaacaaaaattgaaggtggttaattattttctcgtttaacattaggtttaagtatggtttctcatgaatgtggtttctgatataagtactttaggttaaagaagagtttgctgattacaaaattgttttatcatctctaagtagaaacaaaaataaagcaacttccgtgagttagaagatagtggcgaattcaagaactctgaaatttgatttactctatttggtaagtaatccaagttttgaattatttaaatactctctaagtgactctataataaactggtcaagtgtttacactttactcaccccaaattccttggatttgttaatgagactagagtagctagaaactttttgattagtgggccaaaaatattttatttttcttgtagcccacataacttcatgatccatgtccatgtgaatgtccaatataagaagaccttagtttaccaatgtttttcaacaacatctaaaattcacatgctgacgtgtttttttttttctttctttcaactaactttctttttaagaattcacataacattttactattaccaatacaatattaatgcattttcttcattttttaaaattttcactctttttgtaaccaattaatagtttaacaaaaataaagaaagaatgacttaaatccctcacactgcactggtatttactagtgggaggagggctggtcctaaacttagaccaaagaaagaccaaattcctctgttttcacatagtactctgtttttacaacaattttgtttatatcttaattcagtggggttacattacattataagtacgcaacggtgttagaaaatttgaacaaacatttaatgattccgtacagaccggaccacgaggtagttgacatgttatacgataaatactctattctctagataatgacaatttcttcacttcttttatgtgtcggcacaaatgtaatggagtaggagactatgagtatatacaacaaacccaacacgaaaagtaattcttcaaatgcgtgaattttagtgaaaacctaaacaatcaaagtccttttgttttggtaattttacttgtgccatacactttgatttgtagtgaaaacgtaaataatcaaagtccttcaagattcttaagttcttaacaaggataaaagattgaaccagagggatcaaccatcttaattacaaaggaaagaggtgtgaagttacactttttggactgcagaagcgtgttcttgtgaggccccactattctcaggagagcaaagaaagagaacagctgatacacaaatgggggattgcattaaatgttgtaatcaagaaatctcttagaaatttcctaactatgaatggtgagtgtataaaaccaaactctctaacccaaaagaatgcaacaactccaccaaagaagaagaagaagaagaagaagcaaagaacactaatcagagctttacttctactgttgacgttttgagaatgtgcaaaaagtttaagattttcatgagaaagctacaaatttgctgcttattcactagattctctaaaagggtagggaattattgtgagtttgaggaagagggtaatgctgcatcaatgattccaagtgatgtgaaggaagggcatgtagcagtgattgcggttaagggagagagaattaagaggtttgttttagagcttgaagagttgaacaaaccagagttcttgaggctgctcgaacaagcgagagaggaattcgggtttcaaccaagaggacctctgaccatcccatgccagccggaagaagtacagaagattctacaaggaagtagagagtcttgaattttgatttgtagagcaacattgttagttgaaattctttgcttacaagaatttaccattctttctcttattacataaacatgtgtttacatatattatgctggtgctagttcatttttaccccggaacaattatttggttgagggagcttgataccacactatttgtgcagcttcatctgatgcctttggtctctcgattctatcacaagcgacatttgggtacaatactgaaccagtactaatcaggaccgtcttatccattagtcactatttcagtttccaaatacaagagcataataaccggaaggtggtcatggtgatcataacagacagattctggttctgctcttcaaagagattcaatatttccataagagagtcaactagaggagatgaaacagtgaagagttgagagattgatcattacaaaagaaaaaacttaaaatccaaaagtgctacgaataacagatcaagaagagatagagatagattccatagaagttccacaagtgtttggtttctcttctgattcacagcaacacagagacacttctatgggaagtagactggccagttgtaatagtacgagtccctgacttctttgggtatcttattccactgaggaacaaagagtagaatcaaataaacgtgtgagaaatgttgtcattagttatgttgtgaaagacagattcagttcttaggcaaaggtaagaaccttgaattcataaggttgcttctttgcccttgcttttttccagtggtactgctcaaacagcatccacttgtcatggtaactgccacattagagagtatgagagacaaccatacaaaaaccatactttggataagccacagaacttatccgggagaaacatgattatttgatctacaagaccttaaacacagttgatcacactatgtatcataggactaaacactccatcaactattagatgatattgaaacctgaggttttagcaatgcctatgataacaacttcattcaattcgcctaaagacatcaaagtatcttctgacattactaaatcttcaaacattgcgctataaccaatctaatgtagcagaaaaagaagaactttaacagtcaaaccaaaagaatcaaaacataattctcaccggagcaattcagagaagaacaaaaacacatgaacaagaaacccaattcggaaatcaaacacgaaaaaccgaaagtacccaaattcgaattcgaaagttcaagagagagagagagcgagaaatacttgaactggttagagagctgccacatgtaaggattaacccaggtaagaacggagaaagcagcagaaccaatccatatattcacgaaacgatctgcatctgcatgtggcactcctggatctcccctgtacgcatttccaaagtacttctccattttcactctctctctcgtcactctctgtgtttatcttcttctccggcgattgattctggataaataaaaatcctttctttctaccaaatttctgtttggtaacagagattataatatcccgtaatgtatttgtaaataaaataaaacttgaggatccatttagaaatactgcttcttcgcttagggccacatatttcgaatatccaacaattagatatcctcgaagagaggaatccaaaaacgacacgaaacccatcgttttagttacgtggcccatttcattgggaagaacccagaaatggcaaacacactaataaagaagatctgtgattcttcctttcgattcatcgtcgtcttccccaaattagggttttctgggaattaggttgattaaattatgcgaggcggtggtaggagaaggtcaaacggtggtggtagttctggcaaaaacaaggctaaatctccaggacagagcacgagaaccaatcataattccgcggcggggtcttcctccggtggtcgtcaccgacgtcagaataatactactttgtttgttgaaggaggtattctctccgactaccgaaaagatcctaacttttcgacgccatctcgtggaggaagctcttcgggaaagggattgagatctagaagcatagagcgtgtaaaagcttctgcttccacgagtggtccaaggaaatgcagtggtaatacttatgtgtatcaatatccttccattgattttgaggaaggtttggatcgaagatcaggagttgaaagtgatcaaatgaatgaaagtccactggtgttggggaagtcagaggcgactcaaattgttgcatttctggatcaaacgccttcgtcatcgaaagggattaaggtaagttatgattacgaatacgaaccgagttacgttttgggtgatgattctcataaaggattgggattttgtgatgattctgatgctacaccaagtggtagcctttctattccaaaggctttgggagatcaaggtggttcattttcccatgaggaggagggtgatgctgttgacgaatctggtggaaatgacgatgaactgatgcctgatgttgtgaaaacaccgaaaaggaggaattcaggtttcatttctataggagggatgaagttgtacactgaagatgtatctggtgaagagagtgatggagaagaagagatgaatgatgatgatgatgatgaatctggagatgaaggaagcagtggatcttctgaattatctgagagtgacagctcggaagatatgtttggaagttattccgagattgatgatgatgttgccaaggattacttggaaggtattggtggcagtgagattatgttggatgctcattggttagcagaacagtctttggataaattagatttgtcgagtgatgatagttcttcaagcgattcttcggatcgaaaaacgagaaagttgactggtattcgtctgcaaaaagcttcaatggaatatggtaagaagaagacaacaagaagtggctactcggggcatggtaagtctactaatccattggcaatggatgatcttatgtttgtgaaggatccaagaagtctttcggggaagaagaataagaagaaagaggtggctaagtttccccagtcttggccttcacgggcaccaaagagcaagaattcccgtagttttcctggtgagaacaagaaacaccgcaaagaatacattgctttgaagcgccgtgagagaatgctgcagcgtggtgttgatcttgctgatattaattctcagttagagaattttgttctggagaacgtggacatgcactgtttccaacgtatgcataatcgagattgctctcaggtaagacgattagcagatgtctaccgcttatcaagtagctgcaatggttctggaaagaaaagctttgtgacggtgactcgaacatatcagacatgtatgccatctgccagcgataaacttcgcattgagaagctaataggagctggagatgaggattgtgattttgctgtcagtggaggggtaaaagggaaatctggaagtttagataggaaaaaagcaaaagactcagctaaaaagcgacctactagagaggaacgggagagaaacaaaagcaatgggaagaagagttcttatgctgatcaacctgtatcatttgtgtcaagtggcataatcgattctgagatagctgttgcaaaaacctcagttgaaaaagttgcaaaagaggtagctgaaactactccgggaacctctaatggagcagacattggagcatttgaggtacataccagaggttttggatccaaaatgatggctaaaatgggattcatagatggaggtggtctaggaaaggatggtaaggggatagcacagccaatagaagctgttcagcgtccgaaatcacttgggttaggtctggatttctccattgacactgaagacccgagtccgtcaagtaataacaataacaacgctaaacggaacagatcttcgtcctccgggaaacatgggaaacgcatcacccatgacaatggtgcctctggttcaggaagaatcagggacaaaagattgggagcctttgagcagcacacaacaggctttgggtcgaggatgatggcgagaatgggtttcgtcgaaggctcgggtctgggtagagagtcacaaggcatagtcaatccgctggtcgctgtcagacgtcctagagcacgtggaataggtgctgaaggctaaacattgaagtatttaacggtcaatgtttgaacaagaacagtaagatatcgtttttaagtatgttcatcttcaatcttcaacatgtggcctttgttcaatttatgtttaagacttgggagcagctttgttgttatcttgacatcaatgttgttgacataataaagcatcctttcttttggcttctttaaccaccattgatgcaaaaaaaaatacatcctcggctccaagattctataaaagaaagtaccgatcttagagcattaacattgatatgcggaaattgctgataagtgggaacatttgtgatacttaccacttataaagcaattacttatcacttgcaatctttttaacttactttataatcctttattttttccatttgtaatgaacgaccaaacaagtattgaaacgaaaattaagaacattgattaaaacccaaacacaagagattcggataacttaaaaacacgaggaaagaatcagtatcactttccccagtaatccaaaagtagagaattcgagttttaaaacttaaaaaaaaaaaggataaagaagttatcactaattgtagagatcatcatcgtccccagcagcggctgcagacgtggcaaacggatctgcgactccagtggtggcacctgaaccagcagaattctcgaacctgaactcagaaccgaaccctctagactgctgcaacgtctgagcaaaggcttggtacttcctgatgtctgcatcactcacactcctacgcgcatacttcatcgactcctcaaagtgtgcagctttgatctctgatacttcatccactccatcttcctccattgcctctgggttctcgctcctcctcttctccttttcaatgtcctgaaacaaaaaaaaaacatgagcttcagttcaacgattggagagtataacaatctttggataaagagcttggcgatgggatctctaaccttctcaatgttttctctgatggcgtacttgcaagctctctggcaaatctcagtgatatcagcaccactgaaaccctgagtgtatttagcaagtgcaccgatgtctacatctttagcaataggagatttcctcaaggcggccttgaagatattgagacgggaatcctcatctggtagtggaatgtaaatgagctggtcaagccttccaggacggagaagagctgaatcgataatgtcaggtctgttggtagctccgatgatgaagacggttttcttggcattcattccgtccatctcagtcaaaagctggttcaagactctgtccgcagcaccacctccatcgccaccacttccacctcctctctgagttgcaatggagtcgagctcatcaaagaaaagaacacatggagcggattgacgggccttgtcgaagatttcacgaacatttgcttcactctctccaaaccacattgtcagaagctcgggacccttgacactgatgaaattagcttggcactcgttggcaatagctttggccaaaagggttttcccacatccaggaggaccgtagaaaaggactccctttgatggagacatcccgaatttctcaaacttctctgggtgctcgactgggtattgaacagtctgcatttgaacaatcacacggctcaggttacaaattacaattaatagacagacccaagcaaaagtaaatattagcaatttacctcctggagctctctcttgacattctcaagacctccaatatcattccaagagacgttgggaacctccacaacctgcaaagcaaagaagaaaatttggaatgagatttacgcaaagatacaatctttgatctcgttctaagcagagtactgtcaatactcacagtttcacgaagtgcagatgggttgctgttcccgagagcagtgtggaaatgttcattagtgactgccatggaattgaggatttcagcgtctatggagtcatcttccagatcaatcacatccatcttctccctgatgcattgcagggcggcctctgtgcacaaagctgcaagatcagcaccgacgtaaccgtgtgtgtcctttgagatcctttcgagatccacctggaaaacaaccacaagaagaatttagcattcaataaacattacactcaacaaacacagaaaaagctatgactagaaaattacatcttcagccagcttcatgttctttgtatggatcctcagaacttcaagacgtccaatttcgtcaggaactccaatatcgatctccctgtcaaatcttccaaaccttctcaaagctgggtcgatactgttggggcgattggttgctcccatgacgataacatgagcacgagatttcagtccatccattagcgtaaggagctgagagacaatcctcctctcaacctctccattagtcttctctcttttcggtgcaatagagtcgatctcatcaatgaatatgattgaaggcgcatttttctcagcctcctcgaatgctttcctgaggttgctctcactctcaccagccaatttggacatgatctcaggtccgttgatacagaagaaaaaggcacccgtttcattagccacagcacgagcgatcaaagtctttccagacccaggtggtccataaagaagaattcccttcggtggcttaacaccaatcgacttgaatagctgtggatgcctcaagggaagttcaacaagttccctaatctgagccatctgtttcctgacaccaccaacatcatcataacctacatcatctagcctttcttcatcctctctcttcacaggctcaccctcacagaaaatctctgtgtctggagcaaccacgcagtactcagcaggatctgtctctataactttgaactccacactcctcattcctcctctgactaggaagagatcacccttcctcactggacggtatgcctcaaggaaataagctgttgaaaagaattcaatctttgttaagaaatcactctaataatatctcaaaccaaacaagaacatccaaagaaaaatcaaaattgcataactggataaggatctaaaacaaaaaggcaacttacgtttcaggtaagcatcaaataggtttccagtcactccttcaacagtatcatcaacaggcaggatgtgaacacgctttccgtacttgacgtctgggcattggtgaacagatataacatctcccagtctaaccctcaagttagatctgactactttattcattctgatctttggctcctcacatgtctcatcagcaagagcaatgcagacagtgtccttcctcttcttaccctgaaagccaaaatccaaaccaaataagaactcataaagactactaatacgaatcattcaccaagacaggatcagtacaaaagcaagtctttttattttgtataatacctaagatcataaatcacttgtttcaaaagaccacaaaccctagtttatgtagaaccacataagaatccattaatcaagcaaggagaaaaaaccctaaattatgtctcttcatagagacagaaaccaaccattcaatatctcaatcaaaagagaatccaaacaaacaaaagcaaacccaaaccttgatgagaatggtatcaccacggaagagctgaagcttctccatggttgcagggtgaagagagacgacggagttatcatcgttgatagcctcatcgacgacgagacggttcggagacttcttcctctcgagaatagcagtactgaaatctttcttcgatttcctgtaacaacaacaaagaagattaagattcaactatagaaacacaagatcaaccaaaaccctaatccccaaaatcgaaaaacccagactttaagaagatccgaaaaaaatcccgatcggaaaaccaaaatcagagatctgggtacttacgagtctgaagattcagctggggtagacatgattgagtttgagattaacgaaagagttccctgagaaatcgaagaaagttgagagctttttcttcttctttggtttcttctctgagagagagagagagatggatttgtgataatgggatctgaaagagcacagattttctctaattatatctctctacgtttcttgttggaaaagagagctctttttttttcctttattcttattttcctttttgtttcttatcttctagtaatatcaaaccgacccctattgttttacttttcccaaatattcaccctatttatgttatgtgattagaattctagaaacttctttttcgttcaattttttcctccattccacaagcaatatcaatttcctacctatcgactaatattctttttccaactacttctcccaaatttcagtagtcctccagaccttaaagcccataattattttcattttatttatgtttgtgatttacttatggtaattaataggaactcttaacacattaccacaaatatacacttaagcacgagtagattgatcagctttggaacaaaactctgataagccgttcttgcttaatatacatatcttactaatttagctgtggttactattcataagttcatacaaaaatcatatttcatcattttagaatctttcacaaatcttcatatataattatctttatgtatgtatatgagcttcatcttgatctcgctagaatcttcaaccttcggaatctccatgaaacctttcttgactcttttttttgctgtaagaagaggttgaattctataagcagtcaacaagctcttattgtctttggattccataacttgccaaaccaacctccttcaccgccaccaccattgttctttcctctcgcgtctctcgaagcttttacactgttcagcggaactagctgtgggctgccatttcctgaagaagcttccacaattttgttcaccatctctaaaacctcactcatcttgggacgtgcctttgagttcctaaccaaacatctgttggccacaactgctagcttttgaaccgatttgatcgggtacttcccttccagccttggatctaatatgagcttgaacttccttgtgtcagataaataaggtctcacccattctagaagcttctgctctcccttgggtctgtttctgtccaccggtcgcctcccagtgataagctcatagaggaagactccataaccccacacatcgcttttcgatgtgagacggccggtttgaatgtattcaggtgctgcataacccattgtacctacaacctaataaagccaaagaaacccgttcaaaaacatacctgtttttcaatcttgcaaccaaaagaagtgaatgcagaacttacatcagtagaaacatgggttaatccttcagatggacctaaacgagccaaaccgaaatctgagagctttgctttccagtcctcatccaaaagaatgttcgaggacttgaaatcgcggaatattatctgaaaagccaataaataaaagttagtcaagagagtgaaatgagatcagtaacgtagcagagtcatcatattacctgaaactccatttcttcatgcaggtatgttaatccgcgagctgcatcttgggcgattctcagtctgaggtcccaagtaagaactgtgagtgaccgaggggataagtggaattcaacacttcggttaggcatgtattcataaaccaaaagccgttggattccacgttcatcatcttctgcacaatagccaagcaatttcaccaagtttgtatgctcaactattccgaggaagttcacttccgtaacccattccttatgcccctgcaacatccaagaaatgagataatagtgttaaaccagtggatgagtaacagatcttgagaacaagattggaaaaaacagacatacctgcaaccctcttttaccgagctgcttcactgcgacttcgattttaactgacgagtcctctaagttcctcactgtgcccctgaagacacaaccgaaaccgccttctccaatcataacagatcggctaaagttctttgttgcagacttgagatcagtaatgctgaactctctgagattacttgctctagtagacaccggagggtacgagttcttcctccccatggatgattctgtgctcgtcccagagacatcacgagagttgaactctgacccgcttcggtttatttcgcggtcagagaagatagaggtcaatgaaaccgaaataggggtcttctgttcccctctcttatccccaccagagaacaagaaacacttcattatcgagaggagattaaaataccgatgtttgtccactgcaggacaccaataaaacactgataatgatcatataacatataccgaaccacaaaatcaaaaccattgaagcatattatcgaacaactaatctgcaaagtacaagcatttccaaagttaaggcttcccccaagtacaaaaccacttaacagagaggaaggcctttagacccaacagatccaaattcttttccaagtaacacaaaccctaagttccagtgagtaatagaagggatctcgaagctaaaagtaatcaaatttcgcaagttgattccaataaactaaaacccaacagcaacataaagaactttgacttattgaacaagtatataaaaagcaaaagatgacacaactctcacctttgaatttactttgtatacagaaaaaaatcagaacagctatcagaagaagatgtaattcaatcgtcagaagagaaggaagattataattatcatgaagtggttaatgaatcacgatacaaaagagatcgaggatttgagaagctaagcttccgagagaaatggattttaagaagctaagcttccgagagaaagaggtcgaagaagaagaggaagaagaagtcgtcacacggcaacaaaaaaaaaacgaagtctttacagagagagatagctaaagtcagcgaaagaacgaagaactgagaatttaaattggacaaaacaaatgaattatttgttactattaaaagatgtttccaaaattaatattcttttattagacacacaatcacacataaaaacaacgttttcatttctttttcctttgacttgttcaacggtgaggtgcttagaaaagtagccaacagatcgatcagtgtatctaaatcacttatgagttatggtcttatttagtaataaaatcttacttatttcaacaacatcattttctattgtttagggaattttactatgacagaataaatcttcaaattaatggaatgcgaataaacgatggtgaaacgttttaacatacaaaataaaactatctacaaagtctacaataaacgacggtgagtgactcaagatgtatatgattatgcatttatgatagacaactcaaccaatgtttgagcttttgaaaaataaatattttttatagattatgtatagataatatagtcacagttttataattttcaagtattcattaatgttgttttatatttaatggtactaacttactatcatctaacatcaaccatctgttgcaaaaaaaaaaaaaccattgttaaatatcagtgattgaaaatctataacaatacgaagttttattcttaaggtgggtgagtcggcccatgatgccaaaatggtttccactttccaaagtggttcaaaatataatcttacataattacattaatgtttatgttaacaagcatagttctctactactaatcttatttgtttatggtaatcatgagatttgcaatggggaagtggaagggatatttcacttgggtcacctaggagatttcctaaatcttcctagaacctagagtacataaatttaacgacaaagtttagcattttcacacaaaaaataatgaattaaagaaatcctcggtattggtttccgaatcccgattgatctatatgtttcttaaaatcttgtttggtaatttgtaccacttgttgagataccttaaaccttggtaacttaacctatttatacgattatgttaaactaatccataccactttgtcgtgttgcttacgcttgctgtgttacaatttgcggtttgatcccggttttgtacttttcgtattgatattattcgccttcactcaaatctcgtaacttcacgtacgtaccaatagatgttaaaactaaaatggatcaaatcatatttgactcgtggcctttcccatgccaatttatgcacaaattcgtttgattagtatacgtagaagataagaaagtagaactgtacaagtgaagtaaaagtcaaagttgttgatatcgtccaaagtcaaaagtcttttacgagtcatactggtcctactttacattatcaaatacatccaaaacgagacattatacttgtcatttccatgattcaatagaaattgttctatacatgtgccgacacaaaagattctgcaaattttctttgcataggaatgtccaatgttgtttcgttgaaccgaaccaaatagaattcgaacagagaaactagttaatataacagtaatgtacattatagggaataatgatcattcaattatttcatgaaatgaagcaagttcaaacaaaaatagaggataattacatccatgaagatataacaagttatgaacattttgacatttggaatatcatactcggcctagtatagtaataatatttattaatcataaaaaggtacaataaaaccaagccaaaacacacactcaataatagcttaaagcctcaaaaggtgatacaagaaaacaacatagagtttatttgggtcgtataataataatcaccaaaatctcattcagagataaaactaaaaggatgatttgtgcgacttctagatttagttgaagtctggtttctcagggtaagtgcaaccagacctctggatcactacgtttgacgcgtagcatcctgccctcacacactcttcaatcccctttccgtgcaccagctgggacagaaaccctcccacaaatgcatcacctatgaacacagagaaccaagagggttaaaccaccggaattagtttacttgagactgatacaaaatgtatgataatcttcttattacaatataacaaagcaaacggtttggtaaacctggatttggataagagtttttatgctataattagatgagtggttgatatcatcaaacaataataagcttttaactcttagctataagttaagctgtatctaatctaggacggaatgtagcaaattcgagctgctgtgacttagttagagtgcagttagtgaggcctgagttcttaacaaatacctgcaccgttggtgtcaacaagcttctctttggggagagggatgactgggtacttcttcacttttccatcctcagcgacaaccacaggatctgcgccttgtgtaatcacagtagtcctcttgtatgttccagaggctttgggtaactgggacatcttgatggctatttgctcaacatcatcagtctgtataaaatataaccaaacagattaataaactgtctttcttcaaacaatacagggtgaaatttcgacagttacctcccagccgtgaaccctggagaaggttcttgcctcggtctcattgccaaaaatatagtccatgtacctggtccaagcaagacattagatgcagcgtcttgcttttcagtatatcgccagtgattagtttaggcaattataagatggaataaatggatcgagagattaggatgtgcttacggcaggcacttctcctgaacatctttgaagaattcacagatgaatggagcagaaaggttcatcgtgaacacctgtcaaatatgtgagcatatcaggactgttcatgccaaagacaacactggtaggagaaacaaatcactgtgcctggctctcataaaggatcatgtattcataccttgttgtttgcagcagcatgttcacgtaccaactgaatggattctggtgataccgtgaggaagaatccagcaatgtaataaaacttggccttctcaactgccaagaaagaaatatgtttcacaaaatctcagataactccaacatatgacaatatccgatctcagaataaaaaggtcagaagatgagttttgtacccagagcccagttctcaggcttcttcaagtgttcaaccttgtagcaattagcagcagaaagattggcaatgagcgatctgcaaaaggggaaacacgcctcagtacaactcagcagaaacacatcttattaagacaaatgataagcagacatagaaagaattattgtaaactgacctttctccaccaagaacacagacaccgcaagttccggtaggtgttgcctcatcttcgtaatagtggacctggatacagaacaagcgcagattaacagtctatttcctgatgattgaacatgaagcaaaaccaaccaccaataattaataattgataaacataaagcagactcacatagacaccagctgctgtagcatccttcttcattgcctctccgtatttgtcctttccaatggatcccatgtaactggttgccccaggaacttgaagcatccactgcagtaatcaaagataccattcatttagcaaaaaaaggtactaacttcaaaacaagtatgagtagaaaccgtaattatcctttacctgggccactttgattgagttctgggtagcacctgaaagccaaacgaaatcaagaaaatatcaaaaatactgcaaatacacatgaacaccaaatgtctattgatagctcaaaagatgaattacctccagcaatgtattcaacattgaacttctggctcatttcatcgtacctaaacataccaattatcatgtgaataaacaaagagtatttgaaaaataatcactgtcatattaaaatcacatcaagaatcacttaagggcaatgaaaaatcaccacacttgtgtctgtttcccttaaacatagcacttgtcacaatcaaatcataattcttctacgcagattacatatacatatccacatcaattacagaacaacttgaagagtaaatactaatcaatcctcattatcaccatttgaattcaaatgcacgctaggattgagaaaaagtgaattcacttacatgggcaaatgtttgtcctctgcgagaatcgcattgttcaatttgatgtcgtatctgtcacgaattcaaaagaaagcattagaattcagagaacccataaagaatatcgtaaacacaaacaatctagatccgagcgaaaacgatccggatctgagcttacttgtcgagaaactgttggtcgacgacggcagagacgtcgaggagtgggtttcccattcccaaaaggattccatcgaaatcagaggaagccatggatgatgatgttagaaggattttcgaggaaagggaagaggttcagatctggtaaatggaggagcaagtgttttgtgtgagtgaagtgtttgtgtttataagctctgaaaccaaagtaggtataccaaagatagattcttcttcttcctattattttatatatattattttttaatgcatatttatctttttttttgggcaaaataatgtatatttatatattagctcaaaatcatgcataaatttgccattggaatttctaattctatattaaaccaaattttagtatagttcatttcattcaacttcatttgtagagaaaagttaactgaaacaaaatttatgagtaacgaaataattgatgaaatagagtagtgttgttgtcaaatgcagctatatacgtccctatcccaccaacccacttgagaaaagtgtcaacacatgtccaaaagtctattggatcttgttgtaagaacataaaaattataattaagttgtttctttaagagagagttaaaaacaatgagaaaaccaaatgtgacagcattgcaacttacaaaatgaataggaaaaagattgaatttgtcggtggcattgaaaagtcctgaatcatccacgttggtttgtttcagcattgaaagttttcacttttcagggtttgagagttatgtattcattcattcacagagaataggcaaacaatttaggtaaggacaaaagggacgatattattattgttgaaaattcacagagaataagacataacgccaaacaattcaggcaaaatccacaaactgtaaatgtgaaccttttgatggattcttccaatatctgtatccttcttttgttatggatcttaaaggcagaagaagtaatacagctctgcaagaacttcaaatctaaggaaaacacaagtcaatgtctaaagcctatggcggctttgtttctcctcataggaagaggatcaatatgtagaaaaattttggagtgaaaatccaagaggaagatccaataagtaagtaaggaaagaattatggtttttcacgggtgtttagagatgatcacagatggcttttgtgaaatctgttgtagttgaggaacctccgagatcagcagttctatactttccctcggctattgtgttgatgatggcactgtggatttgctctgcttgtttgttgagcttcaggtgccgcaacatcatcactccactcagtagcaaagctgttgggttcgccaggttctacacaacaccagcaaagaataacaaacatgtggatcataagctaaaaatcgaatcaagttctgatattgaatagtggcaagataatatctaaacccactgtatttgaaaacatgatttatttattagactccttaaccctcaatgctaggttggccagttattaacatcattcaagtactacaagcacgatcatccagtaagaaccattctacaatataaactagacaataatccattctacaatgaaagcttctgaatgttcaaccaagaaatggcatagaagagagtaatggagaatcttctctcaggaacagcttctatcatacttagttttagggtaaaagtaggcaagttcacttaaatttgtcaaaatctgtaatgcagtgtctaaatcctatttactctaataatttaacaagttaacaacaactctatgcatcaaacgaatttagaacgatgataacatctaagaatgatgactaaccattccagcaatatcaggtgcagagccgtgaacagcttcagcaagggcaataccatcctccccaatattcatactggaacaaaacataataagagcataagatgattgcctcattttcatactagacaataatctgtgagacgaagaaacaaatgttacctaggagtcagtcctagtcccccaacaagtccagcacacaaatcgctgataatatctccatagagatttggcatcaccaagacatcaaaaagtgctgggtttttcacaagctgtcagaattaagattatcaatcccacattgttccataagtaaaattagcgaaaagcagacccaagtatgggttgctgggaaatctaaccttcaaaatcaacaagattatcccaaatactaacttaattaacaatgagattgacctttacataatttggaacaaaagatagggtggatatcatgttatagcttaccatcatacagcaattgtcaataacaaccttctcgtaatatatctcaggatacttcgcagcaacttcatcacaacactgcaaagcaggaagcaaataaaaacttgtctcagaacaaaggttaagaaaaagaagccagtgagagactagaaaaattgctatgttcccctaattgagaagtgctaatgtattctgagttccaaaatgagctgacctgcaggaaaagaccatcagttttctgcataatgttggctttgtgaattgcagaaactttcttccttccgtgagtcttggcataaagaaaggcatactcggcaactctcatactcgccttacgggtaataattttaagactttccactacacccttgacgacctagcaaataaaaatgacaaatcatcaacatggctctaaaaatgatactagatacagattcactaaaatgacagaacaatagactaacctggtgttcaagcccactgtactctccttcagtgttctcacgaatggtaatgagatcaacatcatcataacgggttttgtaaccaggaagactgtaacaaggcctaacattggcatacaaattcagctctttcctaagagtaaggttcaaggaacggtgaccctttccaattggagtagccattggtcctttcaaaccaaccttgtttttaagcacagattgaagattatcccatgtcaagaaactattggttctaggatctacttcagtaccaacaaactgttcgtcccaatcaataaccacatcagcggcagtaaacacctggatcagcataaagggaaaacattttcagaaccatcagctataaactaaaaaaaacaaactttatgattcaaatctctcccttgacacgtctcaaaaagtattcagacattatggttcctaagagtatccagaatctataacaaaatttatatggtaacataaattacacaacaccaaagtagattgaaaaaagggacctgcttgacagattcagcgatttcgggaccgatcccatcaccgggaaagagagtagctttgatcggagtggaggaggagaagaaagccctagaaacggaaatgaacggaccggagctagaactcgaagtcccgagaatctggctcgatccgttaccgataagccgtctcgcgagaaatgctgtcatggtcatcgcttccagcctcagaaggacgcagagagagaaagagaggaaagaggagactttttgctgcgttggacctgaaaaagtttacttttataccttctctagctccagcagagaagcagagaacatttcgatttccatgaaataaaacggcacaaagttagtgtctgaaaataagaaacggcatcagcctatgttcttaaacggccatggtcaaatgaaccggatatcaataaattataaaaaccggtcagatgaaattaagcattcagatcccgataagcagtgtgacactgaaacagcgaaaggagctctctctcactccgaggcgatttcttctgtctcgacgatcttgcgcttttcacatttgaatcctccaatccattacttcttctccgatcttttattccggtgatcctttggattatgattatcgagatccattgctgcctatttgagtcttgaatcatttgtttgcgttctcatctgtgcttagttatgtgattctccgataagatttagttatgtgattaatgcatgtatgtatcaatccgaattttggtgattcgttgtctattattaaatacgtcaatctccatttgtaatccctggttgaaataatagctatcttgtcatggagatcatcaacattacatttactacactacacacataatgtcacatatgatcttagtatatgtactcttttgtaccagtgactagaacaactgtgagtgtgggttgaagtttttaatatcttgttaaaatcgaaagtttttgactcagatactacttggttttgtttttgtcactgtttcaggtacatctcaagtcttacaacaatgtctcctgtaagtacatatgcattatatgattgtatttcgtattctgttagaatgtgtgtatgttgccgcaatcatacagctttgtaggagttttactctttttttggactggaacttaattactgactttccaatgtacattgaataggattcttgtcctttggtaaagaacattcttcttctagactctgaaggaaagcgtgtggctgtcaagtattactcggatgactggccaactaatgccgccaagttaagttttgagaagtatgtattctcaaagacctctaagaccaatgctcgtacagaaggtaagactacataacatttttcatctacacaatttctatcatgtttcctgacttcgtgtatgcttatatacttatctctttcaaatagccatatcgatgttttatgtgcagctgagatcacactgttggacagcaatattattgtctataagtttgcccaggaccttcacttctttgttactggaggtgaaaatgaaaacgagctcatcttagcttctgttcttcaaggcttttttgatgctgttgcacttcttctgaggtatttgtttgacttgacaactgaatatgcctttatttattgatcaaccatctccacaactaaagtatgatgcatccctttttttttttaccaggagcaatgtggaaaagatggaagcccttgagaacttggatctcatctttctatgccttgatgaaatggtcgatcaagggtatgcaagtttaatagtttagccctacacgacaattacataaaagtcttaagcatgctaaagatttgctcaaccttttttaagcttgtcccatatatcttagcagttagctattgtctgattgtggcttattatggaatatgtgttaagggtggttcttgaaacggatccaaacgtcattgcggggaaagtagcaatgcagagcacagaagctagtggttcactctctgaacaggtaacgacacttttgactattattgttacatctccctgtggaaaagcaatagtcttgatttagttttgctataactttggtctggtttggctataaacacaaacgtgaacttctaatttgaaccctctgtttacatttcggtattgcagacactaacacaagcgctagcaacagctcgggagcatctggcaagaagtctgcttacatgagttccatcatggcgacacaataatagaagcatggacttcaatttctatgttgagcaactttttatttttgagtctttcggtttgaaagtctctaataattgaattctgcaaacaaactcttaaagtttggtagtaaaggtttgattatatatatagctttgtgcaatgcatgaatgtttttggagagtggaattttattactctaattgaagtctaaactctaagcaattcaggaatatttcattttccaagcgatttcagatgctagtgatcttgtaaggtgaagaaagactaaagtgccacccctcagaaccttctattttgaggtgcacgccatatcagaagagcaagaattgttttggttcgtattttataaaaataatcaaagcaagaattgttttggttcgcattttataaaaaaatcaaagcgataaacaagataatactaaatttcgaattatttaattaacagattaagtcgaatattttataattatcgaaagctgatttaaatccaaaacttttcctcttctatataaactgagaaacgcttttactcaaaccctaaatcgatcgttctgcaaaagttttctgtgaagtactactactctctctcaaggtatttgtttcttctatctcttctcatcatcttttttcgcctgatctttttggttcttaccattcagaatcctcctttctctcccataaaaaaaattgtttacagatgacaattcaaatctacgcaaagactcttacagaaaagaccataacacttgatgttgaaacctccgactccattcataatgtcaaggctaagatccagaacaaggaaggcattcctttagaccagcaacgacttatctttgctggtaaacagctcgaggatggccttaccttggctgattacaacatccagaaagagtcaactctccacttggttctgaggttgagaggtggtatgcaaatctttgtgcagactcttacgggaaagaccataacccttgaggtcaaaagctcagacactatcgataacgtcaaggccaagatccaagataaagaaggaatccttcctcgccagcagagacttatctttgcaggtaagcaactcgaggatggtcgtactcttgccgattacaacatccagaaagagtcaacactgcatcttgtccttcgtctttgcggtggtatgcagatatttgtgagtaccttttccggtaaaaactttaccagtgacaccctcaccctaaaagttgagagctcagacaccattgaaaatgtcaaggcgaagattcaagacagggaaggtttacgcccggaccaccagaggcttatctttcacggtgaagagctcttcaccgaggataatcgtactcttgcggattacggcatccggaataggtcaaccctttgccttgcccttcgtcttcgcggtgatatgtatatatttgtgaaaaaccttccttataattcctttaccggtgaaaacttcatcctagaagttgagagctcagacaccattgacaatgttaaagctaagctccaagacaaggaaagaattcctatggacctacatagacttatctttgctggtaaaccgcttgagggtggtcgaaccctagcacattacaacatccagaaaggatcaactctgtatctggtgactagattccgttgtgggatgcagattttcgtcaagacccttaccagaaagagaataaatttggaagttgagagctgggacacaatcgaaaatgtaaaggccatggttcaggataaagaagggatccaaccacaaccaaacctgcagaggctgatctttcttggtaaagagctcaaggatggttgtactcttgcggattacagcatccagaaagagtcaacacttcaccttgtccttggtatgcagatatttgtgaaactctttggcggtaaaatcattaccctagaagttttgagctcagacaccattaaaagtgttaaagctaagattcaagacaaggtaggttcacccccggaccagcagatactgctttttcgcggtggccaactccaggatggccgtactcttggggattacaacatccggaatgagtcaacccttcaccttttctttcatattcgccatggtatgcagatattcgtcaagacattttcattttccggtgaaacccctacctgtaaaaccattactctagaagttgagagctcagacaccattgataatgtaaaagttaagatccaacacaaggtaggaattcctctggacagacagagacttatctttggtggtagagtgcttgtgggtagtcgaacgctactagattacaacatccagaaaggatcaactatccatcagctatttcttcagagaggtggtatgcagatttttatcaagactcttaccggaaaaaccataattttggaagttgaaagctcagacacgatcgccaatgtaaaggaaaagatccaagttaaggaaggaatcaaaccagaccaacagatgctaatatttttcggacaacagcttgaagatggcgtcactttaggggattacgatattcataaaaagtcaactctttaccttgttctccgtctccgtcagcgtcgatatgacttttgagttttttttagcgctttggtttgtttttttctctcgttatgttttacgttttgatgggctcataaatggtcttttaccattcaactttaaagtcttatcaataataattttcttatttttttattccgcagtgtaaatctcaattaccatcggattaatcctgataatgcacaatattgttatcgaagaagcaagagctaatgtttaattcatttagtcggctagttcttttttttcttttagttggctagttcttagtattacaaactcttggataaagtttatagtatacacccaaacacatttaagaagcaaattattgaagtaaaacattttaagattagaaaaaggatctaacattgcgtttatagcaccgatgcatgttttttggaattatatgcaccaaaaacgccgaacttataaccccacacatcatttcctcaataatttaaaatttcatgaaaaattatgaattattgactcctatcttacttctattttgttacctactatattatccatttcatatatgttgacaagttgacaatgacggtgagctccacaacaaccaaacaaaaaagtttttcttttgttttaaagctccaaaaaactgacatgaaatcactgggattagatcttattgtctcccattaaggcaaatttcattagattttccctttttggaaataattttcttttcgatttatcaactatagtatatacctttttttacccccaaaaacccagggattatatatacgtaaattatttacatgcatgaatatgaatagatacagtaaattagttgttcaataaaatatttaaactttttgctctcatctccaatgaggacgccacccacgttctctgttcgttagccatcacactgtcaaatggcagcttgtgtcaatcttcttctttcacagttcatgaacttcacctccaatggaaacccgttgctctctcctctttctctctctcattctcctgtatttgcccaaacccggatccggatttggatcctccggtccgattgcggcgtcgttcggcggctctgctttcttctgcgccattgacgctagtggtcgtcaagatgttatctgctggggaaagaactattcatctccttcttctccctcttcttcttcttcttcgtcgtctattgcttcttccacttccgcaagctacaacattccgtcaatggcggttctttcaggcggagacgggtttctctgcggcattttgtcgaacacttctcaagcattctgttttagttcacttgggtcttcttcaggtatggatcttgtccctctagcttacaggactactgcttactctcagatagctgctggaaacagccatgtctgtgctgttagaggagcttactattccgatcacgattctgggactatcgattgttgggagataactagagctacgaacaacaacagcttaatcgccaaggagaatcctaacttctatgatcagattgttagtaatctcgtcttcaacaatattgtttctggtgatgggtttagctgtggtggaatcagagatggtgggatgctctgttttggtcccaattcttctaatttagggtttaacacaacttctgataacttccaagtcttagccgccggtaaaaactccgtttgtgctattcttaatttatctcgagaggttaaatgttggggagaagatgaatcttttgtcaattctccgatgaatgattctcgattcgtctcgctaaccgcgggtcctcgccatttctgcggaatccgtgaggataatcatgaggttgagtgttggggaaactctaatttctctttgattccaaaaggttctggatttaaagcaatagcttcgtctgatttcattgtttgtggtattagagaagaggatcttgttcttgattgttggatggttaatggttcgtccacattagcttacgatcctccgttagagctctgcagtccagggatgtgtagagctggtccttgtaatgaaaaagagtttgctttcaacgcaagtatactcaatgaacctgacctaacgagtttgtgtgtaaggaaagagttaatggtctgttcaccttgcggctcggattgctctcacggattcttcttgtcaagttcgtgcaccgcgaactctgatcggatatgtacgccttgctcgctctgtcaaaacagttcttgttcggatatatgtaagcttcataacagcaattttccagataagcattggcatcaactacagagacttgttcttatcatcgggtcttgcgcatccgctctattgatcattataattggttgctgtgttgtgccacggattgtcactagtcctaataaagaagacggagcagcgaatcaattcaaatcttgcataggaaagcccgatttagacactgatcagccacttgaaaatgtatcccctgctccatcggtaacgccttttgctcaagtgtttagactctctgagcttaaagacgcgaccaacgggtttaaagagttcaatgagttaggcagaggaagctatgggtttgtctacaaagccgtgttggcggacgggaggcaagtagcggttaagagagcaaacgcagcaaccataatccacacaaacactagagaattcgagacagaattggagattctctgcaacattaggcattgcaacattgtgaatctccttggttactctaccgaaatgggagagaggcttcttgtttacgagtacatgcctcacggtacgcttcacgatcatctgcacagtgggttttcgccattgagttggagcttaaggatcaaaatcgctatgcaaaccgcaaagggtcttgagtatcttcacaatgaagctgagccgagaatcattcatggcgatgtgaagtcttcgaatgtactattggactcggaatgggtggcgagagttgcggatttcgggctcgtgacatcgtcgaacgagaagaatttggacatcaaaagagatgtttatgactttggagttgtgctgttagagattttaaccggtaggaaacgttatgatagggactgtgatccgccggagattgttgaatggacggttccggtgatcagagaaggcaaagcggcggcgattgtggatacgtatattgcgttgccgagaaacgtggagccgttgttgaaacttgctgacgtggcagagttgtgtgtacgggaggatccgaatcaacaaccaactatgtcggaacttgcgaattggttggaacatgtcgcaagagatgcattgatcttctagcttcttttttttaatgagtgttattattcttttatttatgaattctggtgaaattgtataatcaaaaatatacattcaagatttgagaaaataattttcaatgagaggaaacattatccaaaaacattaattgtgattaattacactttgctcagctaaaattttcaaagttggtttatgaatctttgaaactaaagaggtgctacttcaattgttctgttagctgtttatatgaattaaaggagaaaattaatatatgaacagattatttttatttagtgtttttatatataaccatttttaacaaaatatttagctaattagttcatgcacacattttgtctactatatatgcagtgttagatgaacaaattcgttttatgtagtgattgtgtttaaccattttcaactaacatttagctacttaattcatccacacaatttgtcagactacataattcacatgacatttactgctctgtaatagtattaaaggaaacaaatatgaaaataacctactagtaattcttttgacaatatagagcttttcttagtcataaaacagcttttgtttcaaaattggaaacgatctctctttttgggatcttacacaaagtacacatgtacgaaattcctcattgatacatcattcctcattacgaaccacacaattagatctaacatatatatatttgttccactcaaatacaaatcttgttagggtaacatcacctctgaggaaacgacaaaatgaagttaatgaaagtatttggctttagatggattcgtagatagtacgtgacacgttgctgatatgcggacttcagataaattatcggctagtatcataaagataatgtaagggtctaagcatactcactaattaacgaaatatcttcttagaaacacctgagctcgatctatttcaatcatagtgactcaaacctaagaaaatctttgacatatgtatattacattagtgttccaagaagatgctacgttcgacgtcatatttgttatcctgtaaattataacaaagatgcatcaacattcaacagagaacaaagtttagtttttatatatatatatatgtcacgatcataggtctacataactataaattgatacaattgattttacagattttacacaacatatgtatccaacttgatgatatatccggtctgccgtttcccactatatatagagtattttataattgattcccatttatttttcttagtttatatatgttcgtcttttggaattgcttaatgaaagtgtgtgcgagtggttaggtatgcgattctattatgtctctttatttatttttgatttcgaatcgcaccactaccttcgtatgggaatgtttcaatatgatatctatctgtatatgatcacgaatataatttgattttgatcaaaatcaacatgtaatataatttcacgtaatatcaaacatccaatagttacagtttaatctggctactgaatatatatatatatatatatatatatcttcctttgaaagaatgtttatatatttttattctttgtgacgttttttttagctaatggtgatctcttgactctaaattcatacaaattttttaaaaaattagcttagggttttgaaaatataaaaactcttttagggcttatgttttctttttggtcaacggagcttatgcttttgtagaaacactaatttttaagacattaaagtatacatcagttttgttttgtgttttgggttaaacttatacacaattattcaaagacgacaaaacaagtttaaatatgaattccaaaataccagttcatcttttcggactactgtatataagaatattatgttggcaaaaagtaggtttattataggttaaaaataaaaataaagtatagcctactttgttaggaatacatattaaacttcacactaattactagtagatatttaggcaatataagtctagaagcggaaagtagacaatgcctattgcctagtatacatttcggacagcacaagtgacttttaactctttaatcacacagaagacagaactatgcaatgatcgacaacttcttcactctgtaaaatatttggatttctcaattaatggtttctgaaaataacatcatctttttaaagcatgaacaaattaatcctaatgtagacctaaataaaaatcttaagaccatctttatcagtaaaaacaaggaaagattctaaaaaaaaataaaaataatattttaattaaaacagatacattaattattatttaataattgaattaatagtatgatgacacttgtccaaattggatgagaatagtttctcaaagtttctcggaagagaaattcaactctccttctcttctacttttttttccttctatcatactttttcttctttaattattttttttttttattgggtatcttattgagatacttcaaatggagatgctctaataattaatgggaatgtgtttctaattaaaaagataacatctttctttctatatttttgtcgtcatataacacacctcaactcttttaagtactcgtgttgaattttgttttttgaaaagacaaaactccttataatcaacgtaattattaataacaaggagaaaaaaagtccaaagaaaaaaaaaagaaagctttttgggaacataaacaccatcgaaggagggtgggaggtgttttatgttcatgggtggagcttcttggccaacctgaccccattcatcatatcattacccactttcttctcctaaattattctctcttatctctctctctctctttttattttctttctttcttaattcatctaaactctctctgcttttgcttttcgtaattccttacatttcactcaatattaatccccagaatctccgatccacccacaaatttagcaattttctgagatttgatcatttgggtcaccaaaaaatcttgtctttttgatctgggtttaacgccaataacatatgggaaacattagcagcagcggtggtgaaggtagacgccgtcgacggcgaaaccatacggcggctccaccaccacctcctcctcctccttcttcttctcttcctccaccacctctacctacagaaatccaagctaatcccatcgttttcgctgccgttactccctatcctaatcctaatcctaatccggtttaccagtaccctgcttcttactaccaccatcctcccccgggagccatgcctcttccgccgtacgaccaccacctccaacatcatccaccgcatccttaccacaaccactcttgggctcccgtggcgatggccagatacccttatgctggtcacatgatggctcaaccgactccttacgttgaacaccagaaagccgtcacgattcgtaacgacgttaatctcaagaaggagtctcttaggcttgaacccgacccggataatccgggtcgctttctcgtctcctttacgtttgatgcaaccgtctccggaaggtagatttcactttctccctttcgttgatttcgtgatccatttgagcagataacacgtgaattttgttgtgttcttcctcgtgactatgtaatttggatcttcttattgcaatttgatcaaatcttcttcatgtgtaattgaattaagcttatgttattatgttggacttgtgaaaaataggattagtgtcattttctttgctaaagaatccgaagattgcaaactcacagcgacaaaggaagatatactgccacctatcactctagatttcgagaaaggacttggtcagaagtttaaacaatcatctggttctggtatagacttttcggtctttgaggacgttgagctgttcaaagcggccgcagacacagagatctatccattagcggttaaggcagaagcagctccctcaggtggtgagaatgaagaagaagaaaggtcggggtcgaagaatgcgcagattactcaagcggtttatgagaaggataaaggagagattaagattagagtggtgaagcagatactatgggttaatggaacgagatatgagttgcaggagatttatgggattgggaatacagttgagggggatgatgattcagctgatgatgctaatgatcctggtaaagaatgtgttatatgtttgtctgaaccacgagacaccactgttcttccatgtcgacatatggtaagtgaaagctgatgatttactactattatgtgatgatggacatatatatagatgttaaaaattgtttgggtttggtggtgcagtgtatgtgtagcggatgtgctaaggtattgaggtttcagacaaatcgatgccccatttgcaggcaacctgttgaaaggcttttggagataaaagttcacggtaacaacggaagcgggaataacaccggacagggagaaacagttgaacaagagtagctaaacacggccgagtatggattgaaatgccatcgaaatattagtagtatatgcatgtttgatccttgtatgttaacaacaaaatgtgtgattgtcaattcataatatagagattacgaaatcatttggagtcataatgacacaatacttgaaacattcttcattagatacaacaacaaagtaggcagtttcttacttagctagttgctcaaccggaagttgcagtggcaggtgaagccattttagttgcaataagacagaaacttaaacatggaaaacacgagatatagtagcggcaacatgacattcaattatatagctgaccccttcgtttcttatttaaaaggggcaatctccaacgttttgtggtcaaatgggcctgcatttctttttatccgcctctactattgggccctaagcccgagttttccggtttcgtaaacaataggttcatcatacttgtgtaatttcaatgttttggaaaattcggttcacagcttcgttaaaacatcaatcatctcatatctgtgactcgtagtttggttaaaaaatgatcccaaaaaagagagagacagatccaaaaaatcatctcatatctgtgtctctctctttgtttaaatttaaaatgcttgccgtagacaaaacatacaaatacgaggctgtaataaacaagtatttaatataataataaggacaaataaacggaccaaatttaggccgagaaaatgggacattgtgatataatctcaaaaagaattgaaatttgtatgatcgatcagatatctcaatttcaggaacccagaaagagggacttgtcttttacctccaaagggttcctgccgtttcttttctacaatttttctcctgctaattatcaaatttttcttctgattttcattgtttgttagagattcttcttctcctctgcttttctattctctgggagctcgatgatggatgataaagctcgcaaagaagaagaacatcatgtgtctcaccaacataatcattctcctctgcaaagggtctctcgttaattccattccaatcttgtttcaatctatcttccattgatattgatattgtttataaatttctttctttttttattttgctcatggttttgattttgttggttatcctcagaatttcatcaatcttccatgattttagggtttaggggtttagtagattgtttaagtcgagtctcttgataaaagattaggcttttaagttatttgtcaaagatcatgccttttgtttttttggaatctgagaaattggatttgaaattaatctttctttggtgtttgcaggatggaaattctgctgagattgcacaaggacaagagctatcatcaccgggccgagacctatggaggcgaggtcttgtgttagatttaccatcaacaacacctgaagatactacaagagatgatctttttagacgaaatgcatctttaacttcaagtcctgttgccaaaagagtcaacttttctccaatgtccagccctagagtcggacaacgtggtgcatccttgagtccttcttcttctacttcttcttcttcaagaaacaaacctaatagcctgaagaatctaatccccaagttaagctttaagaaccggaacagcaataacgataatgtggatatcgagaaagccgcggatttgggctttgtgtcctccccttcttcaggaaatggcagggacaggtctacatggactctcactaatattttaactccaagattgaagaaaactgagtctcttcctgtaacccctatagctcactcaaatcctgagtccactcacgggagatttgccgttgatctagttacttccacggtgagtaacttgacggatcgtttcatttaggttctcatgtgaattctattgtggtttgtgctgttatctcattggcaagggacattttattgtctcgtacttcaccttggtctcagtagagtaatcttaagtgatgcattgtgcttgtaaaataagtttagctaactaggttatcttctgcttcacttcattgttggtttgaccaattatttttataaaaatgttttcccaacagaaaaaagggcctccactgcctatccaccgttcacgctctgtcccagcattcaacaaagatggaagtcaaaggcaattaggtgttttccgggtgattccaactccaaacatgtctccaaccagaaatactattaaacttaacggttagaaattgtattttttcatttgatttttaaagccaaaaagacatgaaagtttgatatttttgtgattatatccttgtaacaaaccctgtgccttatattagtgaaatgtttcagacgcgaatgttgatggagctgaagatgttcctgaagaagaagctgtgtgtagaatctgccttgtagaattgggagaagattcagaagccttcaagatggaatgtttgtgtagaggggaactagctcttgcccacaaagaatgtacaatcaaatggttcaccattaaaggaaacagaacatgtgatgtgtgcaagcaagaggttcagaatctccctgtgacccttcttcgcatgcagaattc

SEQ ID NO: 1284 - DNA, 93985 bp, Arabidopsis thaliana
gaattcgttttgtaaccccaccttcgccaatttcgtaaagaatgatgctagtatgatcatcatattttcctacaagttgctcgcaccatgctatgatatttctgttcttgccaataaagcaccccggaagaggcagaatatcaatggaccggaacaacggaatatcagggagagtcacactgaaatatctgctgaacgaaacaacctcatcactcaacttgtttgtcaccgacacatgaatctcccttgttgcttcattttgttgtaacagagaaagtctatctccattgaaacatcctaatcgtttgatatcccaatagagtggagaatcgcatatgcggttgaatgtttccttggagaaatcgaaacttaaaatgaagtttttcttctcctgcaattcaatccaatacatacttccattcacagacacgccgtcgacctcaacatctatttccccatcaaacttagcctcaatacttctccacgagccagaattgaattcatagatctgacactttggatatgattcatcatcatcatcatcaccaagataagtaaacctcaagattttgtagttatcacgaaatgttttgtcgtatccaaaccccaagtaatcacttccccagtaacaaaccaacggtggtgacggtttgatccatttgatttttctcataaccggattccaaactgcaagattggggtcactacctagttcttcgtaacacatgcccaacattagaccatcacagtgaatcagagtaaaatacttgtggcgaagctcgtttgggattgttgaaacggcgaggatttcggtcacgggatccaagatttgaaccctctcacgattctcgattcttaagaaccgtttcgtagatttatccaagtgcttgtacatgaatctcttgtcgttgctgatgagttcgtaccatttcttgcacgtagacttgaatcggagcaaagattctgccggagttctctgaagtatctctaagattaaatcaaatggcaaagaagaacccatggacgctcgctgtgaaaagatctgaatcgaagcaaagactgattcttgaataataaaggtttcgtttttgttttctcttgtcaggtctaagactttaagcgcggatgacgaagaagaaaacgaacttatgaatcttttaacctcatcgaacagagcaagcaaaccggttacggttcaacataaccaaaattgtgaagctttaaccatgatcttgaaaataaagagcaaaagttttgactttgaccattttatttgagcaaggaaaccggttacggttcaaccgaaccaaattaaggccaaaattgtgaaccctgatcctgaaaattaaggagcaaaagttttgacttggataagaattcttgtctctttctcctttatccggtaggttttgggattcgttaaattgtgagtgaaccgaaattcgttaaattcatcaacttgagcaaacgaaccagttgcagttcaaccaaaccaaaatggcgatggttttttaagtgaaaaagcaagcgaatcggctacccttgaaccggatctcatatagtaagtatttagggtaatttaatttctttttcttgggttctaagttatctttcactcgtaagtctcctgctttttcttcttcttattctaatttttgggtgcttttactaagatccttgcataacttcttgtgaaatgaatatttttggacgtaatatatgaccaaacattgcatctattttccaagtatgcacatgatgaacatacaattgaaatgttacatttgttcgttggaagtgttgaggtctttcgataatgatgcttagtttctctgcttttggggttttaataaatactacatatgcgaatctggaccaaaacctaaaacttctcaagatcattacaaataagaaaactggtagttaattaatgtcaataacatctctggatagtacctcagttgatttcaacatagttgcattgcatggtagaaggactaaccctcatatatctacctcttcttttggaaccggagagtacttatccaagtgattgtacatgaatctcttgctgctgacgagatagtatcattgcttgcacgtccatttgaatcggtttcaaagattcggcgggaatcttgtaaaatatatcttctactacatcaagtgggaacgacggctgcaacaaacgctttatggaatccatggacgctctttgcaaaaggatttgaatcgaatcagagacattgattcttgattatgaaggttttgttgtttcctttttcgttttctcagtttggtttaagaatttaagcgcgaacaagggaagagggaaacaagagatcaatttgtaaaccgaaccacattgtgaatctttaacggtttatcctcattttagtaatacagagcaagcgaaccggcaacgtttcaaccgaaccaaatgaagaccaaactcgtatgtatagtcattagtcactctcactctcattttttcctccgggattcaaatttcgatcctgttagaggggttcacgatggttcgagcgacggttctgaatgtcggtgatcacgccagtgaaggttcgaatctagtcttgcttacgaaatctctcttcgcaatctgttcgtcttcctagttctgtgttttaatttgaaatagagagctcacatctcgggattttcagatggttttgttccgatttagatgctaaattgagtctcagaaacctaataatacctttgtggatcttcgctaattgttagtgtttctcttcgcattcgattgtttcaatttcatttgcttggaatttatgggcgcaatgttgtttttcatcgattttatgggtttcttcagtttttgctctaattacacgagaatgctagcctttccatgattaattacgattagatttgtttgaaatcggtaggtgtgcgtactaacaaagctaaaggagagaaaatggttctggaacctccgatgaacagtgcacaaagacgaaagttgggggatattactaatttgcagaatcagaagaatctaatgaatcagggagcgaagcatcagcaacaagctatattaatctcttctaaagaaaacgctgaaaatcttcaaaaggcactgagaaattcttctgttcgatatagagaaatggattttttttccttgtctttgactgtgcttattcaggctctttatcaacatgtttttgcaggaaaacacaaagctgatgaaagtcgtcatggagagagagtaatctttgttctaaaatatgaaaacttatgagttttgtgtacgtttatttgttgctaatacttattgttgttttgtgacacagtggaatcaaaagtgatctgaagaaacttaggattgaatttcagaaggttcaagaacagaatttgctacttgcccaggctaacactcgtatcttggcggtacatctcatctttgtatggttcaattggagatgattttgagaattgagtgtgatttcaaatttatttttcattattctttcctggcaggagttcaatacaagcaaagaccaagtatgctttttctggaacttaacttgctcaaacacaggctttgatcattgattataagttcctcagctgaaatttctgtgcatttcagctgaaggtacttcagcacgaacttggttgcaagaatgggttagtcatggccaggaaaatgctgcttaaggtatgttatcgatttgtatgtaattttcgatcaccataattgtaaactaagttaatcactcgtttgccaaaaaaaaaaaaagttaatcacttaaaaaattgccacattttctttccaggagcaaacccttccatgtacgcgtcatgcatcaaaagtcaaggtacttatgattattggcttttgtacttatggaataggacatttcgaccctactgctccattgttcttatgttttcttctgcattgttgtgaccttcaggctcaagcaaatgcttgtggtggggcttgcaaaacctttcagccaaatgatgcagatcatgagcatggtaagataaatcacagtcaaagatgaaatgtaactctttcggttttcattgttggttctaggaatctcttagcgtgatcacccttattgacttttttgtttcattttcagcttccgggagctccaacgctaactcattgcaaagaaatgagaaagccaacagtaaaaggttgggtctctcttgatgtttcaaccattgtcttataaaaacttttggacaatcttgttatcctggatttcttgcttttctttataggagagtttctggaaggaagaatcccgccaattccgaggtattagatataattggcagatcgggagagacatgtcagatggaagacaacattgacaacaagaagttggtctctgatagtgacaatgatgctgaaaaccatataaatgacaatgtccaaagcaaaaggtttatttattcaaagcgattagataacgtaaatatatatttgtatttcactatcttatttttgcttcttcttttttgggttgtttttgctacagatattgtgcaggaagacagagtagcagttctaagactcgagaagccagccaaacagaaaccttgcaaaaggtggttgacgccaaagaaattaagggggatgcaaggtttgtttaactgcctttttccactttcaaatttgggaatagcattcaaagtggatgaagaatagtggaactgacttgtgagtatacactttctctgtttcaaacaggttttctttgacaaagcattctgactggttaaaatctcaagaacctgagccatctgaaagcctatacgagtcaaggttggttaactgtcctttttccagtttcaaattttggactaacatctaaagcctgtgaagactattggaaatgactagtgattttgcactctttgtttcaagcaggttccctttgagaaggcgttctgcccggttaaaatctcaagaacctgagccatctgaaagcttccatgactcaatagagacaaccaagaggaggaggtcggcaataaggttaggctctgtttataactactgtacccttctgaaggttgatatagtgcgatatgatcttttgcaggtctgctatgtttaatatccaagagctgggcgttattcaaaacttgaacggtttacctgatgatcaagagattgctgcaaaggccaggtttgtagaagcacatgttatttccttttccactaacatatccctgaaccaagtacacttatgccatttgcggtgttttctttttctttctttgtggatgtcatttcagatgctctgcacgtgaacagtctaccgggtctaaacccgaagcagtagaaccacatgacacaaaagagataatcgggaaaagcaggttttgtagtgatagataattgtctgtattctgcagtattacagactaaagtgttaagactgttatctaatgcgattttattttccgcaggatatctttgagaagacagtctgcgaggtttaatttccaagagctgggcgtgactgaaaacttgaatggtccacatgatgatcaaacgattgctgcaaatgccaggtttgtagtagcttcacatgttctttccttttccaatcctcttgacttataacttattcataaaccaagtacatttatgctacttcctctgatttctttatggatgtcattttagatgctgtgcaagtgaacagtctatcgggtctaaacccgaagcagtagaaccacatgacattgaagagagaatcgggaaaatcaggtttgtagtgaatatagatcaattttctatattccgttaaagtaaagacgtaagaatttttatctaaactggtatacttgacagagtctcttcaagaagacaatctgcaaacattgaaactccgagagccatcaaagaacctgcaaatccgcctttgcatgatgacaatgttgaggagtctagtcagatatcatgttcagtttcaatggagcttaaaagagaatcaaagaagaaaccaacaggcgacgaatcagaggaaatgagaaaaacaactgttggaagaccttcaaggcaagctgctgaaaaaatcaaatcgtacaaggaaccttcacttaaggagaagatgcgagggggcttctgagtcttgctaagatcgaataccctctcgtcagcctcgtatgtattggattctgcgacttcacttttgttcagtgagctattgctcaatgctgtagatcacaatgtatattcgtagttgcttgtagataaagctagcgagtggtcttgctactgtacatgaagcggattggacggtttaattcggtttgatggagaacccctctgtgtactctgctaagtaaattctttcacaatctcatttgtaaaggggtgaaataatattttcttcatttttttcttacagtaaataaattagtaaaaacaagctctctaattatatcatgggtaataaaactcgagcggtggtaaaacaaaaacctgacagttttgagttgacaacgaaccccataattcaaagattgggagacagtgaaaagtacacaagtgaatcacggtacgcaatctaccgccttatttcttaaaagataattctaaggatttttgttcttttcttgttgttttcctataaaaggtttaataattgttactttaaaggttttgatttatcagataaacgaatggctaacgactacgtttccactgttctgcttcttcttagcctccttatcttcttgagtcagcgtactgattctgcctctatcgtcaagtctcttcctggttttgatggccctcttccctttgaactcgaaaccgggtttgttttcctctcttcctgtgattgttttatctgttgttctgagtttggaaataatcttaagtatgtatgaatatgattctgtgtgaatgaaaaggtatattggtgttggtgaggaagaggaagtgcagttgttttactactttatcaagtctgagaggaatccacaagaagatcctcttctactctggttaagtggaggacctggttgctcttctatctctggtcttctttacgagaatggtaatatctaacacatcacttctttttttaactcatagttatcatgttatgttgtgtctctctctgcttcgttttctgtgatttgttttgttaggtttggagcttaaaagattgtctttctcaaaccttaaacgatgtacactctgttttttttacttaatagaatagaaaacattgaatctcgtgtctctaaaccgccaaagatgccaacctttcctgcgttttgagataagacaaacacacctttaagccttgatatcacaaagggacaaagagcaaaaacagctgttccaatttgtggtccaagcttttaaccgacttgagttcttttttttttttgggcaaacaaccgacttgagttcttctcacactaactagagttcaaattggtctcgttttagcttgatcctcacgtgctcatctccacatgtttgaatcagggcctgtgaatgtgaagattgaggtttacaatggaactcttccttccttggtctctactacatattcatggactaaggtagcataaggtgtttgtttccacatgatggtctatgctcagatcttttaagctgtgtatcatttttttctcaggtttcgagtataatatatttggatcagcctgttggaactggcttctcctactcaagaactaaacttgttaacaaacccagtgattcaggagaagccaagagaatccacgagtttcttcacaaggtgaaagactaacttaattgtctcttgaaaacattttttctttgtgcatagatacttaggaggtttttctggttgttgtgcagtggctaggcaagcatcaagagttttcctccaaccctttctatgtcggtggggattcttattgtggtatggtcattccggcactcgttcaagaaatctcaaaaggtatgattttatttctgcaaatcaatctccaagccctttgctgtttctatatcaaatatttctctttataacagtataaacatgatgatgcaggaaactatgtatgctgcaaacctccaataaatcttcaggttcatcggtgtttgttgcttcttatatgatagcttattaagcattgaaaaattgatagacttcgtccttggtacactgacaaaaaaacagggctatattcttggaaacccatcaacagaaaatgaagttgatattaattatcgcattccatatgctcatggaatggcactgatctctgatgaactctatgaggtatggaaacatgaaatgttttgacctcttgtccccacaatgaaagtagataataagcaattcaaaaatcttattttcttgcagtcaatgaagagaatctgcaaaggaaaatatgaaaatgttgatccacgtaacacaaaatgcttgaaactcgttggagaatatcagaaggtatacacacacacactcatggaaatgctagatgatgttctgttcttcctagtaatcactaatagagacttttgtgttatttgtagtgcactaaaagaataaacaaagcacttataataacgccagagtgtgtagacacatctcctgattgctatgtaagtaatccatcttgtactcttttcaaccattgagacgtattttacaaggttgcgtttgcagatgtatcggtatttgttaactacctactgggccaatgatgagaatgtgcaaagagctcttcatgtcaataaggtaatattatacatgacaaaaggtcaaatttttcatatttttggtaacaaagtgtcgaactctttatgagaatctatgattgcaggggagtataggggaatgggtacgttgttattttgagataccttacaatcatgacattaaaagcagtgtaccgtaccacatgaataacagcatcgatggatatgcatctctcatcttcaggtcaggtttaaactctagcttttgaagaattacttcaaaattcaaatacttttttgtaaactttgtgaagttttttgtgtaaacagtggtgatcacgacatggaagtaccttaccttggaactcaagcttggattaggtctcttaattattctctcattgatgactggagaccttggatgataggagatcaaatcgctgggtattaccgtttcttttgtttcgatgggctctctttgttaactaattctattgttgtatgaactcattagactcttctatttgttgcagatacacgaggacctatgccaataagatggcatttgctactatcaaagcaagtcttttcctttagtttcatttcaaatcaacgttttgagtgcagttttcacaatatgtttcttaattgatttgtggatttgttatagggaggaggacacacaccagagtataaaccagaggagagttatatcatgttccaaaggtggatcagtggtcagcctttgtaacttgaagccaaagcaattccacatttctcgttttctccaaaccagagaaatcattaaaataagtccaaatgtttaaatctttcttttggtctgttggaaaactattgttggcactaaatgctcagccacaagagtttaaatggttcaagtttgtgttctaatttttgcatggcctttaaaacttctataacgtaaataaacaaaacaaaactataaataactataatggttcgttcatgttctttaaattcatattactccgaagaacattttagacttttgtaaaaaaaaatgaatcggctcatagcttttttgttaattattgctttgtcttttggattaaataaagcttgcgaagattgcacaatagtatttcgaaacaacctcagtcctggtattattctcaaagtcaactgcgaatcgaacaacaaaaaccgagtcacaggcacagtgaaattccaaagtgatacagttcgaattaatttccgcgaggctgcatttgaaagaacaacatggcattgcttagtgcaacaaggggggtattctcaacactttagagcgtacagaggaagtgctccaattcctcgatgtggtgagttacgtgtatatattgcaaaacgtgatgggatttatttatccgcaaatgctggtccagaaaagctcgatcaacgttggatgaaaaactaatgttttttcttttccttaatgctaatttatgtctatgaagctcaagttttcttgcattttggtgcttaattggtaattaggaatttatgtaaatgtgaagacctttttaaaaaaaataaagatatgtattttaatagaaatcagaaagatcagatgagatttttacttttaattaacttactaaaactttaattcattttcttaacttttaaaagaaaaaaaaaaaagaagaattaaaactagtgaaatactatcattaaaaatttaacctattttaggacaaaaattcaaagaagatttaaggaaacttacttaaagtttgcttttagagaatcagagacaccaatgattctatatatctccgccaaatggtgtttaaacatcaaaccaaagtgattcataatctggcaacaattgttgaggatgagaaaaactttgaaaaacatatgaagcctagctataaatatctccaaagacatacacaaagataagtaataagtattttgtgatcctccccaagtttaactagattgattcaaaataatgaatcttgtatttagctttctgttttttatatttgttttgtgttgtgtgtccaaagaagataaatgtcataaaaacactgtagcttttcaaaacaacctttttcaaagtcatagtattctaaaagtccattgcaaatccagaagcgacgatttgggcgaacattttgtgaaatttcaagatactgcctacaattttagttttcatgataatctccttttcacgacgatattcaaatgtaacttgtggaagggagctaggatggagtatcataggaatattacagcatatgaaggtgatcttctttatagatgtggtgcattgtactcatgggatataagagatgatgctatttacttgtcagaaaacgataacccggagaaactcatgtatagttggattaaaggttgatgttcgaaaagctaaattctcatttcatcttatgaaataattatgtttcctttttgtgtgttagaattgacaacagaataatggatctatctatgttttcttttgatttcggtttatgagtcatatctacattttcaatttgatctcatcgaccaagatttacacagtttgtgtctaacatgtggtgacgaaattaaagcagcataaattctgatttgttttttgtttcttgtttctttcaaacatgggctacagtgaggtttttctttttgttatgatttacaaatacacactcttctaatatatatgattcataaatcgaaaccaaatacaataattgcccgacatatttatagatcatgaatttctcaaaaagaatgtaaacacagtaatagttgccccgtatcctcgctaagtaaatgttggcccagttgtcaacaactcaagatggattcctaaagtacttcaaatggttttaaacttttaatgcacactattttactggttaaaattcttcttttgtatttatttttttctttttttctaacggttaaagcattgaaattttggtcattataagtttacaaatctcaccttttctatatctattaaaaaattgaaacgaaattaaaaattatgcaaaaattaaatagggatattttgtgtgaaattgataaagtaagctaaagatatggagaatggtaggattggttttgttgaataaaacaaatatcaaaccacggaaaagaaaatcgtaaaatgggagtcatattctcgctaaaactaatacattaatgataaaagaataaatgatattaattagattttatcaaatttccaatccaaatatttgacaaaccaaaacctgaaccgggtgatgcttgaaaaccgtcttgaacccggattgactttgagatattaatgcgacgaatcacgaatgtgttgcgtttctgtgggatccggttgcttgatccgtacgtgagcttaattaacagaatatcaatttagagcatctgtcatttcaatttatccacaaatttttttagttgagatatacatataaaaatcaaaaatttacatatatatattttcactaaatatttatgtttggtcaaaaaaagttttacatatctaaagaatatttgttgtcaaagcatattagaaaattcactgcaaagtccaacacaacgttatcgatgaatggtgtaccgtttctctttttttgtttttgcctttggccttaccatgatgagtaacacaggatccgttaggaacagaaatgtactgagtgacaaaaacgatcttatatatagtccattgcaaatccacagaccaagatatgggataccatatctctcaggtaatcttaacagtatctgtcaatatcagaaatgtcatcaattccgaacggtaatcttaaccgtaccacgtcgagttatatgatatattgatatatcacacaaagccaatcttgatatcatctgcattgataactattaagatgaagaaaaaaaaaatatagaacactgaacacgctgattgcaagtttctatttttgtggcagaaccgctcgctaatgaaatctttgaatagtactatatatttgttatagtataattcaagtaatatccccttgaaatccttaagaaccattatttttttaatgggtaaaatgccaatcaggtgaatggaaaatacacaaataaaatagaaaaaaaaagacagatttttacgggcagccttctaaacaacatttactcaaaagttgaaaacatttataaatccttcaaaaatatccattacttagaaagaaagaaaaaaacgtaaaaggaaagaaagaatgaagttacgtgtgacgatatttctgatggttgtatgtttatacaccgaaaatgtgataggaggatcggtgtttatctataacaacctgccccacggacactatttacaagtgaaatgcaaatctggagacaccaatcttggtttccacgtgagacggcccggtcggttttacaattacgctttcactgatcatatacttggaaaaacgctttattggtgtcatctatggaaaggtaaaaactgggaggatcatgtggtgatcgttgcctacgaaagtagggatttgcctcatcgcgacaattgggtgaggtggtcggccagggaatctggcatctatcaaaatgttaacggtgaggagagattccgtttcaggtataattgggatggtcacgtttaaatttgggtttcattgttaattatgattccccatctaattattatgtatattactgtaatataattcctactaatgttgttatatgttctctttgattcgatgaagatgtaagaatcagatatacctacatattttagaaattatgtacgtgtctctgttaattattattttaaatgatagattactacttcaatctaattttaattaatttttgaattagacaaaagtataaatatatatagtcattagtttttcagataactaaatagaccgtaactagtaacatgcttcgcttgagtttcccttaagcctttctcgctgtcatatatcttatgaaagaagacatggtttgcgttgctaaacaaatttgttatttcttgctaatatctaatctaagatgtcgacgaaaaacaaaaactaatctatacgagaatctcactgtatatttagttttgctagggatgtttagcttgttatcatctcacattctaaattagaaaatacttaagagtaatacataggatacatatataagccaattactctcttttttcaccgcaaatcgtaagagtttactatacataaacctctcgttatctattgatgtttacttgaaaactcataaaacttgacagaactagactaaattatgatatagccacctgaaaactcttcttaatatatcaacccaaatccatcgaattacacaagaaatgtgttattcagttccaaccctcagaacatagggttatttgagaaacaatgatgttctctttgtccatgtctcaaataatttgaccccaaagaaaacctcaagcaatcgagacaaggaaaggcttattcttgatcaaagcattttctactactcataactggttgaaaagtgtgggatactcagtttcatctgtttacttctactttctcttttgatttctatatttcagaaacgtgcgacgatgaaagcagacacgagatcaagaactactcactcaataattaaaagctttcttctagttaaacggaaatttatataccaaccgacttgctctccttaactctcccattatcctctcttgacaccgcttttgtactacttctttgatttatctaaaactatataaaaaaaatgggcaacgagttttatactttaataatcagagatttatcaactaaataccaaattaattagatatgctataaatttgtggcttttcgtggggattctttcggttgtaaaataaacaatataaaatgtttattaaatgatttatatgaaagttatgaattatacaaacactaaaacttatgtttgcatatatttatttttgtggtcgagttagagtatcataaacagtgtttataaactgtttaatttactagtagtaacaaaattaactctgaattatatattcgtagataataataagatgaaaatattgaattttaaacttgtcgtcatgggtccaaatgtcccaataaacattgagccggtcctgattgtgttattatagtaccatcagtccatcatcacaaaaattctacaatatcgctacgtaatttcaaataatggggacattttacgtactatgattattatatattttgccataagatgtatgcatatctgcaatacagtatatgaatatcctgaaatagtacaatgttggtaaataatactacttcatcttccaataatttaatgtagactatgtagttgttcataattttgtttgtgaccgcctatgatgggtgaatatctgactttttgataacaaaacgattgtttttagttttgtgtgtggacataaacaatggattatgaagagtggatactaatttagtaaataatgttacagaaagacactgaataggcacagtcaaataaactaaacatccaagatatattaacaatgaacacttatcaatgacttgatcaaggaaaattttcttttattaaaaatcagtaaaaaaaaatgctagtttacatgcactcgtaaacaaattgtttcccaacaagaacactcagctttctcttatagatttcgattgattagttttgacatcaccttatagttttgtttgattatttctttttccaaaacttacttatgtatatagtactgattactcaaagtatgtactaattaatgtcttttaacaaaaaagaaatgtactaattaatgtctatttgtatatatattatggttacatgcagtccatgttagtcgactcttccctaatgattgggaataagcaataattagtcactatcatttttatgtaattattagctacatccaacaatggagagtagactttatataaaattaactcagagaaaaataaaccctgatttcatctataagaaaaggataatggccttgttttatgcatatatgtcttatgtgtgtgtgtgtgaacatgtcaaaaggtcacttatcaaccaaacatactaaattgaataaaatgtatatttaattcaaaagtattatcaagtactcaacattcatcctagttacattaaagtaaattaatctgtaaagataactaaacgtttattaataaataaaaaacatttcaagcctattggtccatttccattcccgaaatcattatcttttgtctcagttaccagattgtccactttcaaaaatattgattgataatctgaaaagtcttggagatacgatgagctgcacttgctgattcgtttttacttactaatatattctttacgtgaagtgggtgctcttcacatcatgcaaccattaacaaatcggcatatacttcataatacataaacacgccaacatgtgttagtcatattattatattttgaaactgtatcttataacaaaatcaagagtttcagtttacagttttttaggacaaactatagtactagttgataatacgtgcggtgcgaatgtgcatgtatcttgaaaatgtaaaaaaaaaaaaagtctacaagactacaaacattatcaacttacttgcactcatcagatgtaatataactaacaaagttaaattaattaagtcttagacatgcatacgtgatacgtcgtttggtatttgattcagttacagtctataaggccaaagtctttgttcatagatcgatttccactttctttcttttttggttatataagataatctattttcacttgatacaatatatgtttggtcattaagaaattctactatattttggaattgttttcaagctaagagatgacttggtcattatcccaaattattgtctcaagtcgagggaataagtcgtcgtactcttacgacaaattagttggacttaaaaggtttttcttttctttctttctggtgtgtatcaattttagaaattaataagaatagtgtatttattcattaaaccatgtatgtacgtagagatgcgtacgtatacgtattagaaatatgccaagacgatactaaaattaaaaaaaaaaaaaatggagtggagtaatggtagagagagacgacgaagagagagccgtagattccgtgagagccaggcttgcactatcattaatttacacattcgttcacccaaagtaatctctctacttccattttttttttctttttcttatcttttgattattaatattttctcaacgatggtagaatagaggatcacattaaaaaaaatcaaaccaattttcgaaatttactgaatattataacaaaaacaaaacatgtagttctttcaacagaaccaatccaaaaataagttgttatacagagtaaattaaagggataatgaagagacaaaacatacatcactcaagtaattgtctaaatttacacatcttttgttatgttttttttgtctctctctctctctcctctctctagctcttgtgtattgtgatgagtttgccaagttgggaagattgtaatagagacaataacagaagtactaaaattttagaggctgcaaaaagacaagtccaacatattccacacacttgagaatgtggtgtctctctttgactcctctccctaaatcactctctatttatgtatgcatcttttcaatccacacacatctctcttaacacacaaatacatatttatatatatgtaatccttaaagctgatcatctccatcttcaatttcaattctctctatttcatcttttccgattgatcaattccaatattacgtcctttttttcttgaatctctctatatactcaatggaagcagctgcggaggctgtatcagccgctagggagcaatcattgatccttaaagggaaacggactaagcggcaacgtcctcagtccccaatccctttctctatcattcctcctatgtcttcgcatgaaccggatgctgaagaagagtctactagtcttgtttccaaggagaagagtctcaatgatgaaatcaacaacaataacatcaagaataataacaatactttgatcaatggtgttacatcttcatcttctgcctcttcatcttccaacaacaatgccacattaaaggccacggctgacgaagaagatcaagatatggctaattgtttgatcctcctcgcccaaggtcactctcttccccacctccaaccgcaaccgcacccccaacaacaaacaagacagcttatgatgagttaccaagattccggtaacaacaacaacaatgcgtatagatctagcagcaggaggtttctagagacatcttcatctaacgggaccacaacgaacggtggtggaggcagagccggttactatgtttaccagtgcaaaacatgtgaccggacttttccgtctttccaagctcttggtgggcatagagccagccacaagaagcctaaagccgctatgggtcttcactctaaccatgaccacaagaagtctaactacgatgacgccgtttctctccatctcaacaacgttctcaccacaactcctaacaacaatagtaaccatagatcgcttgtggtatacggcaaaggtagtaataataaggtccatgaatgtgggatatgtggagccgaattcacatccgggcaagcattaggtggtcacatgagacgccatagaggtgcagtggtagccgcagcagccgcctctaccgccaccgtatcggttgcggccattccggctactgcaaacacggctttgtcattgtcgccaatgtcgtttgatcagatgtcggagggtccaattcaggctcccgttaagagagcgaggagcgcggttgtgtcgttagatttagatctgaatctacctgccccggaagatgagaatcgggtcaacggattaagctttgcttcaaagcaagaacacgaacaagaacatgaacaaacacaacagaagaaacagagagaagaacaaaagtctcttgtcttgtcttctgctcctacattggtggattgccattactaaaatcaaaattcattaatacctaatcaaacaaaattaagcagaaattgatgaaccatttttttaagaaagttactgattccttgctttgtacaagacttgcaagattcttctctcttttttttcctttcttacttccttaatttcaaaggaaaaaccatatattatacaaatatatatactcccattaggcatatgcaatgctttgtaattacatccaagttaatgtaagatcttttggttacacaatataaataataaaaaccacattcgtttactattggggctttctcataaagagaccacattcccaacatccttctttgtatatatttaaatgaatcaactaaaatacatagaaataaaaaatttctctatactattattttcagttgatccattcaaatcattttctaaaaacttatgtcacgttcatgtatacttttagttaaagaatgtttttttttttttggattggaaaaaaaaaaagctcaaaccttttaagaaaataaagctcatgaaaagagcgtgacgggtccaactcttttttttggttaaatttgcaatttaaacagattacttgttcatgttgacattgaaatagcaggtcgagagcgagagatcaaaatgcaatgtattatgcccttaatttatgcttttatatattttgtttattaatgtcacatatcttattatggatatactttgcaacggatcacaaatcttaccctgaaatatgcaacctgttaccggaattgaaatttcataacacactattctcagctcttcaagattcagtgtttcattcgtgaagacgaatgcatgttgttctagtctcgatacgagaaactgcgtttatgaaaataagaaaaagaagaataaattagcatgggcttgatttacacccgtccgtcaccgaaatgggctacaaataaatcatgggcttttaatattctaacttagaagaaatttggcccattgcttaaacacgaggcacaaaccatatattttttttgagccaaaaaaaaaagtcttgatattttagcattttgtcctttttggagacagtggtgtcagatagctgacaacctatataaataaataaataaaatagagttttcttttactcttactttctttattagtttcataataatatgtgtaaaagtaagagttggatatttttcgttttaatttctgccttcgaattagttacgcatacaaagcataagagacaagagacatagcgtaccaaaaaagaagaaaatagtgcaaaaatatcatatagttttctggtacgcctcatcaattccacccccgtacaccataattatatagaatttcaatatcgaaatgtcgacagcaacaaaattcaacatgtcgaataatattgttttaaatattccattttactagaagatgaaaaaaagagagaagaaagtaaccttttgtctttgtcaccttgacttaaacagtaatacaaaccccacaagtaaattattcaagttcaaatcgtagttaatgtttatatttgagaattgcaaatggtttaaacgaaaaccaaactacgaattacaaatttgaagaggacttgtactagaaaataaatagagaaaagaagaataataaatagtaacagaaaatgggaaagatgatgattcgtgtggaccaagtctctcctcccctttagcttgccttattggtaaagtatcctcctgcaagcaaacgtatctgtcactccttttttattttctttcaccttctatcttattctcattaattcttcttttttggtcaacttcatgtatagaaaataataccaaaattttttgatatagtaaaactattagaactgaatttcaaacaaaaataatacaaatttaagcaaaaaaatattaaaaataaattttaaagaatatttttacatataataaatatacatagttgatacttttatataattattaatttatgatattaatgagaccatatatttacatagaacattcaaaataattattatcttattaatctatcgatatatatcactttttatactagtttttggaatcttaataatttattaatttgtagaagttattaatttatagaggttttactgtacatgtcagcatttaacttttgataagcacaaaaccattacatattttccaaccagattattttctatttatcctagcgtttgtaaatctttgaactacaataatttatcaaatacaatataagatttttatactaaagatgtatacaatgcatttaacattaaaggaaacaaataaactctaatcttttaaaaaaatactttaccttttaaaaagagttattaatcacataagcaatatttaatttttcattatttttttcatcatctgtctaacatattactttttaaaaaatatttatcgttggatacttacttttcagaccacacactaggactagtggttcctttattttactgcatagaacgacaacaaaaagctaagcagtaacattttttagggttttattactgcaacactcaaaaatgagaaattattattaaaattgaaaatgaaaaatagtaatcgcaatccgaaattactttttttctagccttctaggaactcgaaaagaaagcaaatttcttgcaattgaaggtacctgcttctctttttctggtttgtctggtttcatattaaaaaaaacattttgacaactatatttctggtttgtctgaaaaaattgagaagaaaacctagaaacaaatacggtcttttttttttctttttatgggtcgcgaatctctggctgttgtgtcctcgccgccatcggcgactgcgcccagtactgctgtgtcggctacctcgcttgctcctggctttcgatttcatccgactgatgaggaactcgtgagctattacttgaagaggaaggttctgggtaaacctgtacgcttcgatgcgattggagaggtagatatctacaagcatgagccctgggatttagcaggttcgttaggtttcttcttcttcatttctgcttatctctatgatttgggggtttctgtgaatttgatgcttctgatttgggatttttgtcgcctgggcttattggttgttccgtcttctggctcaattctgggaaatgagtttagcttttacgtgctccgattcgttttctgggaaattttttgttgcagagaagattctctgttcgtacctggcgctaagtttaggcaattaggctttaacactgtgaagacattccatccaattgacttcttaactgaagaaagtcgaattttcttcagattgctttaagaatttcgtgtttgcttgtgctacagttatgtttgcttgtgctacagttatgtttgcttgtggatcaggaaatgaagtttgttgcttgtgtgtttggctatctgaagtgttctcaagtatgatctgaaagaaaaaaaaccttgtgatgtgttgtgtgtttcagtgttttcgaagttgaaaactcgggaccaagaatggtacttcttcagtgcgttagataagaagtacggtaatggtgctaggatgaatcgagcaactaacaaagggtactggaaagcaactggaaaagacagagaaatccgccgggatattcagttgctcggtatgaaaaagacgcttgttttccacagcgggcgtgctccagacggccttcggactaattgggtcatgcacgagtatcgccttgtggaatatgaaactgaaactaacggaagcctgctggtattatgttgtccaaaagagttacttttgaattggggttatctcattttgtaagaatcctatcttatcttacttctttgtctgggtgcagcaggatgcatatgtgttgtgcagagtgtttcacaagaataacattgggccaccaagtgggaacagatatgcgccattcatggaagaagaatgggctgatggtggaggagctctgattccaggaatagacgttagggtcagggtagaggctctaccacaagccaatggaaacaaccagatggaccaggtttgtactttctttatactcaaatgtttcttatatgcataacctctgtgatacatccctctaatgtgaatcatctctcttgattcacaagatattatatttcttattgcaaaagctctttgcttctctaagtgctgtttcagtgggctgatttacttaaactgcacaattccattaagtttgctatcaccttttgtagaactcagctcaaccttacagctttatctaatgaaaggtctctcttgattcacaagatatctaatttttctttatggtcctttttctttgagatttatcctttgattacatgatatttcagacttacaatcttcgtttggcattaaaggtgctcaacaagagaaatatttattgtgttttggttaatctgcaaagtcgatcaacgcgttttggtttgagatattttatgtctgttggggttcacataacttgtaatttgttgtaggaaatgcattcagcaagcaaggatctcattaacatcaacgagctaccgagagatgctactccaatggacatcgaacctaaccaacagaatcatcatgagagtgccttcaagccacaggagagtaacaaccatagtggttatgaagaagatgaggacacactcaaacgcgagcacgcagaagaagatgagcgtcctccttctctatgcattctcaacaaagaagctccactacctctcctgcaatacaaacgtagacgccaaaacgagtccaacaacaactcaagcaggaacacacaggaccattgttcgtccacaataacaaccgtcgacaatacaaccaccttaatctcatcatctgctgctgctgctaccaacactgccatctctgcattgcttgagttctcacttatgggtatctccgacaagaaagaaaaccagcagaaagaggaaacttctcctcctagtccaattgcatctcctgaagagaaggttaatgatctccagaaggaggttcaccagatgtctgttgaaagagaaactttcaagcttgagatgatgagtgcagaggctatgatcagcattctccagtcaagaatcgatgcgctgcgtcaggagaacgaggaacttaagaagaagaacgccagtggacaagctagttaaaccaccgcaacatctctccaggtgtcttcttcttcttcttcttcttctttgcctcttagctgtaatcttcttaatagtatgagctatggatgtagcttcttcagacggatcagaaaccttatgaatctctgttgtaaaattaggataaaacggaacggagccaaccaactaggtctttttattttatccttttttactttggatgtttctgcatcttttgggaacattttcaggctgatccattgtcgtatattatcatctatctatctagtcttttcagacaagaactcgcttttgtttggtttcctctcaagaaatgttcagtctccataaagaaagctttttccttggggtaatcattagtggtcagatatgagggcataatcgtcattgtcatttgaaatgaccttctggtcttccggacaagaaccactctgttgcttgatgtttctgtgtgactgtctccacagtccacagggaagagagcttcttaggtaaagtcgtgattagtggaaatgattgagggtataatcgtcattgactaattcagcgttacgatttaggaatgtggttccgtcaacgacgttagaagacttttgttacacgtaatttgcaattatttgttttttctctaaaagcgaaaagcgcttggtacgattcaagcctggattccatctctctcccattaagttttcaagaagaagttttgatcacagacgtattttcgaaatggtttcatatcttactaggcaatggaatttcgtaggtgttatagagtttggtgtttatattttacttttaactacatcgtcctattatacggaacctgtcttttttttttccacacggaaccctgaatgattgtactttttggtaggtttgttctttattcgagagttgtaaaaaaacattatttacttttaagatgactacgaaagtgtaatttactaaattacttttcattatttactcccaagtataatttactacaaaaagctacgcagtaaaattttgctagggtttattactgcgacataatgaaatgtaaatcgaaaattggtatcgcaatccaaaatacttttttgttgctctctactagcctgcctttctgggaacgcgaaaagaaagacaaaattttcttgcaattgaaggtacctcaaatcttgtgcttatctctttggtttcttcttcgtcaaaccatctgcccaacttgtgtttttgttcttcaggtgaggtttggtgaaagggaaattgagaaaaccctagaacaagtacggtctctattttgctttaatgggtcgcgaatctgtggctgttgtgactgcgccgccctcggcgactgctccgggtactgcttcggtggcgacctcgcttgctcctggcttccgatttcatccgactgatgaggaactcgtgagctattacttgaagaggaaggttctgggccaacctgtacgcttcgatgcgattggagaggtcgatatatacaagcatgagccctgggatttagcaggttcgctgggtttcacttccactctctcttggtttctgtgcatctcttccatttgggggttttctgtgaatttgttgcttctgatttgggatttttgtggtctgggcttctctcgcttcttctgactcaattcttggaaaaaaggttttacctttttaggttccgattcatttttctgggaaattttgttgcagattctctgttgttacattttgctatgtttaggctataacaccgtgaaggtagtatttcatctaatcgacttcttaagtggttcaaatattcgttttttccagattccgttagaattttatgcttacttgtgctatagttttgtttgcttgtggttcaggaaatgtaaaaagtttgaagttttgagttaagtctggttttaagtaatttcttagttgtgttgtgtgtttaagtgttttcgagattgaagacaagggaccaagaatggtacttctacagtgcattagataagaagtatggaaacggtgctaggatgaaccgagcaactaacagagggtactggaaagctactggaaaagacagagaaatccgccgtgacattctgcttctcggtatgaaaaagacacttgttttccacagtgggcgtgcaccagacgggcttcggactaattgggttatgcatgagtatcgccttgtggaatatgaaaccgagaaaaacggaaacctggtggtactgtattgtccaaattactttcgaatttggtttatctgataatttccaaaagatctcaattctttgtttgggtgcagcaagatgcatatgtgttgtgtagagtcttccacaagaataacattgggccaccaagtgggaacagatatgctccgttcatggaagaggaatgggctgatgatgaaggagctctgattccaggaatagacgttaagctcaggctagagccgccgccagtagccaatggaaacgaccagatggaccaggtttgtgatttcttcttactctggcttcattacccaaaccttattagtttcattcaatatttcttgtatgcaaaaaactctgttgaaatactctctttcttagttttccattgggctgagtgagtttatttaactgcattagtctatttatgaaccaatctactatttcaacgttatttagtgcaaatgtacaaatttatctgatgcatcatttctcttgtttcacaagatattatatttattatctgcaaaactctgtgttgaagtgaagcttctcctaataactgtttcagcgggctgtgacgctagtaactccatttagtctgtaaccaactcttgtagaaatcaaccttataggtttatctgatgaatcaactctcttgatttagaagatatctgaattttcggtggtcttttttttttttgtttcttgggctttattcttaatcatactgattacaagatcgttcaaactttgcatcctcatttgaccagcaattttactgtgcatcatatgaactcacttaattgatcagtaaatgttgaccagaagtagaatgatttgttgttttagtgaaaatgcagttttaatccttcatcagcaaaattgattgaagcatttggtttcagataatttatgcgtcgtctggggttcacttgtaatttgttgtaggaaatccagtcagccagcaagagtctcatcaacatcaatgagccaccgagagagacagctccactggatatcgaatcggaccaacagaatcatcatgagaatgacctcaagccggaggagcataacaacaataataattatgatgaaaacgaggaaacactcaaacgcgagcagatggaagaagaggagcgtcctcctcgacctgtatgcgttctcaacaaagaagctccattacctcttctgcaatacaaacgtagacgccaaagcgagtccaacaacaactcaagcaggaacacacaggaccattgttcgtccacaacaacaactgtcgacaatacaaccactttaatctcatcatctgccgctgccaccaacactgccatctctgcattgcttgagttctcactcatgggtatctccgacaagaaagaaaagccgcagcaaccgctacgtcctcacaaggaacctttgcctcctcaaactccacttgcatctcctgaagagaaggttaatgatctccagaaggagattcaccagatgtctgttgaaagagaaactttcaagcttgaaatgatgagtgcagaagctatgatcagtattctccagtcaaggatcgatgcgctgcgtcaggagaacgaggaactcaagaagaacaatgctaatggacaataaaggctctaaaaacatctctccaggttacttcttattgcccttcgccttttatttagctttaatctccctaatactatgacccatctacatagctcctctagacagattgcgaactgtgtgaatctctgttgtaacataggataaaacggattcgagcccctgagctgagtgttttatccttcttctttttttgtgtggatgttcttgcatcttttgagaacattttttaggttgctccattgtcatatatcatctatctatctagtcttttcagacaaaaactatctttaagttgtctcgagaatgttgtcttcataacacactgagccttctctggggtagtagtggttaggtacgagggcataattgtcatttcctttgcattatcatttagatttccagacaagaagaactttctttgtttaaaataattgggaattatgttcggtctccggtaataccgtggttaatggtaaggatattttcggctaggattacgaatgtggatgcgtcagcgacgttagaagactttcgttacacgtaatttgcaataattttaaaaaagcgaaaaagtgtttggtacgattttttcaacttcaaatatattctctatttatttactctattcaaacaaaattgcatatagtatagaattttagtcatcttgatatttattgaagtggataaatcttcatttgcgcgaaccaaccaactacctcaacaaattctagagactttaaaattgatgactagtgcaagacttccacgtgtcagtttaataaagactgtcacccgaaaacagtcacagccagtcacatgatatgctctcgcggcacactttcctggaatattaaaacctcacggcgtgaaacttctttcgcacattttctagctacggtcgcttagctccgattggttcgtcgtcaccatcactcgtcttcaacgatttgcttcttttttttttctctctatttagtcccattttcctcaatttctaaaccccttatttcgaaatcattgttttgctctttcttttgattcgaattcgacagaacagctcttttaagttattcataaaccttgtgtttgagttttggtccatcgagtatatgggtcgtggctcagtaacatcgctcgctcctgggtttcgttttcatcccacagacgaagaactcgttcgttactatctgaaacgaaagatctgcaataaaccttttaagttcgatgctatctctgttaccgatgtatacaaatctgagccttgggatctcccaggtcagttcttcaatatgttgatgatttgatcgatattgtataggaaccgatgatagaatttgaattctgttttgtattttggtgggaaatagacaagtcgaggctgaaaagtagagacttggagtggtacttcttcagtatgcttgataagaagtatagaaatggatcaaagacgaatcgtgcgactgagatgggatattggaagactacagggaaagatcgagagattcttaatggttcaaaagtcgttgggatgaagaagactcttgtttatcacaaaggtcgagctcctcgtggcgaaagaaccaattgggttatgcatgagtatcggttggttgatcaagaccttgataaaactggtgttcaccaagtaagactttgatctttttgagttccttgttgtttaatgggatttgtgttgttgactttgttgtggaattgtgggaaggatgcgtttgtgctttgtaggatttttcagaagagtggctccggacctaaaaatggagagcagtacggtgctccgtttgttgaggaggagtgggaggaggaggatgatatgacatttgtacctgaccaagaagatcttggaagtgaagatcatgtttatgtccatatggatgacattgatcaggtttgtgttctagtatttgatatctcttgattagcttttggtcgaatgttgtgttcctttgtattcattgaggaatgaaagaagcttgtgaaaatctctccttctcattccctgatttggtcagagttccatctaggctgtttattatgttcttctaattttatgattcgaattttatatcttgcagaagtctgaaaactttgtggtctatgatgccattcctattccgttaaactttattcacggggagtcgagcaataatgttgaaacaaactactcagactccataaactatatacaacaaacaggaaactatatggactctggtggctactttgagcaaccagcagaatcttatgagaaagatcagaagcctatcatccgtgaccgtgatggtagccttcaaaatgaaggaattggatgtggggtccaggacaagcactcggaaactttgcaatcttctgacaacatctttgggactgatacatcatgctacaatgattttccagttgagagcaactatttgattggtgaggcgtttctggatccgaacagtaatcttctggagaatgatggtctgtacctggaaacaaatgatctcagtagtactcagcaagatggtttcgactttgaagattatcttaccttctttgatgaaacttttgatccttcgcaactgatgggaaatgaagatgtttttttcgatcaagaagagctctttcaagaggtataaaactttctatttccacttgcttttgtttcctttattttttaactcacgtttcaaccaataggttgagactaaggaactagagaaagaggagacttcaagaagcaaacatgtggtggaagaaaaggaaaaggatgaagcatcttgttcaaaacaagttgatgcagatgcaacagagtttgagccaggtaaagaattatgttaccacaatcagactttacccccatttgttaataggtgtgacgtgttctgtttagatgatggatcaatttctgaaaatgcagattacaagtacccgttactaaagaaggcaagccacatgttgggtgctattcctgctccgcttgcaaatgcttctgagttccctacaaaggatgcagctatccggttacacgcagcacaatcatcaggttcagttcatgtaaccgcaggtatgatcacgatatcagacagcaacatgggctggtcatacggcaaaaacgagaaccttgacttgatcctttctttggggttggtccaagggaataccgcccccgaaaaatcagggaatagttcagcatgggcaatgttaatattcatgtgtttctgggttcttctactctcagttagtttcaaagtgagcattttggtctcttccaggtgataggtaaccctttcttgttcaaacaagacttttgtgtttgtacattgatatagatgaacttgcagtgttcaatgttttattctctaataatattgaataaaccccatattctatcatggttgacaccccaaaaaatcgcattttatgtcacaaatacaaaatattgtataagtatgttcgaatcgggttcttaatttgattttagtttggattcttttcttctattgttttaagtagattagcttgtctgtggaggaccaccaatatatgaacgaactacggttaacagaaataaaatccattgtaattgttacaaaatttaaattttaaaatcagagagtaacaacaagacaactcccaatgatcaaacccccttcaagcaaaagatcgcaacactcgacctttccccaaatctctccttcttcacgcctctccacagtaatctccgcacaccataattctcttttctgaaaagaagcgtcgtcatcgtattccaataccactatcaaaaaaagtatcaacattttaccgcgactaacaatgtatgactcatcaccacctaagggaagtttttcaagacccttcaccaccccccaggttctttgcttgggatcatatgttcttaaaatatatttatggcgatcgtagacgtacaatatgtttcccataacacattcattgtcgaacaaatgataatgcttgatctcctccttgtccattaatatatcttccattagtttgtgatcgcagttattctcaaaactgctggggcccctacctgcagacccaagtacgacgattagagggatgttgttttagtgactaccgggaccaacataaatagggatccttgggtgtatacttgaagaacagaaataaagaataaacaaaaccatttaaactatagttgttttattgattttcactagggatctttttcttttttttttcttgttggtctaagtcatgttatcaaaaaaatatgaaaaacttgcctgccgtcgttgataaacttgtgagccacctatcatccgcctcccagcctggtttcgtaccatccgcccacttttccgttcgtaaatcaaattccacaatggtagccgatgcccacacccttccgacaatgtatatcttctcgtcaatgaccttagatacattcgtcataagcccaaccggcatgtcggcaacaagacgggtcgtgtgagttcgacagtcgatgcataacgcaatcgatgatggcggttgggcttcccactcctcaacattccagtcgtatcttccacccattacaaagatgttggaacccacaacaacatagcttgctgctgtgggcataggcgggagtgacgagataaggaccaaccggttttcaacagtgccgggcatgtttcttttggttctccggttaagactataccaacgagcaacttcgagtatacaatcttcgatgagaacatacacacaatcttcggtgcagccgaggagggaccgtgtcttgtatagtcgaggcgacgcaacgagagatcggaattgcttagagacgagggatagcatcgaatggttgtacctcgggacacgtggcgctatacactccatgatcacgtcgtctggaattgacgtcatcacagaaggtggtgtcttctccttctcgtcttcggaaagcatctcccaatataatataaagagataggctcaatcgacaatatgatgttttttcttctcagctttgcaaatgtacatatatatagatgagatgatggaaaagatggatacgtaggtgcaaggatgattcatgaataaacataattatacaagttttatccgatgagatcttactgttagcaattattttaaatttaattattttcttagtgaattctattccatttatgaacttaaaattaaccttcaatatgatatcttaatttataaataggaaatctttcataattttaatatatggtgcttttctttatattttacttagatcaaatatttgcttcttaattactataaaattataaatgtctagttgtggtccaatacatataattattttattaaaaaatgaaaactaattttctgtttcaagaatttttgttctatttggcccacaaaatttcatcattttcagaaaaaagagtaacattgtagatagatttatatataacatattactaggaaattgtgtattatcttttttaccggggcaaatcttaaaattcataaaatttatcatgcatcagactaataccacattattaatataaaaaatagttttagtgtactgttttttaaaaaaagaaaaaattgaactaaaatagatccaaaatcttgtgtctggagaagtaaaattatttgtagaatgattgtaaaatgatccccacgttaacatccatcttgtgaaaataaatacttcaaaccatgatatttctcacgaataacaatttcaagaagaactacagtatcacgtatctccctaatgatagcacaagatccttctttataattaaaatagtgaactgtagaaagtcagagagcaacatagtacacacacagaaacacgtatatgtgtatcatgtatgtggaatagattcatgtatgcgatacccaaatgatcaatagggttttatgactcttcttgtttcatctcggtcttgatggctaaagccaagtgatcataagcttgagaccaagcaccttccacttcttcattgtatttctcccccaacccctctttcaatgtccttagcaaagcttctttcaccacctgctttcacattcacaccttattaaaatgcgttcaaatcgaaaatcaaaatcagccaaaattaatgtgtatatatatttttttttaacataacagacctcgaagtgagggtcaataacgccgcttttgagatgaattgagcctaaatattggagggttgtgtcagccactaccacctttccttcctccctcagctgtatagctgtttcacatgtctacacacaaacaaaataaaataaaaattcatacatgttatgcaaagtctttttcttttttgtctgtctaaaacatgttatgcaaagtcttagaagccaaaagtgagttgaaccaaaccaagtcataaacccaaatttaaaaagtaaacggaatttggtttatatggttctattataataagattagcaaaaaagtaaaaatccataaagcgacccgaaccacttggattcttcagtaacaattctttattgacagagaaatctatgtttgttcttaaaaataaaatatcacagagtattctttactagtatgagatttttattctcaaagaagaagacaaagccaactagccaagttcaaacaaaatcgcaacttgtgtgcacatggctgcgtcaataaatgacaagaaaagttaattcagactactattttctattatatataaatggtatataatgagtaaataaagattcttagctgtaaataatgaaacattctactttcaattttaaggaagtgtaagataatgatacagtatatgcaagtgattcacatatatgtagatgtggaaaatcggaaagtaagtaattaccatcttgaagactttaacagcatgagctttgagtttaggattgttgtgagggacttcatctgagtctcttaggaaagagaacaagccttttgctgctggtgctatctccagtatcctatcacaattatattgttcattagctcgcatatataaacaacatgtaaagagcttatatataactaagtatatatggttactgtgagaagaagtgaaggctgtatttggggatgtcttgtttcagtatctcccacgattccttcaccaaagcttcttgcttctctgtaaacccaatctctcccatctctttctctctttctttttctctcacagtttgaaaaaaacacgaatatttgtgtgtttatatgtctgtgtatctatatatatatggtattcaatggtcctttggttgggtctgtgagctacttatgtagaagattctctcaaattttattttatttgactaaatatgtttattttgtagtaaaacatctactacctaaaggcatagtctctaaaaggtggacacgcgtagccaagaaatatggatacacattatgtccgtccgatcagtctagatagacgtaggataatacatgagttagattgatacaaataagttaagattaaaaggaacaaacaaagataaataaaaacttgcattgtcttctgcgtagtaaaatctccatcccgcatagcttcaatcatttgttcttttctactttcacacaaaatcagctgtataattaagaagaaagaaaaatagtgacaataaattcaattcatcgcttaaaaagtagttaataaaaaaataatttagtaagacacaaaaagaaaaagaaaaaactcacagcttcatgtaagagaagctgacaattcctattatattgagctgttcgctcgtgaatcctcttctctttcaaacaaagtttagcacctgcatgacaagattcaacacacatgttttaaattgatccataaaagataataagatattttactttttcgtgcttcaaaatcaaaagatgtttcatacttgttttgtaacctgccaggtaacatgttttgtaacctgccaggtaacatgttttcgcttccttgtactgtacggcagcagagaaaccttttctttttgttcaagagactcgagcgtcttgaggtgaacacacattagtgatcagaaaaaaagaatgagaaccacattattgggtgcttttgaaaatagattcaatgtcacagaaaaataaataggaacttaaaaacatcaattgccaatatatatgataataccttgtgtagctcgtctattgacttttggagagcataaaacttattgctgggtctcccggcgagccagttaaccaacatggtaccagcgatgaactctgatctccttttaccaaaatccaaacaatcaaaattcgtttttcaaaacttaaatcgacaaaaattagggtttaacctaaaaggctaattaagacattagtttcttgacaacaacgggaataaattaattagcgtaatatatcaatttcttttacgtttgtaatatgctccctgaagttcgagatagcaaacgtgacggatgcgaagacctgacagaaatcgaacctttcactaactataacgcatgcggtttctgactttcttgtttacactagagtaaagtttgtatgtaaaactctacggatcttgccatttgccttggattaaaccggcccggcccggcccattaccaaaaagaaagaaaggtctttcgtccccccactgaaaacagatagagagaaatagtaattattttggttttggtcttcctaaatttgttttgtcaaagatgtgttaaacttttcaagctttaaattgatgctatttctctctacagaaactcagataattaataaagagttttaggtaagaaaactttcgtttcgaaattactcccagagcgacaattcatcacattccctttgttagaccacgtaacgcatgaatcaagaaatgttgtagctcctcttcatgcgacatgatgatgataccatatgactttttgtttgttaaaaagtgacaacatggtatatgtacacactatttaacttctattaaagaatacatatctcaagcaatgatagaataaatgaaagaagaaactgacaatcatgaaagaagtaaaaaagaatagcttgtgttgcttattggatgagttgcgtagacatggctcctccttcgtcgcaggaccatcgtatcattactatatatatttaatttccagtcaattttactggtctaatgaataacgcccattaattccatgttttggtcacagagccatttaattactctatatgtatttaatttccatttaattttgttggtctggtgagtaatcgccttatctttctgtccgccaattaaagaattttaagtttttacttctaaaaaacaaaaaggttgttgaaacttgaaagagatacacatgcatgaggttactggttacatattaaaatgtaacacatgcaatttacttagcgagtctaccacagtaccatgcatttactaaatagtaaatactacaaacattaatttggtgtatcgttttgtttgtattcattgctaaattttactaaataacaactgtaaattttgaaaacagtctaaattaaaacatgttaacacttgcatattttctggtcatgaaacaaattttctaaagggtgatgattttgagatcataaagaaataaagtaagaaacgatgagaatcaacttcgatattagaattctttaggaacattttcttttaatatcttcagatcccaaagttgcgtccgccgctctatcggccggtcaaaaaagtcataaacaagcatgaattacagatcaataaatttgattacaatataactgagttttgtacatgtacatgctttttctattgtacaattagaacattaatttaaaacatactatttccgtcaattaattttgttttaaacatatattttcatcaaggcttcattttctttgcgttgttgctttcacaattacacgtaggacacgcaactgatacatctcctaccaaattaacacctaaaaacttttaaacgccattagcatttttgataacccaatttattgctgtcattaatattacgatagatttaaaaaaaaatccttctaaatttaacatcttacagtgaaaacccgcttatattcaaagtttcaaacagagtatattttcgaaacgctacacaatattaatgttttttcgactggtatcttatgtaattgtgatttcttatgtacatcagttatctaactgagaaaaatatatattgtgagaggtaccaaagcgttttcggttcaacctagatgaatgaaattggaatctaagatacagtaacataataaacgttaaatgtacaaatatcgacttgtatattaaaaaataaactctatgacattatattgtttgagactatacgagtaatagttatcttttgatttgattgccatcatattctcacataaatgcaatgattttatatttaaaagaacatgtaccacccattgctcatgaagcaagcaatgcttgatcactagctaacatcactgtaatttaatatattgataaataactttttatcaggcgacatatatacaaaagtttgttcaaagatttcatatacatgcatgcgtcatatataacacaatttttttttttaccaggagatattttgatccttcatattggctgcggatattttacatcatatcggtcatagtaggtaaacgcgttcttcaactttagaagtcgacaatatatgttttgaaactattttttccatgaagttggatgataaaacgatcttgtctcttataaatgacataaatatcacattattgtatagaaaacttggcaattggaattaaatttcatttattactcaatttacaacatcgacccctccatgcgaaattaatatgcgcggttgcagaaaattatccatccatattcataattaaattaaaaatatttaaaaccgaacaccaacagataattaatttcacaatatttccagtaaaactgtaaaaaaatgtaaatattgaattaagcctcatcttcgagaacaataagggtaacttctccgccgtttagccgtagtcgacgtctcattgtagacggaggagaagaaacggtcaatctcttcccgattcatgattatctcacaagtcgacactaaaagcttcctcttgcacgatctgatcatcagagccgccgtagccgacggtgctgacggtggtggccggggttttctcggcggaggaggtggagagtctacgacggcgggaatcttgtgttcttgggatgtgggtgtgctgcagcggaggtcatcttcgtcgtcatcaccttcgtccttctttgtttttgaggttttggatcggatcttgatgggtgttgggaaattgaatttggacaaatcttgtagtaattcaagatccatatctaaacttgtgtatgtttttgttttttgggaaactttttttcttttgtggatgtagagaaaacttcttggagaagtgagaggttgagaagggtttgttatatgtgtttgtgtctttacatacacgtatatacatacataaagttagaatgtcgcatttagaaatgagagttactttttggcatggaaaacgaaaataaaatataaaatatagtatggagtaagtaaggtaaaactatataaaatgggaagggaaaatggacgtaacttccgaatttagaaaaaaatatattatttactagggatggtaagttacttgtatagtttgtatgtatttgtgtttatgtacaaaactagctagagcacatgtgattcacaatttgtaagggttgcctaattttgttagtgattgcttaaaacctttgggatgaccttagtaagatgactagctatattaagttttgtactgtaatatttgttgaataataaaaaaaagtgaaaaaaatgactggagatttcccaaaaagtttacaaaagacaaatgaaactctaaagtttggaagtgcgagtgaattaaggagggccataactcatgaaacaaacgcaaatggtgttctcgtaccatcggtctcctatctaaagacgtgtgggttatggtctcaacaagaacattaaagtgtgtctatatagaaacttttacttaataaaaaaactcgaaccatcaaagtaatagtaataccatctataggtagtaaagaaaagtacacacatatatatacaaattttagatcaatgtcttatcttagatctcaaacataaagtttggttaaatgtgtgtcttgtacctattacaaacctaaaaacatggcatgtgattagatttaaaactagtccatgcatcattatattttatgtaaacaattgattgcatcagtttctgtatcctctactttaataattacttaatgtccaatgtgagaagctgtataatttttatgtgacattatgatttcaacatatacggtggacccacaacgttttacacgccaagtttaataatgtagaaaaaaatgtaagcctttgccatgccatagaacaattattagacttgtaacatgagtttgctttgcttactcatcctaaacactttgcgtttttcaacttaatgtaagatctacattggtttacaaaatctaattattaaattacaaccgaaaaatagatttggtacgattataaatttagtttatactttgctatacgttgttgatgttctttttgtcttcattcttagaattatcagtactcttaacatgtacacaaactcgctaagctagctgtatatttatgtaattaattattacatttgctgagtaattttacggcaaaatatgacatattttggacatgccacgtagaaaagcatgtgatgatgatatatactgtatatagagtagatctgtgtaagtgagtcagtggtaatatctaactaaaaaagtacagaaatggaaagatctatatgatctctctcgcaggatctcaatctctggcccttttttttgtcaacccttcttcctctcttattatgttcttctctctcttttcttttggttactgtaatttgtttttttgtttattgacattgacacgttttcttgcttcgatttttacggaaagagagatatgtatatgaggaattaggataagtcgatgtaattttgtaaggccacgaaaccatacgatcacaatcaaacaatctgtagcatttagaatccatcaattataatcgatgttgaagtttcggtggtccaatatacttacggttgttaaaactttggccaaaacgaatcgtctaaaagcaataccagatttaaatggaatgtaaatggaaaaggaatcgagaaataagaacaactgatcttaaagtctcacaatgtcctacaaattaaaaatgcacttgtaataatagtaataataattaattatattaaaaaaactccttgcaataaaatcataatttatgtaattcaaaatagatcttgtctgaattagtttcaacatatttcctagaaatgcaaagattaatgaacaaaagcaggacatatataataaatcagattagagaacttctagatctagttctattacttagtcaatcgattaaaagttctatacactcagaaaaaaaaggatatatattcataatatagacagtttaacaacttgagttgaaggaaagattctcacatatattttcgaggcataagacacgatggccctaccattacaggatgataacaaggaacgaacattgtagacacaagaatcactgttacaggttggtaacaaagaaaacgaacctaaattgataagaatgaacgtgtcttttttttttttttttttggcaatccaaattttgttgcatatgcataggattccaaatcatttctgtttgttcttttgtttcgaccgtgtttttttgttaactttaaattatataagttagatgcataaaattagtacacacccatatagaagaagacaaataatcatgtgtctatcacatgaaattaaactgtttgagtatatatattagaccggaatttaatatgtaattttactaattaaaaaatgctttcaaattcgtaataagtcgcaaatcaaatttcgttgttacatttttaaaagaaagtatttcttcttttcaaggaaatattttttaaacaagatcaataaaatacgtattctaaatatagattaactctcttgttccatgtgtatctgtgtttggtgatgtaaagagctcatttacagacatttctttttcttgtaaagcggatatattgtaatgatcgcatgtgaaacgtaattacgtaaagcgacatgcaaatctgagttatggtatattaattacagtttttgtattgacgtgaattttaaaaatgaatttgtttagcatccactgccgttttaacattttattcgttgtaatgtacaatgtcgacaaagaaagcaagtgaaacgtaacgtgcatggcctccaaatcatgaacttattcgtaaaatatcatttctataataatatagtttagctatatatcgcaataataaatagaaaaaccataaaattccaaagaatatattaccaatcgacaccaaaaagtaaagataagggtcataatgggctctcccttggatggtttagaatcttcgtaaccaattgtctccctagtccctattatagctttgagagatgaacgagtaatactgtatcaatcatacaatatatatatatatatattaatttgacatatatattagagctaaccaaaaacaaatatcgcaatagcttagattagtgaatgatagttaattgttacatttgataactcattattagaccgccaagagtcccatcaaactagcaggttcatgcggccacgccgggaccaagatctggttcttttatttcccataacaagaatctttttcattttatttatattatagagaacttttaaagcagtctggttatgttggatctggaggaaaatcaggaaagtacatttgattttttaaatgtactcatatgaaaatgtaaacaaaacatgaataatcctttatatatgggagtgggacctagattttttttgttgctatttaacaaaacaacatttctccaacattctgaaaaacaggatcacttgttttgtttcactgtacagtagaagagttttcactaactagtaaactaattaattagtgatttttatttttttttaatcaactcaggcctaattgagataacttgttcgtgggtatcaggcccaatataaagtattctaaggcctactcaataatatctccaatatttttattttcggacagatcatttatttatttttgtaatattttgttttttcttctcgtaaaaccctaaaatatacaaaaccctcaaattcagtctaccagcgaggatcgatgtcggagctcacagtatctcctttcacgcattaactcaatttatctgctaaaccctaaatagcttcacgccgtttttctaattctcaatcaaagcttcaccgccgccgtgtgttgttctttctccgagtcgtgttctctaatctcaggtgaagcttctttcttcaatttgcctttggtttcgtttcgaaaaatcatgtcttttctaagatttatctccggtgctaatcagaattagtcggtatctaatgggtttctgaattatctgtctggtttggtatcagtgtttaattgtaattgagttgtttggttcgtttaggtgataaggatcaagatggagattagttcagaggataacaatcttatggagaaggttttgcctcctgttgagcaggtactaacttggttggttttgaattcttaacagtttattatttgtgggttttggcaaagttgaggactttgattcaaatttgtatgcaggagagtgatgttgagctggagactaaagttaagaaatatcttagaggagaaggtgctaatcttgaggtatatatatgtttatatagcttttgatgattgtgtcttttggttgtgaaatgcagtggttgagtgttttctttgtgttccacagacattgaaagataagaaactaaagactcaacttgcttcacgagaaaagttgtatgggaagtctgccaaagctgctgctaaaatcgagaaggtaagtttactccttcatttagctctgtgtggatcttgtttgaccctttttccggtgcttcgtgaagatgagataatctgttgtgtatctctgttttcacatcgagcaactgtttttaattcttctggtcttgatggttcagcttgttttgagttcttaattattgtcttttgacgtggttgtgtttttttgtgtgtgtagtggctcttgcctgctgaggcaggttacttggagactgaaggtctagagaagacatggcgagtaaagcagacagatattgccaacgaagtagatatattaagttcaagaaaccaatatgacatagtgctcccaggtatatatgctcaatagctttttctgaaagacaatcatatcttatctatgtaaaattttaagtttggttagtctgtgggagaaatatcctcattgcagtttgtgcttctaattcattttactgacaccggtgaacatatgtagattttggcccgtacaaacttgattttactgcaagtggtcggcatatgttagctggtggtcgcaaaggtcaccttgctcttttagacatgatgaatatgagcttaattaaagagattcaggtctgcttttctattttatcataatttttatcagtgcttgttatttgtaaaattttatttggttctcaacagaaattgatgatatctgcaggtaagagaaacagtacgcgatgttgcattcctgcacaatgatcaattctttgcagctgcacagaaaaagtatgtatttcaatgctaatacaataaacatttttgggccttgtgatttggaggtgcatggtctaatatcttatcttgtcgaattttggcaggtatgcttatatttatgggagagatggaactgagctgcattgtttgaaggtgagattatacatttcggttgaacaaaagaaacatatgcctagtgttcttggttattgactctaaactttgtctatcccaggaacgtggtccagtggccagacttcggttcctaaagaaccatttcctgcttgcatcagtaaacatgtctgggcagctacattatcaagatgtaacccatggaggcatggtcgctagtatccgaacaggtaaaggccgaacagatgtaatggaagtgaatccttacaatagtgttgttggcttgggacattccggtggaactgtcacaatgtggaaacccactagccaagcacctcttgtccagatgcagtgtcaccctgggccagtgtcatctgtcgcatttcatccaaatggtcatctcatggctacatccggtaaagagcgtaaaatcaagatctgggatttacgtaaattcgaggaagttcagactattcacagttttcatgcaaaaacgctgagtttcagtcagaaaggtttgctagcagctggaactggatcgtttgttcagattttaggagattcgagtggtggttcttcacataactacactagatacatgaaccactcgatggtgaaaggttatcaaatcgagaaggttatgttcagaccatatgaggatgttattggaattggtcactcgatgggttggtctagcattctaattccagggtctggagaacccaatttcgattcttgggtggctaatccatttgaaacatcgaaacagagacgggagaaggaagtccattcgcttcttgataaacttccacctgagacaatcatgctggacccttcaaagattggtgcgatgagaccctctaggaggaaagagaagccatcaagaggagagatagaagctgagaaggaggtggccatagaagcagcaaagagcactgagctgaagaacaagacgaaaggaaggaataagccgagcaagcggactaagaagaagaaagagatggtggagaatgcaaagcgaacattcccggagcaagagcacaataccgcgattaagaagagaagaatcgtagaagatgctgctgctgagctaccaacgagtttaaaaaggtttgccaggaaaaactgaatgggttttccaccttgaggcttgagcgttttgattatctttctcctcacttttggcaattttgtagtatgggaattgttacgaacttacgatattgaagttttgtttttagacaggaagacagaacatcgaactatgtaatgaggctatgttatattttctaattctattcaatatgaaatagcaaatcagcaaaataaacaattaagcaaaaagttgcagtacttcaattgaagacaacaaattcttttacttgaaatatctacttaaataattctcaccgtagatgtagatttaatttcttttcagaacattccacatatgtatttcaaaaagaacccaacttaaataacaactatatgactccataactttaaaactaaactgcattttttgttcactagttagttgctccattgacaataataaattgagcatagcagattttttgtaagaaaaaagttatgatactacatttgatggccctcatcttctgtgtaattaggttaaacttttttttgttctcctgtgtaattgtatacttgtttcctctgtatatacaatttaaatgatatatccatgattataaactaaaccaagaaaaagaagtttataacacaaggaacagcaagttcgacgggaaccggataatacagaagcatcgtaaaataaaaagctgagaaacattcattcttcaacaggttcatgtacaagtgagataatcaaagccctcttagttaaccaaggcttccatgcgtcggaccacttccccattggaccggaggtgcaaataaaaattaggacaaataaatataggctggctggcgaacaacggatcaagttcaaggttcgagctatagatttttgtcgataggcttgggttcgaatcgaaaacattttatctaattttatggcccaatagagagtgtttccaaggcctactcaaaatctccattattattattattattattttcttacagctaattttatttttaattaacgaagaagaagaaatgatgaagaaagtgtcacattcattcctccgattcttcttcttcacctccccttcttcgaatttctctccttcccttttcatccttttgaaatttctcgtctttcttcttcgaaattggaaactcacagcagcacctgaaaaataacatcataagcttcaagatccaatttgggtcgttctgtgttttcttctgatgggtctcgtcgaaatgtagaacaagtttggagatgttgacaatggacaaggaatttgattcaaagcttactcttcaagggaattcatcttcaaatggtgaaactatttccagaagcaaaagcttcgcctttaaggctcctcaggagaatttcacttaccatgatttcgagctcggcaagatctatggcgttggctcttattctaaggtttcattttttctattcttttcacattttttttcctgtaaaaatctcatcttttctgcaatttggtttgaatcatgaatcaattcatatcttggagattttttatgggaaatggaaaactttttcattgctctaagttaactttagctggattctgcttatgtgtaattgaatcaggttgttagggcgaagaagaaggataatggaactgtgtatgccttgaagatcatggacaaaaagtttatcaccaaggagaataaaacagcttatgtcaaattggagaggattgttcttgatcaactcgaacatcccgggattgtgaaactcttctttacgtttcaggatacacaatcactatgtaggtagtttctattcaagtggctttgtttcagtagaccattaattgttttcactagtgtgtgtgtttgaaaggctgtaattatgagtgatactgggtcattctcatttttgtagacatggcgcttgagtcttgtgaaggtggggaacttttcgaccaaatcaccagagtaagatattatttgagaatctaggagattgattcatattctcaaaatgtagttgcgttatggttttgttttgtgtttggcagaaaggtcgtctatctgaggatgaagctcggttctacagtgcagaagttgttgatgctcttgagtatatacataatatgggactgatacatcgagatattaaggtagcttctctttcacatatcatctcttataagatccaacaagggcatcattttgctaacaattatcccttaattttgattgtgtagccggagaatctgttgttaactttagatgggcacataaagattgctgattttggtagcgtaaagccaatgcaagacagccaaatcacagtgcttcctaatgcggcttctggtaatatgaagttcatgatcctttttctatattcttgagcttaaggtcttttcgatagttgtgtaaacttgtgaattatgcagatgataaggcgtgcacttttgtcgggacggctgcatatgttcctcctgaagttctaaactcctctccagcaacgttcgggtaagagttttgtgttagaacaaactttgaccactatgtgatgaatatatggagttttttttttttgaagtagtcttttagttatgtggattactacatatcctcttacttagaacaatttttctttggtatttctggaacttattcaaacagaaatgatctctgggcactcggctgcactctgtaccaaatgctttcaggaacttccccattcaaggatgcaagtgaatggctgattttccaaagaattatagctagagatataaagtttccaaatcatttctcagaagcagcaagagacctcatcgaccgattgctagtaagataggcttcacttttagccagtcttttctagatcaaaagtcatcgttataattgttttgttgtggttatggttcatttcaggatacagatcctagtagaagaccaggagctggatcagaaggttatgattctctcaagagacatcctttcttcaagggagttgactggaagaacctaaggtcacaaactcctccaaaactagctccagatcctgcggtatttaccttctttagttacttctaattgccgcaccaaaaaaattcccgtcttgtccttctcttgagtcagttttatctttttcagtctcaatcagcatctcctgagagggacggttctccatggaatccaacacatgttggagatacctcagtcttgcagaacgatggacacaatggactctctgaatcctcaggttccataactcggcttgcctccatagactctttcgattcaagatggtgagactctcctaggcttttacttctttttcacgaaaactctcagttttaaaatctaacttggttttctaatgtttgaatcgtaatgtaacaggcaacagtttctagaaccgggagaatcggttctaatgatatcagcagtgaagaagctacagaaaatcacaagtaagaaggtgcagctaatactcaccaacaaaccaagactgatatacgttgacccatcaaagcttgtagtaaaagggaatattatctggtctgataactccaacgacctcaacgttcaagtctcaagtccttcccatttcaagatttgcacagtaatacccaatccaatggctcccttgttcaggttttttcctctgcaattgaaatgtgattgttgattcttgtttttgttttggcagccgaagaaagttttatcgtttgaagatgcgaagcaaagagctttgcagtggaaaaaggcaatcgaaactcttcaaaaccgttgagactcgtagctgatggtgtcaattcattaagttcctattttatttttcctcccttttctttaattcaattgattacatctcatatgcaaagagaagaagagtcttctctgcattcaagacatgcctcgggccgtaggtttcttctccgatcccagaagatgataactaagagttgcattactctgttttgggtccagtgtcagatttatgaatgacagtaaccaaagtaaaagtgtaaaacctaagctaatatggatcggtttgctgtttcaatttcggtttggttccgtgttactcaattatatttggtttaagttctttcattcggttttctgtccaagatgaagagagatggagagagttaaaagagttattgtacgactcatcaacttgcgcaaacacaacacaaattgtaccaaagtttgtctgtttcgattctcttagatgaataatcaactagggttattataagaaacttaaaaggctaatagtagatttatatgaaactgtacatcactttcaatttttgtttttaaccaaaaagaatcataaatctaaatcaaatattttgaggttaagaaaaactgatgcttttagttttagctatacacaagagtaaaaaaaaaagaagatgtgactcccttgttccaaaaactaagggtgtcagtttatatggttatgctcccgccatttcttccgacggttttttattgatgattctgatcctccactggctttattctgtttaaaaattacatcttccttcggattctgattcactcatttaggttggaaatagctatcgtagatggcaagccgatcaaacgcatcaaaatttgcttttaacccgacaaactgacttccgacatgagcacatcctacttcaggccatcgacatactccttctcttgtacgcaatggacacaacgcttcacaaactcgccctttcgggtttccagatgtattttcttcaggcattagtgagattgatacagaaacatctgagttgttcccgtgtctgtttcgtctcctagggttattctccagagagctccttgggtcatcttcgacatcagatgtggtgaagttaatcttgcacccgagtgattgtactgctcgggttaaagctgcatattccttggtagctcgatttgctgattctctagctacccaactcaaatgcctttctcttagcaactctgcacttaatgactccattgcgaaagatatctcgtccactcttctttctgctgcttctttctcctgtttcaaatcaattagaatgttaaaaactttgatacattatagagccatagagagcaggtaagggagattagttaattaagttaccttttgcatttcggaatatttcactgtcatggctctacattggactccaatatctgcagctttagcttcctcaggacaagcccaccggagatggaactggggccaaagggtaggagctagagatgctgcaggaggtagtaatgggccgtcatacttcaaaggatcatagaatgggttacaatggacatgagaagttgcactaaatgaacgcagatcagtcaagtacgcccataggcatccacaggcatcagcaatcccacattgttccctctctttttcactgaaatttacaccagctcagatattgataaatcataataccaattattttcagaatcacttcagtttggagcttcaaaagaaagttttacctgttgcataagaagttcccaaaacgacatgaaagcaagcaatccataaaatctaccaggaaagtctgcaacaccaaatatgaaggcaaatgactacactattattactggaagaagttgaacatgaaatcttcagaaatatgtttgacttcatacataccggagaaaactcaaaagcacaaggatacatccgcattagctgtgaaacgctatcaatccactggaaacacatagatgtaaacatactataagctgttggtctgccaacccattgaaatagatctaaacaaaccaaaagtattactataattgcaagaggaataattgctcggtcacctgcataaatataggtgaataattgttatgcccatgggaagagcttgaagattgtgaggctgctgatcctgaagactgacgcacaggagatgaagggaaacttccagcagacgaagactgcctaggaaagtcaaaattaccagatcctgatatgttaggcattcctacacgatccgaaaatgggtgaccaaaagcaagccaatccttttcgacaagagcctgatgtgaggttaatagaaaagattaaataagacaacagggtagggaacaagaatctcatatagaatgttgatgcacaattagttggaaagaacatatgaatgatacagtaacatcttcatagggtgcatagcaaacatgaatggatactaagaatagaatttgatatggtactccaagaaaagttttacaattgtaaaccattaaattatgctatgatacttcaaaagtaagaacccagaaacaccaaatagcacagggaatacctgaaacccagcaaaagttctgtagtatggatcaagcaataagcacgcaagagaaacaagctgagttgttctgtcccatccatcactgcgcaatgacatacgaagagtcatgatataacaaataatctttttcaccctgatgataatagaaggttttctacaaacagacgtatattcatcttatcacgaggacagaaattggttaagcagttggccggtgatgtgagtcaaggtagctaacctgcagtgcacaagaactgatgccgactccatagcaacacgtgcagcaatccatgctgcaccagctaagacgctctggatgtgtatcaaccagccactatctccaagtaaagatactgaagcagacatactactaagattacctcctccccaggtccaaccaccgtgtctctgcagaattcacacatacatatatcttaatgatacgcaacataaaaatattatatatcatattgtatcccctcaaagaaatccgtcaaaaaagttacttgatattcagtacttaccaagaacgatgatctcccatcggatgatgttgtaccgtgcatatctaaataatctctaacgcgggaaaagctctccctcattgcatgtatgttgtctatgccaaagaaaacaatctgaagaaagaaacatagtcactaaaatcatggaattccagaagatcaagactttaataatcaaaccaccaagaccattcactaacttcagattgaaaataattggaagatgattctgagccacctcccattgctccattggctaatgcatttttcctaggtcttgcatcagcaatataaagcttcctacaaagtaaaaacaaaaacaagatgagataagtgcatctttgtaactataaaccacatgagttgagttcaacacatacttgtaaatgaaaaggaaaaaaaactgtcaaccatattggttatctaacagcaggtattttaatagtaaccaaacagacattttgatgcatttagaagatgatctcgcgtccagcaagccccacaaaagtgctaatttccctttgtgagatgcattcgtgattcataaattttaaatctttataacgaaacataaaatacaagacatgtaagagttaaccatattaagctcaccttcgttctcccttagcaccaggtaactgagagcagaatgcagcaactagtttttcatcaagattactgttggataaaataaaacaaatcaatagtcagaatctagtgcgtctagaaaatttgaaatccaaaactaaaacaaaatgttatcaaaaatgtctcctcgtgaaattgaaagttttatatacctcctcatattcatcataagacccactaaaggttgtgatgagcgtgcaatcacagctccacttcctgcaattgaggttaagatcaaaatcagtatatcattttggaagcaatacaaccacaattaaaatggaagcaaccaaaagtccaaaatatctgccttcctacctggctgacaccatgtgatcacaggtaagcgacatcttgcccggaaagaacacgcctggagcagctctgcatcactatcagcaacagtgacttgttatttttttattatttatcaatactcaaataggaacatggtctttacacgcaaaacgagatatggcaaaccagtgaagaggattattctggaaagctcgtaaaatatgaacatagaaccactcaaaagtctaggaggtattgatagagacttctttaaatccctgacaagatattggtgtcctaccttatggattttggaatcataaaagcaaatggataagtctgacacaagttgtaattggagttcaagtcgcttattcgccacagctcattggacaatgtgaacgcaccatcttcaatcatatccattgatgctcgtattgaactttttccgagaagacggaaatattcattaagcaatctttcctttgggtttgcgttaccaaatttggaaggcccgcatgcaaaagtatatagatcccaaactctctctggcttggtacacttcagtaatgcatcaaacacattacgtctctgcaaatgtaagttttgaaggttagacagaatttacggagaaatgactaaggcagcataagaggaagtgagagtttcacctgcttggtgcgaggacgaaagccataaacaattatcctcatgtctttgcctgcaagatgaaagtgatcataacatataatgtcaagtaaagatacaagacgcatcaaataaagatgtaagagaagtagaaaacacttcaaccaacatcactgtgggaagatgtccattgtccaagataatattgggacgtcaagaatcaaggaaaaaaaacatgaaacacaattcaacgtcatagcgaatattaagctatgacgtgaaaaccaggtgaaacaaaacttaggggaaatcaaatctagcaaacaataaaatccggtcacataccagtgacctgtaaaagacgtcttggtggaatcttgtcagactgacggggacttgattgaactttcagaacctatgaacacatcacccatcaatcagaaaatgcacagacttaacaatataaaaccctagagcctaacttaaatagtattaatcaaatagctctgtccccaggggtgtatagcaactgaccattttgttaaacttctcaatagttgccaatggaattgtaccaagtggaatgacttttctggttccttcactcttcacaaaagagaaacaaagaatatattgatcaacagtacttaaaaactaaaggcctaatcctgaaatagtgaaatataagtaagttcaagatctgtataattacattggccagaaaaaatagatcaaatgcatataagaaacagaggaaagataatatcataccaaaaaaagaatacggaaattagtcaccaaaagggttcctgcctcatcggtgttaataagcacaactccataaccctgcaaataaagtccaaaatcatattacttcaacaacatattcttcacactagtatcatggacaaatgcaaattgcataccaagtctcaaattcaatagccggatatggtaacaaaaattcaaataaaagagacactttgaccaactctacctcgacgatgaccctctccgattccagcaagcaactcaaattcgagaaagaacctgaccctgaagttgactgcgaccaatcaaaagagaaccaaagcagaaattgtttgagcaatcaatttcaatacaataaccaaattatgagctttttggatacgaaaaaagaaacgacattcacgtgatgtctgtgtaattgtgggttaaaaggggaaaaagcgtgaatcaggagagaattgagagcaaattacatcgagtttggtccattcaagcgtgtcccaactaccggtaccatccatcttttctgattccgaagaataatcacgcagcgaccttactcgcccagacggtggtctcggcggcgtcatgaaaaaggggggagagaaagagacggtgacgaggcttctggtgatcacctgccgatcaacggagcaaaacgacggatttgtttcgccacaccaatcaattaatacgacactgttttggtttggtacgaagttgtcgtttttttccttttgtactttattttgtttagtgttatctatttgtatttatcggcaaccaaaaaaaaaaaaaatcaaggcaaaataatctgaggtcaatcaaaatatttaccaaaatatttttccataataattctttatcttaacgctaatttagaaatttaactaaagttaaattattcaaaatactgtttttcgtattagatataatgtacgaaatgtttttcttatataaagttaaattttggacggtagaagaacttatctctagttgtgcacaattatatgtcaccgtcttaacaacaaaaagtcacaaactactaaataatccacaggtgtttatcaacaatttgaattgtattaaacatcaacatcaataatcttcaaagccatgtcacctgaattatccaagttgaatttataaaagaccaaaattacctgcaacactctgtcggttcagaaaaattccgcaatcgtttcccccttgatttataatagtatatttctcattagtttttacctaaaaaataataatttcagcatattaaaattaatcactaaaccccggaatacttgaaaatagaaaatacatgactaaaaaaaaaagtaaaagaaaaaaaaagcacacactactttttgcaccatttcccggtgctcttcgaatgtccgttcctcaatacatatgtaccacttcaatccaaaagatatgtcggtactaatttgtaaaattataaccactttaaaacctaactaagtcaatattctataacacatagcatgttgcctcctcttaccacttaaaaaacactacaacatgttatatgttttcaaccattgtaactcgttatcctctcgagctgatcggccaaatcagctttttaagcaatcaatcttgcgtggtttttgcagtaacttataagaaacgtttccatataatgctgagcccattctcaatttccatcagattatataacgtctaactgtttctaagtaatgattttatactccatataacatataaccgattgctataacatgctgtatacacgtctaatatgattattatacatgtaaataaatgaaactatatcgcaaatagaaatggtaagcaataatgcgaaggcgttaaaaagataattatacgaagaaataggaaaacaaacatcaaattaagatttacaagtcaagtaacgaccgttacggctttataacattgacgattaacctaacaaaaattatttgcctactacaaaaatatttcagtcttataattataaagcttcctcttttcttcttcttcaattcatccgaagctaaaagaaaacactagaggaggtgaagatttttaaaaatgtcattcttatcattttctcctatttctctggacttattatctagtaatgtcttcttaaccattctagcgattatcatatccggtttacttaaaaccattacgtaccggaaacacaattcgaaccatttaaatctcccgcccggcccaccaggatggccggtgatcggaaacttatttcagttcacgcgctccgggaaacagtttttcgagtacgtcgaggatctcgtaaagatctacggtccgattcttactctcaggcttggtactcgaacaatgatcatcatctccgacgccagtctcgcccacgaagcgttaatcgaacgtggagcacaattcgcgacccgacccgttgaaactccgacccggaaaatcttcagctccagtgaaatcacagttcattccgctatgtatggacctgtgtggaggtcattgagacggaacatggttcagaacatgcttagctcgaatcggctcaaggagtttggttctgttagaaaatccgccatggataaactcatcgagagaatcaaatctgaagctagagacaacgatggactcgtctgggttctgcaaaacagcagatacgctgcgttttgtgttttattagatatctgttttggagttgagatggaagaggaatcaattgagaagatggatcagttgatgacggcgatattaaacgccgttgatccaaaactccacgattaccttccgatcttaacgccgtttaactacaatgagagaaatcgtgctcttaagcttcgtcgggaacttgtagatttcgtcgtcggattcatcgagaaacgacggaaggcgattcggaccgcaacggtatcgtctttctcgtatcttgatacactctttgatcttagaatcatcgaaggaagtgaaacgacgccgtctgatgaagatcttgtaacgctctgttcggagtttctcaatgccggtacggacacgactggggcggcgatcgagtggggaatcgcagagttgatagcgaatcccgagattcaatctcgactgtacgatgagattaaatcaacggttggagatcgtgcggtcgatgaaagagacgtggacaaaatggtcttgttacaagctgtagtcaaagagattctccggcgacatccaccgacttactttacattaagtcacggtgtaacggaaccaacgactctctctggctataacatccctgtcggggtcaacattgagttttatcttcccggaattagtgaagacccgaagatctggtcagagccaaaaaagttcgaccctgaccggttcttatcagggcgggaagacgccgatataacaggagttgctggagtgaagatgatgccttttggtgttggccgtaggatctgtccggggatgggaatggcgacggtacatgtgcatttgatgatagcgaggatggttcaagagttcgagtggttagcctatccaccgcagagcgagatggattttgccgggaagttggtgtttgcggttgtgatgaagaagccgttgagggccatggtgagacctagggtacaatgaaagccgcaggtttgtagcatatccaacttttaaaaatgaataaatgctgtatggaatacatgcataaactgataaacactctcatgtaaaaatgaatacaagaagcatattggtactcaagtcatgttttccattaagaatcttttagaattctgttatctttgagggtaaaaacttaactatgtttgtaataaaagcttagaatgagaatttggtaaaacaactgtcatgctaaacactaaaaatgggagaatacaaaataaacttgagatatgagtattttgtttgttacaatttatgatgctaaagccaaaaacattgagaaaagaaaaaaaaaaacataatcttcttaactgagaaacgttgacatgcagaatcacacgttagaaataactaccgtgtgttagcaaacaatttacacgattacaactactgtactagtcatgaaagacaagactttaaatttccatcgtacttcttgtgcataccaaactcagcctcataaaattaaatgaaaccaatcgcaaaactggttactttaaattctcctcacctaaattatcatgctctgctctgtttttataccttcctctgcttttcccttccactcttaatcctccatagctacaaacaaagctcagtgaaaagaagaagaaaaacaagaagctaaaaatgtctatcctttcgtttcctcacactttctttaacatctctccttcactcttctacactatccttatatccagtttagttctactgatcctcacgcgccggagtgctaaatcaaagatcgtgaagcttcctccaggtcctccggggtggccggtggttggaaacctcttccaattcgcgcgctccgggaagcagttttacgagtacgttgacgatgtaaggaaaaaatacggtcctatctacacgttgaggatgggaagtcgaacaatgatcataatctctgattcagctctcgtccacgacgttctgattcaacgtggaccaatgttcgcaacccgacccaccgagaatccgacccgaaccatcttcagctccaacactttcaccgttaacgcttcagcgtacggtccagtatggcgatccctgagaaagaacatggtacagaacatgttaagctcgatccggttcagagaattcgggtcgttgagacaatccgcaatggataaactcgtcgagaggatcaaatcagaagctaaagacaacgacggtcttgtttgggtcctaagaaacgcaagattcgctgcgttttgtattcttttggagatgtgttttggaatcgaaatggatgaagaatcgatattgaatatggatcaagtgatgaagaaagtgttgatcacactcaatccaagactcgatgattatctcccgattcttgctccgttttattccaaggagagagcaagagctctcgaggttcgttgtgaacaagttgatttcatcgttaaactcatcgagagacgacggagagcgattcagaagccggggactgataaaacggcgtcgtctttttcttatcttgatacactctttgaccttaaaaccgaaggtcgtataacgacgccgtctaatgaagagcttgtgtcgctctgctctgagtttcttaacggtggtacggatacgacggggacggcgatcgagtggggtatagcgcaactgattgtgaatcctgagattcaatctcggctctacgatgagattaaatcaacggttggagatcgtgaggttgaggaaaaagatgtggataaaatggtctttttacaagccgttgttaaggagattttacggaaacatcctccgacatactttacgttgactcattccgtcacggagccgacgacggtcgccggttacgatgttcccgttgggattaacgttgagttttatcttccgggaataaatgaggatccaaagctttggtctgatccgaagaaatttaacccggatcggtttatttcgggtaaggaggaagcggacataaccggtgtaaccggagttaaaatgatgccgttcggtattggccgtcggatctgtccggggctagcgatggcgaccgtacacgtgcatttgatgctagcgaagatggttcaagagtttgagtggagcgcttatccgccggaaagtgaaattgatttcgccgggaaattggagtttacggtggtaatgaagaaaccgttgagagccatggttaagccaagggtctaaatttgtttaattatgaaaacgatgtgtgcttatatattaaagaaggaacctatactcttgaaatttgtcaagtgctttgtgaatttctagtaaaagatttcatttattgtcaaaacacatcaataaatgattttgcttttttttttttttttcaatgtaaaactgagctaccttgagattgtgcttaacactaataatttcgtacatacaccgaaagtagggccaagtagctataaagagaagagacatgtcgatgtcaaaaatgaaaaagacatgaatgtgatgctggactttcattgagccgcaaaagttagctcagattttaacttgttaactaatcttgttgcatgttcatgaatcattgaatgtttgaaataacagttcacgcaatgtatcactgttctacttcacttttaatgcgaaactaatggcccattaacaaccagaataatgctaatcatcatttttgggcttagcttgctttgattagatttgtgaaggagaagcccattatattggcccaatagcaaatacccaattaattcctctccctcgcttcttcctcgttcttcattcgagcagaatcaatctcatcgctctgttgtgtctaattgaagctttggataagcttcttccaatacctctacaatggaggcaactgatatttggggagaaattgaacgttctgagaggtattcctgagaatttgcttaaattttaatttttcatgcttgcgaattttggttccgtacttggccatgtgtataaggagaagtcaaaattttctcagaattagttatcacgataattatctatccggctttgattcagtcatgtatagagtttgtagaaaaacgattcatcacagacttgacaagaaacaagttcaaatgaaattgcttatgatgatgtccactcaaatttatctcatacttgtaaaaattatctgttttcaagttgagaaattggctcagtaccaatttcattactcatttttttttttgttggatgtgtatagttacctagtgtgctctatgtatgaagaggcagagtcattatcttcctctatactgaaaagaatatttggcaacattgatgttttatccgacgaagcttctcaaggtgatcatcaatttcatgatatgttggaatctgctggtatggtcttagttcaatccttgcatggaatcggcaggtatatttcatttactgtattcagatgttataacatgagtagttcttttgcctcttacttctgtttggaattggatgctctaaagaaactttagagtcttggacgcttgttgtagttttggctatgtgatagtttttgccaacaaatgcctttttcatgcaggacagttgagattgtaaatgagttaagagatgtgtttggagaagttgcagctattcctgttcaagttcttcttactgggtattgttcttgttctaaatctttcaaagtattacagcttaagatgctttaaaaggagaatatttggttctttttgcagtttatttttcaaaactaggagtaaaatacattcattttatttgctaactttttcttcttaaggggagtacaataacattcattttatttgcaaactttttcttcttaaggggagtacaatactgctctctggatgcattagcatagacaaaagtcacagaacaagattgttgaaatctagtttattgatcttcttccctttttttcccttttagagtatgccttcaaatatcaaatggttcctatttgggtgtacgtgatattctggaagagttctttagaatatgggtttacaaggacaaccactatatcctaaatgatgctggagtaagtacaaaaggattccatgcgaaaaactgtttagatattgatgagtacatggaagtcgttgagctgtatacttttggagttcttgcaaaattttcaaatgacatgggcctagccatttcatgggttgaaaaagctgcattgcctgaggaaaggcgacaggtactaactattgaatattttcgtgagttgtgtatgaaattgtgaatttgttctaactatgatgctacactaaactgtctatttcaggggattttgagaagattgcattccttactttctctcaaaacagctagttcttttgaggaaaattccaaagattcttcttatgctgtagtgaataacaagaagtcgttgggtaatgaaaagaatgatgagattgattctttcctgaaactatctaaacagcatgaaccttggtcactttggtcatcccatcctctaagcctcaaggttggtaatacccaatttagcatgtccaggggaaaggttgccgtaagccttgttggattaatcatatgttatgctttgaagagaaaacgagctgctttgataaggtaagaattcttataagcttgtttctatgcttgaatgatcagaagttgtgtgatgaaaaaatacattgtgaaacttgtttacttgtttcaggatcattcgcaggcaaatggagtccacgagaaaagcaatagtagatttctggaagcttgcgttttcataccaagtgaatcctcttgcagcaattcaatccataccaagcaccacaacatgaagatggatcaaaatttggcattgaaaatgcctatgtaataccaaaccaacactcaaatattttcataattggttctattcaaagttcaaacttagttttcccaaacttctccacttatatcaaactgtaatcactgaacatgattaagaacccgttgcatattatgttttatctatatttctccttgcctttttaatatgggataaatcctcgtatgtttggatttcgaagaagcaagggattacagtttcagattcaaagcttacacttcaagggaattcatcttctaatggtgaaactatttacagaagcaaaagcttcgcctttaaggctcctcaggagaatttcacttaccatgatttcgagctcggcaagatctatggcgttggctcttattcaaaggattcattttttcgattttttttcctgtaaaaatcacacctttttctgcaatttggtttgattcatgaatcaattcatatcctggagattttacgtatgtgtaattgaatcaggttgttagggcgaagaagaaggataatggaactgtgtatgccttaaagatcatggacaaaaagtttatcaccaaagagaataaaaccgcttatgtcaaattggagaggattgttcttgatcaactcgaacatcccgagattgtgaaactgttctttacttttcaagacacgcaatcactatgtaggtagtttctattcaactaaagtctagactagaacaaaaactctaaaaccctaaaccagaaaatctcatcaaaaagcttaagccttgtatagttgttgaaagcttgctaaactcccatcatcttcaccatcatcatcgaaaaacccgaagttttcctgcaagtagcggccatattgatccggagaaatttggtcattaaaatgtggctgctggccaatagaattcaagttggatccagtgacggttacattgtcccgggagtaggggtgatattcacccggaggaatttggtcaccaaaacgtggttgctggcccataaagtgcatgttgcatccagggatggttacattgctctgggagaagtagtcttgataatgatccggaggactttggtcatcaaaatgtggctgctggcccatagaattcaagttggatacagggacggttacattttcggcatctcccagagtcatatcatggatactgaagcgtttccccttcttatttttttgccttaagaaatacttctgagcatggcttgccacttgcatcgggctccttgacgtcacacattccctcgatatgctcttccaatctcctttcccatacttgtttagtccatccaaaaacaatctgcaaaatattatcatttattaatcaaccaaaagtccataaccattaagagcacattattattaatcaacaatatcatctataattagcaaagacatgtatatataatataggttcctcctagccctaaccaacaaaaccctaattcatcaaccctagcaagacttaaactgttatgatatatacttcccctagtcaacagaaactctaattcaaagatttaaatatgaactttaattccacaatccaaagaaaccttttattcatataattctttgactaacctgtgttcttctggtgaccaaggtattcccttctttttccccgtgccctgggttttagacttagtcgcttccggcagtgacacgtaatcatcttccgggtacttgggcaaaggatacttacccgattcgatcagcgtaacatcatcgaccaaggcttggtagtaggagtacacctcctttaacggtttctgcagaaactgagcgatattctctaaaaaatccggcgaaccctcagcagggaatcgaaccagagctaactcaaaacgcttatcatcgtccctcttccaaatcggaattgctgcatccatagtatccaaagaaaaagagagaaatcttgagatcgctaaagatcaggaatctaatatataagcaaaaaaataagaaaatgttgaagagaactttaaggaatctgttactgagggtattgttttccgcttctaatcagatttatagtgagaaaataatagggaatgttgcaaaatgaaccctcgtcttactttaattagcaaaagaaaccggagttatctttatttcgtccttaacctccatattgctcaacataccaaagggtcttaaaacatttatacttttacaaagcaacccaaaacatttatagtttgttcaaaccggtcttatacagttcatcaatcatcatcatccgatatatacatcagtacatcatcatcatcaacatccccctatacaattgatcatcgtcaagcaaaactcatcatatactcatatacttgaacttatcatcacccggagggttttctacttaacaaaatctgacttgcccttagtagactccaaagttatgtcaaggacactccagcgtttcctcttcttactgtccaatttttgccttttgtcatacttttgtgcatgacttgctacttgtgttgaggtcacaaattcccttgatatcatactccaagctcctttcccatacttgttcaatccatcaagatcccataatcgtcattatcaaggtcaaataaaaacattctctcacaaacacgattattcatcatcttaattcaacaatctaaagacgtttatcagaaaatcaaccaccaagattatcataatcatatgtaattcataagtctttgactaacccttaatgcatcaactccagcaagatttaagactcttcctcaatcaaaagaaaccctaaatttatgtctttgacaaacctgtgttcctcttctgtccaaggaattatcctcggtatctgattcgtctccccgtgtttggactcagtcgcttccgtcagtgacacgtaataggcttccgggtacttgggtaatgcatacttacccgattcgatcagcacaacatcatagaccaatattgcgtcgtagtagtacttcacctcctccaaaggtttctgtagaaactcggcaatgtactccaaaaaatacggcgagccctcagggaatatcaccagggctaactcaaaacgcttgtcattgtctctcgtccacggcggaatcaaagccataatatccaagaaaatgaagaaaaatagtttgtggaatctgtcagtctgtgtctgtcactgaagagggtttgttgttcctttaattattttttgagaacctgagaattttatagaggtgatttcgccggataaactaataagaaaaactacaaatttagccctcaatatataatgtcattgagatttttcgtttcatattagatttataatgagaaataataaggaaaaatgtaaaattaaccctcctctttgctttatttaataaaagaaacccgagttattttatttcgttcttaaccaccatattatatatatcaaactcagaactcagaagctgtctttctttttattaaacgtgtttatacgtctgtttaattatcacagaaaaaaataaaataaaaagatgaaaactttcagtacaagaaagagttctaagtacgtatgactgacttctttatgaattttctttcttttaaacgtgtttacgcgcggcctttatcacagaaataaatattctattttttttgaatttaaagaaagaaagaaaagattacttttcagttcaagaaagaattcaaagtatatatcttcttataaaattttggtcttattatgcttccaagttccatgtaaattaaatatactgaaagacaaacggtttgactaaatattgatcatttaattagtgatcatattcacttactttatatataatataatatcttggcttttttaatgttttgaaactatttaaaataaaaactaacatatacttgatagaatcattaattatcctatacacttgaacatcatcaagtgaaactgatatttttgtataccgaaactacgtagcaatcctatacatatgcagaaaacaagcgaagttccttttttattatattaaatctatatatatatatatatatattatctatttttgagttcaagttccgttgcttgtttcatttcacaccattcttctatcttccaacatctaaactccaagacaagtgccttgaccttgggacggatcatcatcatccggagggttctgatttccagaatctggattgccctcggtagactccaaagttatgtcaaaaatactccggcgtttctccttcttattgtccgatttttgccttttgtaatactgtgcatggcttgacacttgccgtggagtctttgtcttcacaaaattcgttgatgtcaacgtcgaagctccttccccatactttttcaatccttgcagaaacaatctgaaatatatcattaaacaatcaaaatcataagaattaataacctagatattatcataatcagcatcatcatgttaaaattaatataaatcaaattgataattacatctatctgaagaaaaatacttgtatacgttaccctaatcaacaaaacccaaactaatcattttttgtgagatttgaactgttaacttatacttttcctcaagatttaagacttttcctcaatcaaaagaaaccctaattcataagtatttgatgactaacctgtgttcctcttctgtccaaggatttggcgtatccttcttcctgcgtttggactgactcgattccgccagtggtacgtactcgggcatctgattaacatcgttggccatcttttcgtacatgtacttcatctcctccatttccataggtttctgcagatgctgggtgacattctctaaaggtttcggcagataaacatcgttgaccaacttttcgtagtagtacttcacctcctccaaaggtttcggcagatgctgggcgacattcaccaaacgcttgttatccggagggaattgcgacagagctgacttaaaacgcctgttgtcgtcctccgtccagcgtggactcgaagccatagtatccgagaaaatgagaaaaaaaaaaagagatggctaaaaattcaagaaacaagaagatcgttttgtggaatatgttacggaagagcgattgtttgttcgttttaattttggcaacctgacaatttatagaggatcaagtaatgggtgaaaattacaaaattagccctcactttacaaaaagaaacacgatttcgtatttaaacacgcacaacttgactcagaagttttcttctcgtttacgtttagacgtacgcagtgggtaaaacttggagtgtaatttcaagttattttagtttcctatttaaccccaactttatatatactacgtacttaacttgaaagctccatcttacgtgtatcttctgtttagcctagatgaaataaagcaaaaaataaaaacattgaaatatatattattttaatggttaaagaaaataatatagatgaccacaaaattaaataaaatatggtttgccaaaaaaatggaaatcccaaatctttaacataccacacaaaaaaaataatcaagggccttcaatatctttaggctttttattttttggttgttaatacagtcatagagatttatatcactttgagttgggggccttagcatggtgaccgatttccagagcgacgagactctcttgttggcctgttgagtccacattggtgttatttgctccctgccgtttcatcacattcacatcggtgcttgccacatttaagtcgttaatcacatttttctttgagctttgccactggtaaaagttttctgcatatatctcgacttggatcgggctcttgcaatccaataagacggctattttacgccaatctttcccaaatcggtctaacccaatcagaaaccatctgcattacaatttccaccagttcatagatcagcccattttaatcaagtttcaccatggcattattagttaacgatataaattgagtcaaatgaaaaaaaaaaaaaaactatattgtccacattaaaaaaataatgctagaatgtgtaaatcgtaagatcataggactaaatacattttaatctcagaaatgaactatgtgaattatggagtctaagaggagaatgcgtctagctagatccacaaaccaataccagtactaatcaatcattatgtttataattgaaacttatacgtgtatgtaaattccactaactaacaaaaatcataactcatcactcattaatcttatatacttactcatgtgtttctttggtccatatagttctctcggcctggtacgaactttgagccatatccttagtcaattcattaggaaaagctactcgactggatcccatctctaaaagatcattgaccaattccttgtaatgctccttaacatcatccaccgatctatccacatactcggcgacactctcaaaccgagtaagcaaaaaggcagtgaacatcaccagtgcatccttgaacatctcgttctcctctgtcgtccatgaattttcagccatgattcccaaaacaaattaaggaaaatgaagtctacaaaacagaatggtgtgaatctggagaactacagtatatataataactcatgtaagggatatggcagcttataaatcaactcaagtaacaaaaaatatatggcttctcttctctcaaattggggtgtattaagtttccttcctttttcttatattcaaagggtaaattttatttcagattttgctatattgcatacaaagtctttattttatttctttctactgatttattgtcattcatttagtttcctatatcctttttattaaatttgttttataatattgacgattttagccaattagattatgatacgtgtacaaataaatttttattttcacacgtgttagcaatcagaattatgatacgtgttacagccaattagattataacacgtgtataaacaaatttatgttttcacacgtgttaaaaattaaaaatttaacatacaaaagattatagacctaataccacacaaataaaataaatagtcaaaactttagaaattaagaactttcattaacatgaaagaaacaaaaaattgtttattttttcaaactctcttcacacgaaaaggaaaataatcaatcataattattcaccaagttgtgaatattgcgacggattgcaacgatcccggttactggttggtcactctgatacttaaaagagtaacatttttatccatgttcgttggttgcattcgttaaacaaacaagttgtgattattatcgaccattgtccaaggaaaaataagcattcattatttatactaggaattaaatatttgccgtctaaactcaaataataaaaattgggagaccgaacagattatagaatatttgtgttaatgcttacgtgatttatttattttagtcgatgcttatgtgatcactgatcattatgaatacaaaaaaatagaagctactttaatataataaaactaagttgaccaaaataataataataattagcgtttccaaagcttgtaataaattacaccaaaaagcgtctaattctttttttcgtctctcagtcttttgcaatctcacattataaaaccacttgtttcaaattactctcaaaaacattataatccgttacatattgacccgacccgaaatggaggcccaataccggaaccacgacggagacacctctttctctagcctccgtgtctacctcaactctctctccgacactccctcccgtttttcccgccgagccgtttccgtttccacctcttacgacgagatgagccgcgtccgcgccgtctccggcgagcagatgcgtcgtactctccgttggtacgatctcatcggactcggaatcggtggaatgatcggagccggagtcttcgtcaccaccggccgtgctagtcgtctctacgctggtccatcaatcgtcgtctcttacgcaatcgccggactctgtgctctactctccgccttctgttacaccgagttcgccgttcacctccccgtcgccggcggtgctttcagctacatccgtatcacattcggtcagtaacattctcccgccaaaatcaaaactcccaaatcgcagagaaattcaaatttcattttttcctctccgatcattcatttttttccgttacaggcgagtttccggcgtttataaccggagcaaatctgataatggactacgtactgtcaaacgccgccgtttcaagaggattcaccgcttatctcggatctgcattcggaatctcaacatcggagtggagattcatcgtctccggtctcccaaacggattcaacgaaatcgatcccatcgccgttatcgtcgtcctcgccgtcacgttcgtcatctgttacagtacgagagagagttcgaaggtgaatatggtattaacggcgttacacattgcatttatagtattcgtgatcgtcatgggtttctcgaaaggagacgtaaagaatttaacccgacccgataacccggaaaacccatccggattcttcccgtttggagtttcgggtgtgtttaacggagcagcaatggtttatctaagttacataggatacgacgccgtttcgacaatggctgaagaagtaaaagacccagtcaaagacataccaatgggaatctctggctcagtcgcaatcgtcattgtactttactgtttaatggctatctctatgtcaatgcttctcccgtacgatctggtccgtaccatcaaatacacatttttaatttaagcttttttctatgggttttgtgggtgaatgatttggtgtggttgtgtgtacgtaagcagatagatgcggaggcaccgtattcggcggcgtttagtaaatcggaaggatgggaatgggtgacgagagtggttgggattggagcaagtttcgggatattaacgtcgttgatagtagccatgttgggtcaggctcggtacatgtgcgtcatcggacggtcaagagttgtccccatttggtttgctaaggttcatcccaagacatctactccagtcaacgcttccgcttttcttggtaactttttgtccttactctcaaacatatttattttcattctattaaaattaacatctttgatcaaatataataagttaaatattatttatttttaaggttatgttggaattttcctttcgtaaagatcggttttatgttttttctctgttttattttcatcaagtgataaagagacagtttgatagtggggacatccattttgggtttttgtttgtttgtttgtttccatgatctttttggatttcattgtattgttgatcttacttttcacgtgattttacatacatatactcgtagggaaggagaaatcaagaaaattgaattttgttgtttactatttaaaacataaaatttctccaactgatcttgtttgggattgtggtttgtagctgtgtgactgtgtgatctatattaatgtaggccatagtcttttgttcttatatgatttttggtgttgggtcttaatttagagcatcgtatacgataaaaatctcgtggtcgtgttcaccaaatggcttcaatcttttcaacggttttgtttgggacatattgttgagtctctttggtccttttttgttttttagtttatgtattcaagcattttctctttttcaagctctcaaatttccaactctttatatgcaacgtttacgtataacatcttagttaagatattggtgagtaagattttggaatcgttttttatactatagttttaccaaaatgcatgagtcgtggaagcgaatctagacccacagttttgttttcaattgcatattccttcttataagcattggtttcttatatatttattccaaatttaaagtgctgttctaaaagttttggatactatattctgtaaaccaaaaactaaaaaaataaataaataaaagaatttgtacacatactctaagcctcaaataaaacaactgtagtttaccaaattttgcatccactaatgtaactagactttgatttataatatttttgaacaaagaccaagagagatcttgaacgtggaacaaaagctcaaaatctttcacaaaaaggtgtcttattccacaagtgaactaatggaacagattcttgcaatatcttcattttatttatataatcgacctttaaacatcttggaatatatctacgttattagacactaatctgattgattaaattaactaaagaataaggatcttgtcatatccctctgcttaactctttaatcttgtctatactttttgttcaggaatcttcacggcggttctcgccctcttcaccgacctaaacgtcctcctaaacctagtctccatcggaacgctcttcgtcttctatatggtcgcaaacgctgttatatttcgccgttacgtaacggtcggatacacggagccatggccaacactctccttcctctgcctattctccataacctcaattttgtttaccttggtctggcaacttgcaccgtcgggcccacctaaatggttcatacttggagctagcacggtcacggctatagccatcgtccagatattccattgtgttgtacctcaagctaggatccctgagttttggggtgtaccgttgatgccgtggactccatgcgtttcgatatttttgaacattttcttgcttggatcattggatgctccttcgtatatcagattcgggttcttctcgggattagtggtgctcgtgtatgtgttttatagtgttcatgcaagctatgatgctgaaggagacgggtctcttgatttcaaagacgtggaaagccttgaaagaattaacagagtgttgagttaattaataaacagaacttggtgacaatttgaccaaaaggaaaaaaatcttggtgacatgcaattttgtctatctgaacaaaaacaaaacgaatttgtcattttgtgttggacaattagaggagcctagactagagagagtagaggttgatgtaatgtttacagaagctagtgaagtccattttcagtgtagtcaatagaatctcactttcttgcttttgaagatgttgcaacttgaaatagtttctttctccatctttgttgactgacttcttctttctgaaagattgtatcttgattttcagaattagattttgacattctttttacagatatagaatattttgtaatcctcccaaaaacaaatattcgaaagccactaaataaagacaacccaacaaatataactgtacaaaattgtagaatggtttgacaaaagtatttatcaacttttgaattttgatcatagtgacatgtatctaatagtgatttgttaaaatggataataccgtagaagataaagatggcaataaagtttgtgaataaatgaatttttttatatttccataaaatttagaaaagggatgatactttagattagatgctaaaaacagcagcaagtatttggcatcttgcaagatcggatattgttatacacctccaccaataaaagcacaaatcaagtttgctttattccttttcgttatatcgaatatttgtaaatgtccaatttgttaagtcataactaaaaacatggataacgttggtgttgttcgtttggcagcaaaaacaatggaatttgatcacaaggagctgaaattcaaaacgattgtcttaattgttccgattgatagattctatgcccactgatttaaaatgggcctcatattaaaagcccgtttaaatcagttgtctcgaaaattgactttttggtccattttgaactatgatttggagttgcaataaattgaaaacagcatgtaattcatctcttcaattgttttgtgataagaaaatgatatcaaaaacgttttctatgtaagggtgtgttttgcacaaaaaatggtcagggtgtgtagtctttgtccgtaattttcagcagaatcaggtcgtgatatcagaagctcttctgtgttcacacctattgattctgctagagaaggatccatggcattctctgcatcaagataagcgcaataacctggtacaagcaagtcctttttagataaataaaaagctaatggagtgaagaacaaaagcaagtcagaatcaaactgtaacttcacaaaatcgaatcttagccagagcaagccaaaacgcttcttcttccattcagctacaaagcaagataagagtaaacacaagagacattcgtttagtcaggagcttgggcaaatcatcaatgctactctaaaggagataactttattttggttggattgttgtcctagtttcttcatctgaaaaatcaaatctttctttcttatactcaagctaagaattgttgagaaacattagagacgaagagaacctgagataagtaagagaagaaacggaatctctgaatcggactggcccatgagagtcgacccattccccgttcttcttcaagcggctcctccttcgctgttcagtttcaattccacagttctgtcttcgatctccagtttccgccatggtcattgtccttaaccagaagtggatacataaaaatcgaaaaccgtattaaaccgatcggttcaaggctaatggaatctaatttaacggaacctattaataatctaattattgggtaatgttagagtacaagcctattaacaaaccctaactttacccatataaattcttgcacacaagtttactttttctttttctttgctttcttctgtatttgccgccgcttctctgctctccagctccggtcaatccgtacaggtacgttctggttacattcaaaacggcacttcaccataaatgaaaacataggagaatttcataaaagaagttgtgaaattcatctcttttaattatagatgcagctcgattttggatctctcttgatgttcctgcatctctctagattgtatcaatacccaaatgttgaaatttaacggcataattgaaattgaatcctcatttgtagttactcgagactcttatgtcaattgttggttctttcatagtttattagtcagaagttgatgtatctgcatttctctgatttgtataaagtagtataatgtgaatgttctctgatggtttgtctgaatttgggcaggtaagtcaaaaagttgtgaaagatgggtcgtgttcgtaccaaaacggttaagaagtcttcacgtcaggtgattgagaagtactactcacggatgacactagacttccacaccaacaagaagatcttggaagaagttgcaatcatcccatcgaaaaggctacgcaacaagattgctggattctccactcacttgatgaaacgtatccaaaagggtccagtccgtggaatctccctcaagctacaagaggaagagcgtgaaaggcgaatggactttgttcccgatgagtcagccattaaaatcgatgatgttaaggtggacaaagagacactagagatgcttgcttctttgggaatgtctgatattgctgggatttctcaagtggagacacaacaagctatggcacctgctgtgtttggacgtcccgcaggaagataccaacgctaagtttattgggtttcaatcaaagatttcggagacgagagtttggtttattggtctagtatggattcaacatcgtttcctttgatttaagattaatgtcgtttcctttgatttaagattaatgtctggaatttatagcttttgctttgttttaacctttttttttggtccattttgaactatgatttggagttgcaatcaattgaaaacagcatgtaattcatctcttcaattgttttgtggtaagaaaatgatatcaaaaacgttttctaaattccaagggtgtgtagtctttgtacgtaatattcatgatgagtcaggggcataacggtccagttacttattaatttcccgaatacgtggaaaaataggttttggctcgaaatggcactgtaccgaccccttctcttgcatcatccaacttctccgtctgtaactacgtttctacgaaattacccctcgaaaccgatcaaattctccagcctgcccttccttcatcgctgccgtaagtctcgggtctcctcctcctccgctcggtgttgttcttccatggaatctcctcctgaaggatacagaagaaatgtcggcgtctgcctcatgaattcttccaaaaaggtgatgattgatgatggataattggaaacagcttcttctattttccgatgattagctccttctcacaattaagtgcagattttcactgcctcgaggttggatattcccagtgcttggcaaatgcctcaggtaatctctagattccaatttcttaagattcgaattggtttctccattttcctcatacaaagctgaaatcaatggtactcacttgttcgcatcatactgcttgacttgaataatctcaaactcccaaaacaaaatttgattatgacttccaaaacaatggatgatacgaattcaccaattttcatctttggaattgtgttttatctttcatgttaccaggtttctctactttcgacaattcatcctctaattggattcaaaatgctatgtaatcacttgaataaaatcgtgtgttgttgttgatgttgatatagggtggaatcgacgaaggtgaagatccaagagttgcagtcatgagagagcttaaagaagagactggagttcactctgctgagattctcgctgaggtgtctttagcttcttcttcttcttcgtcttcttaaacattcaacaatttaagaattcgtctaaagaactcttttttgttgttgttgttactgtaggcacctcactggataacctatgacttccctcctgatgttagggagaagcttaaggtccgatggggatccgattggaagggtcaagcacagaaatggtgagtctttctgagattatcaagaatcatgtcatttcattacgggcttgttcaaataatgtgtttcctcaggtttcttctgaaatttactgggaaagatgaagaaatcaatcttcttggcgatggtactgagaaacctgagtttggtgaatggtcctggacttctcctgatcaagtcgttgaaaatgtacgtacagttttcttctctctgtttgaccttcagcatttagattccacgactactctttcactcatattcattctatttctgttatacaggcagtggagttcaagaagccagtgtacaaggaagtcatgtcagctttcgcttctcatctccagtagcaaaataaatcgaaaactaaactctctgttttaagtttttcgtaagaaactctgagaataagctcttcttgacatatttgctcttttttgaacaatctttgaatcaaaatacaattcttgttccctctcttgataaaagtaaagtgtgagatcctgtcatgttcttattttctcatcaaagattctcgctatttgatccgctacaaccttagcaacaacctcaggagcaaaattcttgaccatgtcatctcttccacgttttcctttaaccttagcctcatcagggttactcattacacgcctcattagaaccctcagcttatccacagatggctctgcccattgatgcccttcaaaaggaccttccttcacttcactcatctcctctaccaccaacgggtaaccattccgctctgtaagatactctgttggtcctgaccagtttgttgtgatcacaggcaaagacatagccatggcttccactataggtcgtccccatccttctcctcttgtaggcaacacaaacgcatcagccgctttgtacaaccgaggtaaatcaacttgagcaatgtgtttatcaatcacatacacaaaagggtaaccattccgaggctcttctatattcatttcttctacgaaatcaagaatcttgttcccgaaatcgctgtccgagtgatacgcgttcgtcaacaaaaacagagcaacattgtcttcaccagaaaactcactcaagtaagctttcaacaatacatcccaacctttcctctgctcccatttaaacacactcaagaacacaaacccattcttcatcccagaacctaaaaccaaatccccaaccgccatcagatccaaaggcttatactttgaaggatcgaagaaaccgacatctacaggctgcacaatcttgacaaccttagatgaatcaaccccactttgtacaaacgaagagacgtgaaaatcagtaggaacccaaacatgatccatttgattacatcgcttcacatgctctggattgactctatcagtctcaaacattgttctaccaatcacagataagaaatcttcgtagccagttggaggacaaggtagagtctcaaacaatggtggataccaagcaccaggctcactatgacaaacaactatcgtctcattgggtctacactgttctctatacatttcaatcgctacctccttcgtctccttagctaaaccattccaaaactccactgattctagatcaccatggtgctcgatggtgattcgaaatctagggtttgtgagatggttacgaagtgataaaacgtaagaccaagcttctgagctgtaaccaccactcgagagaaaaggagccatccataacacgcagtgcggcgtagaagaagctggatttagggtttcggatttggatttgggagttccatcatgaaagcctagaaggaattgaagatagctatagaagcggttcacagtgaaggtgaatctcagactttggactttgtagagatcggtatttgtgaagccaagtaagaatatcgaaagtagaaggaataagatcgatgaagagtagacgatggtggagaatttccatggtcgcttgcttcgatctggtggttgatccatcgatgaagacagggaagaaagagaaagggacagagagaaggagagggagattcaaagcgacgagaggcccattaagattttggatggcccatttaacgttttttttggcatatgttctgcaagtagaaaattctcctcatttgtgtttttgatgattgaaaatatgatatctgtgaaataagacaatttataaattcaatgagaaagccaaaaggaggtttatcaaagtttaaaacgttatgcacaaatgaataacgatactaaggctaaataaaaaagcttagtagctccaatcaacaagagaatcgccggaacttaaccccggagagaagctcgtggcactgctggtaatccaaattcgtcctcagcctgttaatcacatcgttaaacggtctcattagccaaccatcaaaaggtaatcatacttgaagcatttcaaaattccaagaattaaaagttaacctgagctcttccatgtggagctccattgtgtcctgttggtgctgcaggcaagttaagctcgctatcgtaatcagtttctgtatcaggttggagataagaaggcattccatctgcttcggtctcgtttcccatgtcagcttcaagagcatcaagctctgaaatatatcaaaagaatgtaaatgatatgagagacgcatagcgtagcaagcgattgatcttaaacttccaattacaaaacaagcactttacctcccatgaggtcatcctcgtcaaggccatcaggaatattgtagctcctaccaagtgattcttgaatttcagaactaacatccatcagatccatcatctcgtcttgtaaattctgtaccatcaatagatcgtagtatcaggcaaatcaaataccagagaaaagcttgaaacaagataaaaccaagatgttgttaagtaacttaacaacgtacatcaatatcttgaatcttgacggttttcatcattcctttcaactccttgttcgcagattttagtgctgtcatctgcagcagatttaatagatacacaaccattcaaacattgaacacctcttagaagagaagagaacaagaaatacatacagtttgttgagcatctttgagtccttcagcggcgaatgaaacttgatcgagattgaatgtctgattatagagcatgtcgcgttgtccttcatacctaaattcataaaaatgtacttaggtgttttattatcaagcaaatccaataaacagagtagcttagcttgctggatcaatttaaataacaatgtctagtgactgacattttcttctgcttgagaactcgcatagcacgagctttgacagcttcttgagcaggaccaggtctggtctttttgagctgttctttgtatttgcagagctcaacatcaagcttctttatcttatcttctaccgaatctcctcttttatttatctgaccaaaataaaacaaatcttagtttttcttcttctggatcttagtggttccaatagctagctagctcttaaaccttccttcctacggtttatggttctctaattcaaaattcatctaaatctcaggtcaatccgaagtgaaacctcaaaaccacaacaccaatcacgaattcttccaattgaaatcgaaaaaaaaagtaataattaggaacgagaggagaaacccgatcagaggcatcctgaatggacggaggaggctctgtgttctttttcgcgccgaaaactctcctcatcttcttcttctaactccgtgaataaatctgggaattttggatgatacagagagacaaaagaatttggaagaataaagagaaatcgagactttggagaagaaggcttctctaataaaaggattgagaatttgtttatttacttgatcgaattggattggatttaatggaattggtcaactaaaagaagcttccttgaagatcatcgaattggatttattcaattttggtttggttcgatttgatttgggtaaaccaagttgtaatgaggcaattattaatttaaaccactaaaaccagaactgaagagagaaaagagtttaacaaacagctacaataaagtgtgtttttttataaggacaaaaagaaaaagaagcgaaagacagaggcacagagctatattactcttacagacaccagtactttctgaaaattacaaaactttcctacaacttttataaccctgaacaatttgacccccaaaatcctgactcatactaaaatgacagagacgatcaagagcataaacgatacacattctcatactttacctctttcattaaacgacgatatgctcgtaatccccaaggttcccggagtatatagcgaacaaaaagaccataaggctgataaaatgactcttgaacaatgtgtttttcttatttcttcctggtggatttctttgctttgaagattctgcggcctgacttatcgccacctccagtgctgcctagtgaaaagctcccacctccttggaactctagactctgtgatgcctggaaaggtgatgcgttctgtaacgtgcttgccattggttggcctccaaactggaaggggtttgccattgatggaggctgcgttgctgctcctccaccgaaggcaaagtttggttgaggcatcgagactgctgcttgtccaaacattggggctaccatagatgctctattagcttggtctgtgtcttctgccatactgtcttccatgctcacttgttggttattgttgataccatttccattattaggtgcaccaaatgcaaacccaggagttgagttaccaaacagagactgtgatggagtccctgagttaccaaataccggctgctggggagtggtaggaggggttgacccgaaaccaaagataggtgaaggtgacggggtgttgttggtagatgcaccaaaaatgggagtagtagtgctcgaaacagtagcagcagaagatcctccaaaggaaaaggtggtaggagttgaagatgtggtgaacgaggaactgaagactggaccagagtttggagaagagttgggagcttgccagcttgtcccaaataggggagagctcattgtactactagagcttgcagaggagtttgtcgaactcaattgaggagttgacacagaagtaaatacagcaggttccgacttagaaaatccaaatggagaactgtttgatgcaagagaagagttcccagacaaaccaaatgaaggagctgatggagatgaaccaaactgaaaggggatgctttgagttgatgttgtggttccgctcccagtattacccgtctgagcatttccagcaccaaaaagatttgaggcctgagattgagagctagtagcagaagctgatgaaacagcattgaatccaaaaacactgcttccagtacttgcagatacaccaccaaccatgctactaccagagcttgtaaatgcaaaagaggaagtgccaaatacactatttccagtattagtagctgcagaactcgcagaaattttgctggtctctgtcccaggggttgaggacgatgtcacaccaaatattaaacttccagagctctcaggtgctgaagctgcagcagtagaagggtttaatgtgctgccaccaacaacggaggagctcccaaacacaaaaccaggtctgcttttattttccgcagatttagcaccaaaaacgatgccagtgctctggtctgctgaagccatacctccaaacttgaaagtgcttgtatttccaaatgtggcgttttttacttcagtctcctttgagatctgaccgctagattcagacactgctggcgcagaaaacggagctgcaggttgcccaaacttgaaaggtgatgtggaagagaggggagatgctgaagttgattgtgagttgctgtcgttactggtaggcaactttccaaatatactagaggaattgtgagtagcagcaaaagattgaacagtggacggcatatcacccacagaattatcagaaggtatatttgaaatagaaggtgggaaggaagggcttgaagtaagagagccattactcggaggtggagtgacagcgtttgctccagctgagaatatactaccattgagggttggtgcagctgaggtagatgactcagctccagaagcactgttgctgaacgttttctttgattcagttggctttgcccaagcctctgatactccaaacgcagtgctgtaacatcaagaaagagagtcggaagcgagtaaaccagaaaaaaaaaatcataaccaatatggatgaggctcacttaggcacaagtagtgatataaaagcctatcaagctgagaggaaaaatatcatgccaccaacctgctagtcttttctaacttgatgtctgcagatgcaccactgttttgatttaataagcccgtggcaggcggtgaaaaggagatattgggaaatacagcagcaggttttttaggctcttccagagggatacgtttctcttctgaggttggcttgccagaagaaatactcgatttctcagtcccttggatgaactttgaagttggctcagaggccatattactttgctgaacagcttcaatggggaaagcaacaaacttgtttctttcagtttccagagacccattagaagtaccctgagaggcgtcaccattagaaatatatgatgtagatggcatggcttcagatggagtaagtggtttctcccctataggcatgctgatatgacttttctctacttcgaaggcattctgtttttctgctacttcacatggagtagatgctgcaccaagatcatcatccaactccaagaaatcctgcattatcacagttgtatgtatagatggtcaaggtatgccataaaatattaacaaaaaaacaaaaggaaaacaataatatgaagaacagcagaattgtttctacaaaagggagaaatacatatttgccgctactggtgttagagttggcatttctagaattgcccgctttgacactcttatttgcagctcattaatattctggaaatatatctatgagaactagaaaattacctcatgcgcactcattcgaaatgatctcttctttggaggatgctcttccaaagaattcgtgagaggcatataaacacctttaccacgcatatcctgatctttactggaacctgttttgcttgttccatcaacagcatcaccagtcttctcactctgagctaaaacctctctggagacactttctctagatatttcctgcttttgataactagaatctggcgaatttgccttcttctcgggaagattacccaaaaactttggcgcctctacattctggaggcttttgagagcgggaccccgtagcatggatggtgataacttacttggtgatttctcccttgttgaaaccagtttatcaagttgctgcaatatttttgacgccatctcactggacttggtaggaacaaggttaaaacttgaaccaggaatatcctctgcactatctttagatgtatgcgtagttttttctccaccattggcacggacagaaagtgggctctcagaaacaggcagagccaagcttcgagatgaaaggttagatttttgccggatcctccttacagggccccagatcctatatcattatctaagactgagctcctgcgtttaagaccctaaaaattaagtaaaagtcatgtcaatactttgtttcacagacgaatctgaaaccaatttggtgcatagttcaaaatgtctcaccgattgaaacccttgtctagaaccagaaggtaagctttcttcccatttgcttggagatgcttgaaaaagagacccaatctgtaaaaaaagaacacaatgaacagttgggagcaagttggaaactttacaataatatagttacggctcaaaattgaaaccttcacactggactgaggcctagagtatggtgttctggccatgctataaacagcagatcttccccgagatctaggggtaacaaaaccattttccaaaggtctttgtccagaaggctttgttaccagcgacattgtaggtgacttttgcggaaaaggggttctgttcaggaaaacagaatcttccctacccgcttgaccacgtaaccctaacatagaaggagtaacttctgaaggtctgctacccatgtaggcttttgcaagctgtgctggcgacgcaatgcactcatcgagagtctggtaaggatgtcatcaacaacaaaaagattaaacaatggcatctagcatgaagctcagcataaaacagactagtacaactaatatgtaacaactttcttactctcaaacttccaggaggtgttgaaacaagggtgttcatacttccattatctggatgcgtcctatccctctcatgtgatggtggatgtctcacaaccatacccacttcatttctctgctcctcattcatagtggatgaatcagcagcttttgaacgcaacaaggtagttaatcgatcaacttcagacctgtaaaatcattgaaagtgatcaactgattttcaaaacacaatgtttctttctagttcaaaatgtgaaaatgcctataaatgttgacatgagcacaccaaaatgaaacaaaaaagaaggaaaaatcataggtctttattatcaactcttctattttatgaatgctggatgcatcaaaagattaagacacttttcaatcctcgaaggaaaattgttactctactaggttatatgacctgtaagatagtatataccttgtaaaagtttttccctgtaagattttctcaagatctgtaaatccatccttaggtggatcgacagaggcattggtatcttccatccgaatcaaaccattcttcatggacaacttcacacagaacaaaacataggtttacactacagaagataaaagaacaatgaaaccgaaaggaagaagatatttcatcaaaagatgcggctcatttacttacattagagacgtcctccttgtgtccaaccttcgtctcctgattcacacctgatccatgataagagaaagagtacacattaacaacgtcaacttagcaaagtggaaacgaattccatacatgactgctaccaatacataaacaatctctaataccacaaattcaataatagacaacctggctaggtacttgaagaacattccaacaacgtttatgtacttattagttctgaactactataaactaaaatgaataaaaaaaaagcaaagggcaaatccaaacggtaaaaaaactacagttcctaaaaaacaatttctctaagaaactcagaaactacaaaaagaataacttttggatcgaaaaaatcaacaatcttcttacctctttctggaagctgcttctgctgttccggcgattgtaaaggcgtctcaccagagccgaggcgtttccgggataaggacccgaagagcctctgagcactataagtaataagtctctgcgccggatccaccaattttgacaaccagccgccgcctctgacatctccgccaccaagtccagcgttcctcacagaagtcgttggtcgatcataaggagttttctgagacctacgagccgtcggcttccggaactttcctccggttcccaatccgccgccgtatggattgctgctctctccccgtgccgcgctcgccattagccaacacgaaaactgagaacgaatctagggtttcaacgaacctttctgcgtaaggtaaaatcgaaaacttattgagaaaagagggaattgaaaaattttaggtgaaattagggtttttttctaatttgtggcaccaaaatcgagacaaagagcaaacaaaaaaaaatgactagggtaccaaaaataattttaaaaaacaaaaaggaaaaacgagaggagcgtaaagcaacgcaccttaaaaagggtatattcgtctttccggtaaagacacactagcgataccgactgtcacgtaaaatacgaacccaagatcattttcagccgtaagattaattgatccgatggttaagatttagcgcttgacaatactccagtcacactaataaatatctccaagtaaaacggtgatacttagtgggctgggctttagaggacaacatgggccctacaaccactaacaaacaaatctccagtttagaaatgtgtaaaaattcgaaggaaaataaaataaaaacaaaattacttgacctcgaatggattcgattctctctctgtacctgactgtacttttaaaattttaaaaagataacttatgaccaaaagttacagacaaaagctatgtgtatatgcataaaagtacatagtacagaaacagatttacctaaaccagtctaacgaacaaaaatctcatcaaaatgttgagataaacacaatcatgatcatcatcattcataacaaaataaatagacgaagtacttcttgatttgggtttgtaactaatgtttcagagaaatgctaatgctgttctctaaacccatcttcacaggtcctcccattatgctccctttctgcatcattgccacaaactcgttgtagtctattcgtccatcctgcaacaacaatgtttcgagttttaaaaatgtgatagctcgttaaatcaatcaactggaattgaaaatttctacaatgcatgaatactcaagatatcttatcaatgtgattccattgttaggagtgatataatgcgtttattagtggctcttcattgttgagaatatgatgcagtttcagaatgatatgagaaggtgtaaaaaggagcttttttaccttgtcttgatcaacatcgcgcatcatttcttctatgcgggcatcttcaacaccaaactcttcgcaagcttgttgaagctcgtccggggtgataaagccactctcgtccttgtcaaagtaagagaaggcggcgaacaaatggtcctctctctctattttgtttagatgcaatgtggcggctatgaactctttgtagtctatcgttccgctattgtccacatcagcctgaattagacaaaccaaaacataaaagattattgcaaaacatggaactataaactcgatttgaatgattgaagtttggaattcatagtaaaggaaaagagcaaaagacatacagcttgcattagatcaagaatctctgactctttgagattggcaccaactcgttttagtcctgctttcagttcttcaaaagtgatctgaccactattgtctgcgtctatcatcttgaacatttgttttaaaccggctatttcttcttcagataagctctcagctatgacctacaacaagttgagaaaaagaggacaaacttatttctatcttctgagtttctttcgtttggatcttgtttagagttaaaaagataacttactctaagagccattttcttgaacttgttcattgcagaaaattgcttcatacggctcagaacagcagagtccagaggtttatctggagccacaccgtcaatctgtacccatggatgacctgttcataaacaaaacgccttgagaagaaacacaacggtgaaaatcaactagcatattgttaaaagatataccaggttatgttctgtgctcaatagaactaagatgaatgatttagacttaaataacttacataatacttgatgtgcggttagtcttcgcttggggtctcgaacaagcattttccttaccaagtctttcgcgctttcagagatgcttggccatggatcagatgaaaagtcaagatctccatgaaggacctgctcgaaaataccttgttcggtttctgtatatttcatggaaaacaaatttacttcagagcctaataagaacaatcatattcatttatctacattgtaacctctcttaccggcccagaaaggaggaactccgcttaacaaaatgtaaacaatcacaccagcactccacacatctgattcaggaccataacgctttctaagaacttctggagctacataatacggactaccaacaacatctgtaaaaacctcatctgccaaaagtggaagaatagtaagtattccaaaatcaaacatagatagtgtaaattgaatgatcaaagacaagttaccataaatacaaacctggcttaaagaacattgagagtccaaagtcgatcgttttcaacagggaatcttcctctctactaacaaatagaaaattctctggcttgaggtcccgatgcataacaccaagagagtgacaagcctctaaaaccccaacaatggttctcgcaagctcagcagctttcctctcagtgtaatgtccacgttgaataattctatcaaaaagctcgccacccgaacacaactccatcacaagatgtaccgcaacaacatcctcataagcacctttaatagatataacattcggatgaccagccaagtgatgcattatctgaatctctcttctcacatcttcaacatcctcatcagtcaaaagcttcctcttggaaatcgacttgcacgcatattcgttcccagtacctttctcaaggcataaaaacgtcgtcccaaattgcccttgtccaagtttcctccctaatgaatagaactccttaaagttttcagttttcctctgcaacactgactcagttctaagccctgcactggacactctcctcatatgtttaggcttctgaggttcagctttcgtctctggcttggtttcagacgttgtttctggttttgttgtctctggcttggattcagactttgtttctggttttgctgactccggctgcacaacaacttcccgcttactttcttcaggaggaacttcctgcttactttcttcaggaacaactttctgcttggtttcttctgcaagaactttctccttcttttcttcaggttggatctctagatcgggtttcagtttagtttcgggattggtctttgagcttggcattgtgataggctcagggggtttattctggacttgatcagtagctggttctgaagctgcttctttagaaacttgtccattaccatgggaagaagaagaagcttgctcagctccgatccgtggcctccacattgcagccgtaacagtttgcaagaaaccatttccagaaatgtttggtccaacgcaagcattacccatcaaaatatctctctacttataatcaacagcatcaagctttccacatcaagatctgatcaaaagaacacaaattgacctgatctgatctcattcctaatgatcatagacactaaaagtgaaagtcaaatctctttataatctaagacttggttctcttgtgcaacgacaatatataggatttgatcactccggatcaggcaatgattttaaaaactccgaacaccgatggaacaagcaaaaaccctactcgggtcgatgcaacggatgaatcttgcacaacaacaatcaatctgccacaagaaaaaaatcaaaattttcaaaatgggaaaatcgaaagtttaaacgaacccaacacaaagaacgatgcaatgaaccgaatccagacaacagaaattgtctgaaaacaaagagatcgatctgggattgaaaagaaaaggaacaatattggtttggtatttgtcggaaaataagggagggaaatcgagagaatgcttaaaagcactacatttgcataaaaagctaaagggaggtgtaatcttgttcgataagtcaattacgaagaagatgaagatgatgaaggaaattgattgaacgagtttgaaaaacgcgtttgggtttaataatcatcagcgaattttgcgttcttcttgtcataaattatgaatttgttttctattaccaactcgttccagcagcagcaggcgatagaataatcaaattaaattttattttgtcaaatttctcaagtaatgtaagtaaccactaggtttgattggatttgatccacttaaagtctcaaactttataagagcatttataataacaaaatttattaactgaattttaaacttgttagttacaaaaaggtgtggaatactgttcacatcccaataaagtagtttgtcatgcaaattgcaaaccaaaactacgggtcaaagattgtagtgatagatttcagtttccaatcatcagctttagcttccattgtatttgtcccatataataaccatggtctctcaaagaaggaagacaggttatatgtatgatccgcgataactaaccggatatcgctttgtagccttccttttccagtagtttggccaaggagttgtctccggttttaatgattctcccattctcctgaaacccaaggaaacatacatgagcttaccaaaatatatatgatcattgtgtagccagtaaagaaggctggtttggcaacaatgctcaccatgatatgtatgagagttggtttgatgtagtcaagtaggcgttggtagtgcgttatcatcagaacagagttttttggtgtcaaaagcccgttcaccgcctttgccacatcttgaagagcatcaacatccaaccctgaatcaatctcgtccagtatagccaactcagctccaaggacctgcaaggacaggaaaacgttgcattagcgtacttccatgacctctttccatatattgcttacaaagaataggagactaatagtgttctcatgttatcgataaaccagaaatgaccactccttgggaggcagatatttcaagatcaggaaaatataaagagatatgaagacatataacatgccatgtctttttagctaaaactgcagtcaaatacttgtaatagaatactaactgccatgcaataaccgcgtctacttatggtaaaacctgtaactgcttaagctaatctacccagatatcctgaaattcctaactattagccttgtggttttgcacactgtagcatggaacaagcttagtaatccactaccttctctaatcacatttgtttcttatcatatgcagtccttatggatactgagaaacaagggaagcagaaccattaccgctaactgtagaatctcattgcgtttcctttcaccaccactaaatccttcattgacatttctgttgagaaaatcggtcttcatattcacaacttcgagttttgataccaagtggctgtagaactgcatgagccatgtgatatcagtaagacataatacatagacagttctacaattgggaccatttagcaaacaacaacaagtaagaaacagtgcaaaccaaatccaagtcatttaattcgataaggcacctggattggatcaagctctggctgaccaagctttcttttccgagcattgaatgccatattcaagaaatccatattgctaacaccagggatctcaactggggactggaaactcataaagagaccggcaagagatctatcctctggttccatatcaagtagattctgccctttaaacacaatactccctcccgtcacttcataatcgggatgaccaacaagaacctacaaataataagactctcactaagataacaaacagaaagagaacaatactctgcagcatcaatgttaatcctgagatacaagatatacaaataaaatgttcaccttcgaaaacgtgctctttcctgaaccgttcttccccatcactgcgtgaacctattagcaaccacaaaagaagccatggattacaatcggcagcaatgcaaaacaaatccacacaaatagaattc

SEQ ID NO: 1285 - DNA, 80379 bp, Arabidopsis thaliana
aagcttctatgttttttgatccttcagtttcatcccccacgttggcttgttgatctcgttttagttcctgcgacattgttgttttaaactcagtgaaccaaattcttatatgaagtttatactttttatggtgtgaacagggaccatcctatctgtaacaataccggctttgtacagtaaatatcaaagcaaagtagacaagtgttgcgggacgattcacaggcggttgtctcaccactacaaaatagtagacgaaaatgttataagcagactctcatggagcttatccaaggataaagattcatgagcttaactttggtgattctgagaatgcttttacttgtttttgtttagcttttcttgttattcaccatttgtagtataactaaacgccatatccagaatgaatataagatggtttctttgttcaactaaattaactcttgccttcgtctgaagcttaacaccactggaggaaaaaatacaaaaaaagtttaacaccgctgttcgttaaacgacgtcgtggcgcagaacaatactcacatttcagatggatttgactagcccaactttaatgcccatatgctgagaatgttaggtcacgtgttcacgtcacagaagaacctcacttacacaatttaatcggacttgctacaaatatgacgtcaggaaaagaaaaacagtgctacaacaagtctacaagtaatgactatactacatgattgagtaggtgtagtcacttgtgttgttatagtattatacatggtcatatcaatgaagatgatcaaactctattacgtattcctacgaattccattttaatttatcatgttttctttcaacgactatcatttcattacataaaatgaaattctatgatgatatagtattccatctccatgtccacctactatattttatattaattaaatgaattttacttgtatcacactctttcgtggtggtatatatgtttatctttcacaactcatacagtactcatttgcttgtatatataaatcctatcatgtattgatctttttatgtcttcaactttttatatatatcctatcatttttatgtctagtataacctaaaatggccatcatctaaatttaaataattattctttattctaacaacttgatcaattagacatagatgtacatgttatctgtactgatgtacatatacgaattaaatacgagtaccttaaattttctgactatatgagacccatagcaacttctaaccaagcatttgaatctgataaatagacatagtaaatacacaaaatagactcgtgtatggggtttgatggatctctaacgttggagtgttgttatcaactaatggaacttattgaagctaagagagacaagtgttgtgacctttgcgtgaactcgtaattctatttaattttatttgtatttctacattaactagtgtgtttgaattggacttcttatacttgtggttgtggacccgtaagtgccacatgattttgtttggaccatttgattcgtaaaccaactacatatatacattattttttcatcatcagaatcttcgaattctacataccatcatatggaatttgcaatgaccaaacaaatggaaaatcttttggccttgaccaaatacacgaaaccaaggtggtagccaaaaccaaattggttattaaagatgtgtctacccacaagaaaaccaaaaccatggaataaatcgatatatgatatgttaattatattcgtcatgtttagttgggaatgtgataccccaaccatacagtttatataatccaatattgcttttctacatcaaatctcatttgtagtttttcttaattgagaattaattccttttagcttgattccaaagttcttaaaaccactaataatgagtttgttagttgtcaattctcatatctactaaactaatctttttcttatttgtcttcttctttgctctatcctttatatttatccaatacacaaccgatacaataaacatttgaacaaagattgtgtcccacaaggccacaaatagagatcaaaattatttttggtacatacatttacggtataaattatatatatagtggcccaatacatgttctaatttgtgttttaagcataaattgtaaatcaatgttcatacttttttttttattattattccggatcaaagtgtatactaatcttggaatcttacaggccaaaaagcgcatgtttcaaaacaacatagaattaaatgaccatgatataccaacgtttaattttaaaatttgcatttttgcttctattaatatgaaaatcactgattctagcctctcaaacgatatatagagcgaataaaaatttgacctcaaccaatacaaacaaaattaaaaagtgaccattcacttgctacatatataaataataacaatgatatggtttttttaaaaccaaagaatttcttggaccaaccacatcatcatatctctcaaaagagagtcgcccataaattcatttatgactccttttatcacaatcttgccataaatatttttgcctcctcccatctttacacacaagtcacgaggaagaagcaaatcagaaaaagatcaaagctcagaaataaagagtacagagattaattcattaagagtttttaagaacatgagggatatcgattctctcttctccatctcttttgtcattcgatttgtccaacaagacgagtcttgaaggtgaagtgatcaagctttttttttccttctctcctctgcttctcaagcgtacctcaaaagatgggtcggttgctacttgagccgcaagcaaacgcacccgccaacgcaaaccctaaacccaaaggaggcataaacgacacctacttcgacactaacatggttatcattttagctgctttactctgcgctttaatctgtgctctaagcctcaactctgccttgcgatgtgtgctacgcataactcggagattcacttcggatgatcaagtctcaaacgcttcaaacgcaaacgcaaatttgggacgtttagcggctgccacgggtctcaagaaacaggcgttgaaacaaatccccgtgggactgtacggatcaggaatcatagacatgaaagctacggagtgtttgatctgtctgggagatttcgaagatggagaaaaagttagggttttacctaaatgtaaccatggcttccacgtgaggtgcatcgatacttggttgctctcacgttcctcttgccccacttgtagacaatcgctactccttgagcagccttcgccgatggctgtttcccggcgggacgaggacatggtagtttccatcgtatagggacatgatcggtgatttcttaattatgctctctcaagtgggcttggtttttgttggttggaattgtttgtgtgtgtgcaaactaatgtgatttattttcacatattcttgttctgatgaatttaattagtgtgatgggttttcttgaaatcaagcaagtctttgctaatttttacgttttattagtttaaaataattaaataattgagagatacggtgtcaagtgtcaacactttggtgtactgatcacctaaataggagaattatcaagattcggagttttagtatcgacaacggaaaatggatttgattaaccggatttggtccttttccgagaggattatggatctaagatccaaaagatttttgttaaaaatatatcataattatattttgtaaatagtttaatcatagttttaaaacagaagcccaacaaaaaatttcttacaaaacggaagaaatacagactcaatatgcaacaacatgatttttacttactttgctaattcatatatcaaggggaagagaacaaagataatgattacaagaataaaaatataggcccaattattattgttattatttaatttgatcaaataggcccaattactaagctcatattgattaggaagataattaacaacttctagttaaatattacaaaaaaaaaacttatatattactattaaattaatgatacggtgatattctctcaaatatatattataatttgttcttattgtaggtaataaatcataataataataaaagaatgtattattgttagttaatattttgatcttatatgtaagaattattgtacattgatgatttcttatttactatggatgtcacgcgtgtaattatgaaaatccacgaattagtgaatgtttatatgcatgcattgcaattataagaaagcacgtatgccctctatatatatatactcgttggaaaacgataagagcacaaaaacaaaaagaaagtagaaaagaatatgaagtgtttgtgttttatcgtgcttttagcgattgtgatcgcacaaagctatgtaggagtagaagctgcgccaagtgatgggttcgtgagcagaaatggcgtccaatttattctaaatgggaaaccattttacgctaatggcttcaatgcttactggctcgcgtacgaagctaccgatccgaccacaagatttaagatcactaatgtgtttcaaaacgcaactagtctcggtttgaccatcgcccgcacctgggggttccgcgatggcgccatataccgcgctctccaaacagcccctggttcctacgatgaacaaacgtttcaggtaagtgtgaagccttttcaacctaaatatatgttactttttgttaattagtttgtcttctttttttcaagggtttggattttgtgatagccgaagcaaaaagaatcggtataaaattgataatcctccttgtcaataattgggatgactacggagggaaaaaacaatacgtggattgggctagaagtaaaggcgaagtggtatcttccaatgacgatttctacagaaacccagttattaaagatttctacaagaaccacgtcaaggtaaaaaaaaatacatattaaccaaaatttatatatatcttctttaatctctcaagattcgtaacaaaaatatattttacaccataatttatataacccatgatatctttatctctatttgtagactgtgttaaacagagtgaatacatttactaaagttgcatacaaagatgaacccgccattatggcttggcagcttatgaacgagccacgatgcggtgtggataagagtggaaaaacccttatggattggattaatgaaatggctccttttgtaaaatcagttgatccaaaccatctcctctctactggtcatgaaggtttctatggtgattcatctcctgaaagaaagaattctctaaatccagtttcagccaacacagttggagctgatttcatagctaatcacaatatcgatgccattgatttcgcatcgatgcactgtggaagtgacttatggtatgacacaatgcccatctatatataatgataatctgacatattcacactaagttttataatgtacattcatttaggacaaacaatctttcagaaatatttttcttgctctttttttgttccttgttgaacacctcagcctaggaaaaacatttattttgcttttataatccacccatgctatcatttgggatttatcttcctagattttcttttgcaaaagtagcaattggtttttttttttttttatccatatcagtatgtaaaactacttattttcatctatcctaatcgtatatatgtcagagctaaaaactctaacatcgattctataaataaaaaatgttattagggtttacaaatcaacaaccactgaactttttggatttatgcacaggtttcaaaggttggatcagaactctcgactggccttcataaaaagatggcttgaaggccacatcgaagatgcgcagaacattcttaaaaaacctgtaattctagcagaatttgggttaggatcggacacaccacgttacactctggctaatagagacggcgtgttcaccacaacatatgacatcatttacgcatctgcgcaaaaaggcggttcggccgcgggagcattgttttgggaggttattagcgaaggcatgagcaactttgcaggtccctcctccattatacttagtgacaagtcgtcgacggttaatattataagtgagcatgcacgaaagatgggtttgcttggtgagaccacaagaaagtaaagtttagtcagcaaaatcaaaatttaacatttaaataaagtctttatttaatattttatagcatttataatttgaaaatatgtaatgcaatgataaaaaataaaaataaaattctattatatactgaaatgatatccaactttttatacattccaaaactatatttggatgtctcttgatctcaactctgctcgtaggctatctaacaagtcagcagcaatataggtcttcagtgggccttattgggcctcattatgataagtaaagttctcgtagtggcctacaaaaattatattgaggggaccagataatagcttcacgtttagaagtttcataaagggaaaactcatatttcatttttgttattgttgacgtataaacaatccagatcatgaaaaaaaaaaagcgtataaacaatcttaaaattctaaccacttccaaattagtttttctcgaaactatttgtgcttttttgtttgttttgcttttgtggattttgattggagaagagaagaagaaatattatatgttttgcgtttgcatttaggttttttgtttgggtttagaaatattgaaactgatgtcttaactcttaaaatatatatttagcgctattgtctaacgttgatgtagtttggcatttactttttttaggtatgttgtatgcattagagttaattgtttgcttttgcattttcacatttaatttgaatgtgtttgcgttcaagataattaacattatttgtttgtgtgttttctttgaaattaagaagataatttgagctaccactgaattttgaaattagagaggcatcgagggaaacaaatcatatagtttggtgactgatttcaaggggaaataaccaaagaaggtcattagaagaataaatatggttagccagtattgattaggaagataatcaacatgttgaccacaatgaaagttagtcaatgaacggttttcaaataaagattacaaaataactagaccataaaaggtgatattctataaattctaattgttctttttatgtgttgtaataataattgttttattttaataactatatgtaaaaattattgtttatttatttcttatatattatggatgtcacgtgtataattatgaaaatccacgacttagaatgttcatgcattgcaattgtaagaaagcacttatgccttctatatatatattcgttgaaatgaaaacgataagagcacaaaaacaaaaacaaagtagaaaaggatatgaagtgtttgtgttttgtcgtgcttttagcaattctgatcgcacaaaactctagcgatctaggagtaaaatctgcgtcgagtgatggcttcgtgagtagaaaaggcgtccagtttattctcaatgggaaaccattttacgctaatggcttcaatgcctactggctcgcgtacgaagccaccgattcgaccacaaggtttaagatcacttatgtgtttcaaaatgcaaccattcacgatttgaccatcgtccgcacttgggggttccgcgatggcggctaccgcgctctccaaattgcccctggtgtctacgatgaaaaaacttttcaggtaagtaggtctttaatatagagagaaacagctcaaaaatgtatgttttatattgataatgaattagtttgtcttaactcttaaatttttccgggtggaaattaaagggtttggattttgcgatagcggaagcaaaaagactcggtataaaaatgataatcacctttgtcaataactattctgactttggagggaggaaacaatacgttgattgggctaaaaacacaggccaaaacgtatcttcagatgacgatttctacacaaaccctcttgttaaacagtactacaagaaccacgtcaaggtacaaatactagaacctatgatctttttgattatataacctatgatctttttaattttctctctcgttgtagactatggtgaacagagtgaatacatttaccaaagttgagtacaaagatgaaccaaccattatgggttgggagcttatgaacgaaccacaatgcagagcagatccaagtggaaaaacccttacggcttggatgaatgaaatggctctttatgtgaaatctgttgactcaaagcatctcctctctactggtcttgaaggcttctatggtgactcatctcctcaaagaaagacatctctaaatccggttgcagccaacgttcttggaactgatttcatcgctaatcacaaactcgatgccattgatttcgcatcgattcactcttaccccgacttatggtagatacaatgataaactcacattttcgtactaactttttcttttttgaacacatcagcttattaaaatcattaattttgcaacatgttcgttatcatcccaaacttttcgactttgcaggtttccaaacttggatgagaaatctcgattaaacttgttaagaaaatggctcgaatgtcaccttgaagatgcacaaaacattcttaaaaaacctctaatcctaggagaattcgggaaaccaacgaacacaccaggctacactcaggctcagagagacgcagtgttcaacgcaacgtttgacaccatttacgagtctgctgaaaaaggcggtccagctgcaggagcattgttttggcacgttattagcgatggcatgaacaactttaaagaccccctctccattgtacttagtgaaaattcgactacggttaatattataactgaggaatcacgaaagctgggtttgattcgtggaaaaggaaagttatcaaaaactaaaatttaaatagtcttctgtaataattttgcaacgataataagacactcagttatacattcaccgaagtgtaatcctaaagtttagccaatgccaaactaaactcagttatacattttataaagtctcagcattataaaagcattcaatgaaaaaacatgtagaagatgatgatgcaacatgtgtttagatcttagctcagcactagttttgattataagatgaattcagatattagtttgcatcattcaaaaacatatgatctcttctacaaattacttaacaagggatacctttttcttgtctgaaagtgatcttacaagctccaaatatcagttcatgtaatgatccagagagaaacagagctgtcttatagcctctcttttctcctcctctcgttctgttatcacatttctctgcaactccacttgtttctccaacacttcaactttggctctcagttcttccacaatattcttgtcagtttctgactcagatttaatctcagtttcattaagacacaaaacctggttcaaatactcctccatttgctcaatctggatttctcttgatctcaactctgctcttaggctatctaacaagtcatcagcattatcggtctgcagtttcgatttctcgttcttgcattcactcaacatttccattagctttgaaacctctgcttctgacacacctaaacactctttaacctcgtcgagctcgctttctaatttctcaatcttgtaaacagaatctgatagcttactctctaagtcaaccacataccttttctcagtttcaatggctatgtttctagcttctagttctctccgtgcagtttcaagctcagcacaaaacatatcagcaagcaaaaatgcagagtctttcttctcaacctcatcatttagtttcaagctctgcgacttttcgctactcgttgttgagaccacttggtgattcagagatgagtaagaggttcctcctgactccaaatcaggagacttatcaggcttaaaggtgctcaatgcacccattgaagttacaagagaacatggcagtttgagaaggccgttgaggagctcctggttcaagtcgttgtaagtttcaccaagcgactgatataagtaaagaaatttctccgttgactcgggtttgctatcttcaatcattcttagcatttgttgaacattctgatttatctctgagaaggtctatcagtctatgttttgaacagaataaccaattaaagacaggacatgagcaaaaagtagatatctatacctgttaatatgtctgctaatgacttagaattatggagccacaaggaagaatcatcaacattctctgattctgtttctgtgattaaatccatctaacatataaacagaagaaaaaaaaacctaaatcagagaaccaaaacagtagatttataaaccctaaatcagagaccccgaatacttgaattcagtgagagagagagagagaaagattattgacctggacttgattttgttgagaggagaaaccaagatctgtcgattaagagcttacaggggaatagtatgaagatgattttgaaattaggggtacgtgttacgatgaggaagttggagagattttgtgaggcacagtgacatagaaaatggcgcttctttggattcaaatttacttgtagaaaaaaagtaaaaccctaaaaaacaaaaaagagataatgcactttgactttagtgttcgtgtgtattatcgactttattcattttttatccaattgcgtttctcacaaccacatatttccaaagctgacgatttttattttttcttgtcttccttttctttttggttaaagttaggcatgttcaataaaaaaaatgaagatttaggaccaaaacatattaataaacaggattttatcaaaaataaaaagaatgagacaggatcaggttacacatatacggtagccttcacattctttttctttgatttgaatgataatagatctcttaaactttatattcttatataaataaaaaaaattagaaagtgcacgtattagcgttttatgctacatatataaaacaactattgaatgctaatagagaatccacaatgattgaacggttataaacgaatatatatatatatatatatataagcttaactcacgaagaacttttcagactgaatgaaatggttttaatttctccactagcccaatatgcatgtcatatttagtgcacacgctattggagttggtgtattcaaaatttaatttatgcctactgattcagtaaaatcatttctgcatgcatggtcgagtgttcaagatgggtttcgactgatcttacgactacgagaccagtttgataaaaataaataatgtatatgttaacatgtaccatatacgttttttatagttatcatgtacgttggggtgtctaaacctaaagaaactgaaagatcaatccaaattaattaacattagtcgtcgtttttaagttttattccttaccaaacttaaatacttgttctactgttgacacaatttgttaaaaaattgatcattcctaacagaacgaagtagtaactttttttttcttttttcgtcaaacgaagtagtaacttggaacagttttggttaataattatgagacgaaagtaaattatatagtggcaaaaacgttacacgtaataaaaaatgaatctgattccatttgtccacaaagacactgacaattggcaaaggctttcctttaggcacatgtctctcgtctgaccatatcatatgtcatctctcacttattgcaatttttttccttttcacaaaatgttaacaaaagctatgtattgtggaatgatgatcttttttacaaactgttttcaattttttttattttttttttgtgattggattttctttaaaactttaatcgtggctagaggtaaaaaaatgaatgtgtagaaaaccctcaaaatatggactaatccaaagtcatgtagcaatgtagcatatgtcattttcattcacacgttggtttgtctagactagagcatagagaagaaaataaatcgagttacaaaaaccgaaaattagggatacgggaaaaaaataatagaaaagacgctttcgttacccactgaaaaggaggaggagatatcttcttcatctttgtttgtgacacttctccttttttgccttttcaatcagtgtttaattatttgcaccttattcatgttttttttcctatcattctttaatttttcttttaacaatgagatagaaacaaaaaaagacagaaaaacagttacacaaaagtcaaatctctttccatttataatttaatggttccgagcaaggtttatgatataattggtgcatattttcaatttcaaatggattattgaacgtgaaaattgcatatgaccaactaattaattgagtcaatagtttttgagttttgacgtgtacggtaaacctataacctttgaattacaaccatttgcatttgttttgaactttttcccttgcgcaaattcatatggttcataactttagctaaaaccaacttgttcattgaaagatttgtagtctttctttctttagagttacgagcatgaaataggtcaatgaaattgattatctctgcgttagaaaactgacgggaaaatactttagctatagtataagtataactttaatcaaattacaaaacaaatcattagcacgggtcttgataacacacgtgacatacctgaatctaagtaacattttataaattgaacccagcgcgctatcaaatggattttctttattagtttagattgaaagtcgtttataatttgtcctccttaccgtcttgtaatcgtatgatcttgaaataactatgaacttttaaactggatcattccgatcaaaaattattttaatggtatgacatagagaatagaaacttaattagtgcggataaaacgtaaatagtaaataataagcatatagtcagacacacaattattacccattgactaccccaactatgaatatgcaataaatcagtgaccatatgcaaaagtcggatccacaaccaaaacgataaattgatttttatatatatatatatatatatatatatatatatatatatatatatatttctctctaaaattccttcacctttatttccttttaaattatcgtaacaacgctagtttaacaaatacaattatcgtaacggctgcatcaaaatcagaatttgcaaaaaggaagtgtttatgtcggaaaaaaaaaatagcattgtgcaaagaaccaatgtctatttcatggtaataaagtttattcttttttggaatatcttttttaacaaattaatttttaactgcttattctattatatattttactaaataaattttgaacttatgggtggttcggattaatattggacaaaaatatttttataccaattaaaaaaaggattgtttttttggtagaattaaaaaaggatttatttagtaaattatataatagaataagcaaatgagaattaaatttatatagtttccttttgctcatttttagcttaacaaatccttttttttggaaataaatcctacacattatacgcaagtagacattctatatattccttgttaaatttctatcctaagtatactggtcatgtcttaatagtagaaattaattactaattattttttaatattataaaaaatcacataactgagaaagaaacaaaagatatttttcactatatatgcgtttgacaaatgtgacaaggcacacagagcattccgtggaaaaaccccaataaaatctcaggcaaatctccggcgtaatcgatggcggaggagaatcaagaagaaaccctagaactcaaaccaagtagaaaaccaccacactttgtgctaatacatggcatgagcttaggatcatggtgctggtacaagatcaaatgtctcatggaagtctctggcttcaccgtcacttgcatcgacctcaaatcctccggcatcgattcttcatccgtggattcactcactaccttcgaccaatacaaccaaccactcatcgacttcctctcctctttccccgaacaagaacaggtgaaacctaattcagaactcaaatgaattgattcttgaatctgaagcaaactcactctgtttttctctgttctgtttttttcatcaggtgatacttgtgggtcacagtgcaggagggcttagcctaacgagtgcgatacagagattccctaagaagatctgtctcgctgtttttattggagcttcgatgctcaaaaacgggcttcagacagatgaagatatgaaagatgtaatgatacacatttctttaaagtcaagttaacttgtgtgtgacgttatgtttctttgtcacagggagtgcctgatctatcagaacatggtgatgtctacgagcttggttttggtctaggaccggagaatcctcccaccagtgctattatcaaacctgaataccgacgaaaactactttaccacatgagtcctcaacaggtttctctactgtttcatttcatatataatctcaaaagatttaatgtgtttaagtgtaggaaaattcgaccaactccttataaaaataaatcaccatttaatacaaaatttgcaatgttcataactaacctttatttttatttttatatatgtgtgtttttttcttataactttaactaaacaattatacaggtatatatatatccaaaaatcttccattattaaagttaaatattcgtgaatttgtctgctatgtacgtagaattatggtagtgtggatgttacatatcgaattggagtggaaacatgcatatcaaatcaaatattacaaactatttcatcaaatccaaattccttgttcttatacttttttttgttgttgttgttgtgttggtgtaaaggaatgttccttggctgcattaatgatgagaccagcaccaattttggcgttaacgacagcaaaactggaagaagaggaaaaagaaaaaggacaagaggagcaagtgccgcgcgtgtacatcaagacgttactcgaccgggtcatgaaaccggagcagcaagacgcgatgataagacggtggccacctagccaagtttacgaattggagagcgaccattctcctttcttctctaacccttttgttctctttggtttactcatcaaagctgccgtttccgtcggttctatctaaaactatttaaagaactaaaggattgccttttgttggttttaaaaccggttaagtgatcagtattgtcgagggagtgtttatttatttttgatttttgtgacattttggtattttatattaatcgttttgaaataaattatgttttgcttaattttatcttgcgtcacaaaagtgaaataaatttcggcaaatcgtgtagttttatataaatcactaatttgcagtcttccaaggtctacttaaagtcctagccggtatcgacaccaacttcacagttacctcaaaagccttagacgaagagaatgactccgctgaactgtacttgatgaaatggacaacatttctagtccaaccaacgactctgttcatcacaaaccttgtaggagtggttgcagacttgcagtgtttgattttgcctaatagttgtttgtagttgatgtcttaagggaacataggcagcgtttgattttgcctaatagttgttttgagggatcaatatattactcgattcaatccaattttcataccatatatcaagaaagatgaacaacaagagtcattgtcatgaaacccaaacatttatttagcaaaagagtttcagaaaaactgactcagaagattcccacaagagtttttgtgaaatttataggcttgaaacaaaagaaattacttcaaactgtcaggttcttgtagaaaaggagtgacttcatgcttcagaatctgtgctcaagcttctcctgttccttgaaatactgagcatacctgcattcattgtgtgtatttgaaagaataagcacaaaagatgactagaaactagaccataatatgcagcacccgtaatgtttagatcgatcaggtaactaatagcttcacaagcaagaactcaacagttttaatagaaccacactaatcagctaatgattacgactaagccatttaaatcctcaacatcttgaaatgcaattccacagagtggttcatcaacaatactaatttgatacctggaagactttttctagctgagagtctctatatactacactccacttaatactcatctcaaactaacttaaatcctatcatttctcatttgttcctatgacacaaacgaagaaccctatatccatatgcgccgcacaagaccgatgacacagatcgaagaacaatcaaccagatcggaactcgatccaaaggttcctttaccaatcgattgatgagagagatagaaagagagatagagtaccagtaggttccaacgacaggggtaacgagaagagtggcgctgatccaattctcagagaccttgtggtggatcttctccggcagatccttccagagaccggtcatgatcttctgctgaaacggagaaagtgcgtaaaccaccgccttcaatttcaccggctgcttccccattttctttttctcttcccagataatcccaacaacaacaatccacagtacgagaacgaatctcccccaaaacctaaaataaacaattctcaacgaagcttatgttttttatccgattccggttcagttacaattacaattgaaccggatgaccggctgcaaaatttatcctgatttgtttcggttcgatccggtttgagtaaaccgaaatagataaatcactagtccagacataaatgatgatgatgatacagctagtgttccggaggagaaggacgatcgatctaaggagacgatgaagatcttccacgttccttgtctgcaagacaactactcttatctgtgagccattttgatatcctacttcaatttcgttgcttcttaatctgactcggttcatcatcagtttaggattctttcttcgtaaaaaaaaaacaggataatcgatgagagcaccggagacgcggcggttgtggatccagttgatccggagaaggtgatcgcatcggctgagaagcaccaagctaagatcaagttcgtactcactacgcatcatcactggtaagtaaacctcacttctctctatgtcactggtaacttatcttatttgattcatctccgagattctctgttggttcttattactcagtgatatcgacatatgctagattccggtcctagacattaacattagtacaagtctattgttaaatctctcagttttctgatcaagtgtttagctttttcctactatcagtttcaactgacttagagattcatcttcgtgagtctgattctttgttaaagtctgatactttctgcattaatgtttcacctcttgaagatgcaagatttattatatatgtaccatatgatggttgcctttgtcttcgatgaaatttggatttgaggcgacgtttttattttaacactcattgtttgattggtggcttgatatgatcaaagggatcatgccggtggaaacgagaagattaagcagttggttcctgatatcaaagtatatggaggttctctggataaggtgaagggttgcactgatgcggttgataatggtgacaagctgactttgggtcaggatattaacatattggctctccacactccttggtttgtttttttttttttttttttttccaatgaatttagatgcatctaatctacttgatgtttaactcagtcattttctcttgtcatcgctgattcctctgatatatctacttgttacagtcacaccaagggtcacattagttattatgtgaacggaaaagaaggagaaaacccagccgtgttcaccggagatacacttgtaagtggtaacattaagctgaatcctcttgttcttccctaccatggaccctatatgttctccgtagatcttttatctctgtaaatgtctaaatggagatagttatgagttaaacattaagctgtgtttactttgattttatacagtttgttgctggatgtgggaagttttttgaagggacagctgagcagatgtatcagtcgttgtgtgtgactctggctgcattacctaaaccgacacaggtttactgcggccatgaggtaaaaaaatcaacagcttcattatgtcttttgagttcttaactcataaaaatggatgcctataaactgaataatccgctattcatttcttatggttctcagtacaccgttaagaacttggaatttgctctaactgtggaaccaaacaacgggaagatacaacagaagttagcatgggcccgtcaacagcgccaagcagatcttcccacaatcccttcaacactggaggaagagctcgaaacaaatccatttatgcgtgttgataagccagagatacaggttattactccatttggttcatcttcttgaacaattcatgattcggttttatcagctatcactgttgatatcgatctttactttcttgtcgtatatcgagattaactttgttattttccaggagaaactcggttgcaagtcgccaattgatacaatgagggaagttcggaacaagaaggatcagtggaggggatgatgataaatggagagcttcttgcctatgttttgtgtacttgtgttgaatgatcctgtaaaaggtgtatgaaccagtaatgttgatattctgtgtgaaactgtgaaccggtttggtaaaccgaaatcagaccgacctgtaagccgtactccctttttgaattttcagtttactatggataataatttcagtgtctacactaatccccgtaaaaagagagcttcttcatcttctagcagtcgtccccgtaagagaaggtaatcttcttaccgcagaatccgttggattttgccttctgttgcttcagattcgattctcgtagaaggttgtcttcgtacctgcattgtatcaaaaacccttgtgatctctccccatttatacgaaaaacttcaccgaatttgcctttgataacaaaaaatctcttaaaggcaaaatagtagttaaaaaatcccttaccaaagcttctctgcaagcttgtacctaattaacaaaaaatgataacgttaatcttctgttatgacatcaaaactagagcaataacatggaaaatcaatgtacatgtgttggagagggtatggagctatctcagccagctcaagaaagattttgtgatagcgcaaacttttaccattcctctgttccagcgcctacagtataaaaatatttcatcaaaacaatttcatcatataagtaagtatacactagttttcatcattgctataaaaactactcaccttctctgcttcattagcagaagcaaactcaaaatagccacagcccatatgcttacccgattggtcaacaataagtcgaacacgaacaacttcaaagtcttggaagaaatacaacctgtaaacatgaagaggataaaacatcagtcatgaaaaacttgctccaagaacgaaagagtaaactaaaggtgctacttacatcctttgtatactagttctaggagggagattggtaacaaaaagcgtcttttttcttgcttcctgtatttagcagccaagtgtgttagcatggctctaaggaggtaacagttttgttatcaaacacttgagcatttcccctctgagcctgacatattttgaagatgataacaacacgcgtacctcaacaaaatagggagtttcagcaagtccttccactgctgcctcatctctttcttgtccaaggtagtcttcgtacctggaacattaaacaacccttgtgatctctacatgtataccaaaaacttcacccaatgtgctcttgataacaaaccctcaagatgcaaatagttgaaaattccttaccaaaccttgtgatctacgcaccacctagttaagaaatataatattagtgttagtcttctgtggtggcaataagttgacagcaacaaatctccataacatggaaaattaatttacttgggtggagggaatggagctatgttagccgccttaagaaaaatctcgccatcctgcaaatattcacccttcttcttttccagcgcctagagtataaataaacggtttaactaatcaaatgactgcgacttgtatacattacttttcatcaattactagaaaaacaactctcacattctctgcttccttagcagaagcaaactcaacaaatcccttgcccacatgcttgccagtgtggttaacaattagtcgatgctgtaaaaaagtggaggataaaatattagtcatgagaaacttgctccaataacgaaagaggaaatcttaaggtgctacttacatatctgatattatagtctggggagtaagatgggcaacaaagagcgtcttttttttacttgtggcaacagcctgcgtttaacagccaagtgagttagcacgacgcaaagaagaaaaggacttaaggttgcacaaaaaaaaaacacaagatttctgttattattattaaaggtttctgctgagcctgacatattgtgaagacaacaagaagaggtacctcagcgaaatcgggagtttcaccatgtcctctcatcaaaatgatcttatgaccatgaaaatattcaccattcttgttttccagcacctacagtattaaaaagatttaatcagctatccagctttcaaaaaactagtagtatgtttttcatcataagtttgtatacactaattttcaaaatgactagtaaaatactaaaatcgtccatcatgactacaaaaccagtctcaccttctttgcttcgttggcagaaagaaactcaacaaaggcacagcccacaggcttgtcctcatggtttgcaataagtcgaacactaacaacttctccaacatcttgacagaaaccgaagctgcaaaagtggagggtaaaatatgagtgatgggagagttactttttctttgctcagagaagaaaagtgggagtgctacttacatatctaatatcttagtttggggggagagattggcaacaaagagaacttcctgtgcattatacaggaacaagtgtgttagcaggaaacaaggaaaaagtagctagcaagattcagccccagaaaataagtaaacatttcgagcgttttgaagataatgagggcagtagggtggtacctcagcaaaatcggcgggaggtgtctcatcttcttgtcgtggaaggaagtcttggtacctagaaaaatggaaaacgctagtgatctctacatgtatacaaaaaaacttcaaaaaaaagtcttgttcccttaccaaacctggtgatctatgcaatacctaattaatcaaaaaatgaaaagccttagtcttctgtgatattgtatcaaaaagtctagcaatcagttacaaaacgtggaaaaatcatgtttacttacgtaggaagagtcaatgaagagcttagcttaggcactttaagataaatcttgcgatcgagcaaacattctccatccttcttttccagtgcctagagtgaaaaaaacgtcagaaaataaccttggatacgtttaaacatataactaactatacacaagttttcaaagaaaaaaaaaactggtctcactttttttgtttcatagggagaagcaaactcaacaaagccagagccagtacgcccaccatctcgttttatagcaagtcgaacatgaacaacttctccaacatctttgaagaaagcgacgatatgtgataatggggctcggtgagggatacggcccataaagagcgtatttttttatcacggaagcttcctgaatttaacagccaagcagaagtttgtgttagcatgacgaaaaggacaaaacaaaattgcataaggagaggtagctacctcaacaaaatcgggagtgtcatcacgtccttccacagtactttcctcctcctgttaagcgagtagccgttggaacagattttggagaacaagatgcttaatttgaacataataaaacttattacaatattaaaccttgagagagattaaattagcttgatcagacttgtgctggaggctatcagcaagtccttccggtgtctcctcctgttacattcacatacatacatacataagtggtgtatgtattaaaaaaaaaaagtggagtgatccgacgttactttcttctcctcgtccttatgtttcttgagaaacggtttggtctccaaatcatcatcttccggatttctcttacctaaaagaagagcagatcaatggaaaagaaaagaaataaaatcaacagccaagtagatagtagctcagagccactgaaaacaaaccacataaattaacttccttgctagaactggccatggagacggtgaaaacagcgccaattttgttttccggcaaggcaattgactcaaagttataataacaaccctagaaagaaggtaagatacttgacaaaaaagaaagaaagaaggtaaggtattcataacaacaataatctggtttgggctaggcctgggcttttattgccaccaaccaatctggtttcataacaacaaaataatctggtttgggctagtcctgggcttttttccacaaccaagcaagattcaattcaagtctgggatcaagtgtgtgtgtgtgtgtgtgtgttgtgttaagtgatcctgtaaaaggtgtatgaaccagtcatgttgatattatgtgtgaaactgtgaaccggtttggtaataagcagtaaaaaaaataaaactttcaaattgtaataccaaaacatggaatagtttaatcttggcggcccataatactgagaagccaagtggcaacgaatggagtgggctttttacgtttaggtcctcttgttcatccaatgatctttagtttttgtccaatagattgtgtaggtgagaactgagaatgagaagtcaggaattcatcaccatttttttttttaatttgttttacaaacaaagacaaaacactgttgaatcatctaaccttgccgtttaatttagaaaaaacagaacaaaaatgtcagaacttttgtgtagttgatgttattcttctgtctgattagtaggaagcaacaatgaatttaaacaccacatgcatcttctttttgaaccaaccaaagcagactctctcaacattatctctcagcgacaagtttagttcagattcctctagaacccattttcagatgtctcgtcagatttccggccaaccctctcgccgtctcatcgtctccaatgctgcttcttctccttctctctctggtggcttcccaggtttcttacaaaaattgttcctttctttctacttagaattcagatttcaattgatgaatctttctgttcgtgttaggtaactaccatattgaggtttcttgactcacctatgagatttagtattctgctaattgtggaacatttgagcttatagttccaattggatgaaattagatttgagtaatctctctgtgtatcacaaattgttcctttttctcccataaagatctaattttatatgagtaatcttcttgtttcatgaatatttagatgctggagcacatagtaaagaggagatggaagctgaaacagaacaggatccaatgaacctagctgatccagacagttgtttctgtgagtttcaaggtgttcatatacaccacaaagtgttagatccacatacactctctgatgatgtttcaaacacaagccctcatgctcaagaaacaccaaaaaccaagtttccgatgattctattgcacggtttcggcgcttctgtgttctcctggaacagagttatgaagccattagctcgtctcgttagttcaaaagttcttgcctttgatagaccagcatttggtttgacttctcggatttttcacccgtttagtggtgctaccaatgatgcaaaaccattgaatccctactccatggtgtattccgtgctcactacgttgtatttcatcgatgttcttgctgccgataaggcgattcttgtggggtaagtaagctagtaggttccatatactttgcatttcttattaaagtgccaccataagctgagattgttaattcatatgttgtaggcattctgctggttgccctgtagctttagatgcttactttgaagccccggagcgtgttgctgctctcattctcgtcgctccagctatattcgctccccgtcctgtggccacaactgatgctggagagaaccgtgacaaagaagctcccactagcaactttctagggactctagttgagttaaccaaaggtgttataagagcagtattgagagtggtaacgggaatggcgaatatgctgagttctctctacaagaaagctttagcagctttcctcagatccttccttggagtaatgctggtaccgcttttttttgtcttggcttcattcaccagtcatgtcattttttatatgttgttagaccagaacacttgatgtgtttctaaggtggttgtttttttcaccaggtgaggatggcaatcaataaatttggagtaacagctgttaggaacgcgtggtatgactcaaaacaagtgacggatcatgtcgtgcagggttatacaaaggtgagattttcgggttttctcaggtttctttatttcttctgcattgttatgttaaaaatttaggaaatttgattgtatttgttgcaaaaaaaacagcctcttaaagccaagggatgggacaaagctctcgtggaattcacggtggctacactaacagataataatggctcagagaaaaaactcccattgtctaaaaggcttcaagaaatcaaatgccctggtaatatctctttctataagattctgacaatgaattagaaattggaaccaaatattgtgcattgtatgtctgaactctgaaccaatgacatcatactatcttcatgtttctaatagttctgattgtgacgggagatacggaccgtattgtgccagcatggaacgcagagaggctggcacgagccataccgggatcagtgttcgaagtaattaagaaatgtggtcatcttcctcaagaggaaaaaccagatgaattcatatctattgttgcaaagtttctagggaatgcttttggagggtcacaacaacaagacgtggacttgaagttccaaggcattgtatcatgaagtataactatatattttagctcaatcaagactaaattttagagagattcttcatgttattggacctgaagaaacaaatgtcgacaatatcaaagactagatagatatagaataaaataaccgagagacattgattcttcaacagattgatatataagcgagaataatacaccatgtggtgcttcttgcgagtgcgggcaagttttgcagagtccagttgattagcttggagcttgaagctggcttgaagctccaactcgtcaagccaacgcaaagtttctggaagaacaaagtcggcaacattttgaaactcaaagcgaggggtgcaaaggactgtgcagtcttcctcagccaagagggcgacatgcttcttgttcgtcagagtagcagcagtctcatcttccagattcttctcattcgcctgagccatgtactgcctgaacttttcgagataagccaaactaggggcgcatctcattgcaatagtaaacatgtaaccaagagcatccactttcaggcgcttgcacttgtccagtgaatcacaatctcatgcggatactgtgaatcagtttccttgcatatagcaacttgttggcgagcaagagacaagtgagtaggatcaaatcgctgatagaggaggccaccgggatgagttcgattgcggggaggaaactctctagaaaccttagagagcatatgcataaaggttttccctacgcacctaaccgtctcgacggaagtcttatggataaggtcaaacttagggcaagccttggcctcgaacctgacaaagagtgatctcgtaaggtccttgagagaaacagatacgatggcatcaacaaaatccttttcagttagaaggacactcatcttcttgaaaatcatcatctcatccaccatctctgctttatctatctgcacaagtacgagtccaaaatatacaggaatatcaatcatcaactcatcatgtctacatatgcagctaaatttcaattctatgcaatgcaaacagagaccattgttttaccaaacctatgctctcacttatgtttatcaataaaggccacaaaattagggcttttcgatttccaatcaaagactttcggttgtatccccgacgtacaaaatctaggccagaattcttaacagctcaacgtttaacccatcaggtttatcgataactagcactaggaaaacaaaatttacaacaaggaaaattgaagtaggtaccttgagaattgggaggaactatcacgaggattcgcgagattgaggatgagggaaggtaactcgtaaccctaggaatttatcactctgttatatttcacctcataagtgatattaaaaattacaaaatctttgtataaacagatttaaaaagtttgcttgcctcgcaagttaggtttagggatggtcaaatacgagaagcccttttgtcctaataattttcttttttattttcataatgaaacatgaagaaagtgaaaaagggattttcccttgtcacaattatgaggttctattgtcacaaaaccggaccaaaccgggaattcactggaccagaagtaccaataaatactgggacaaaagaatagagcatcctaagaagtttatgttggatctgtcaatgcacttttgttgtatattaacgcctctgaatggtcgtagtaattgtatagatcatccgaaggaaaaaatggactatcttcgtgtggcgggtctcttgagttgcggtttctgaactttattttgctttgggatagtttccagtacttgtatcgtcctctgtctcttagctgttcaaaaacaaatgggtcattaagaattaggtgtattgtaatagtggaaatattgaaatctcttaagacgatttgactaaccattctcatgttggtggtagctctcttggagtttccgctttgcaaactcaaactttgagtctggatccagagctttgagtttctgaacaaagacaagaacacttgctattagaaacaaaacagattaataatcaaacaccacggctttattaactcaaacactcacatcttgttgaggtccagcaagtttccgcttttgctcagtaacagcagttggttttcgttggattgcggataccatttgttctctactttgctttgtttgtcttttaggctcgacaacatctgtggctgagtgcttcataggtctaacatcagcttcttctctcctcgtctgttgatcattgcagtacctcccaaccacatttgcatcatttgttcccttgggtctcctccccgcactactttgcgattttctttcatgtttggactccacactgtgacgaggatctgaaaacagtggccaccatgagtgtcaaaatataggaaaactttcaagtagagaacagagtaccaaagagtatactaactcacttccatcgcagtccaaacaatctaagatcttcaagtgacccaagacattatgaaacaaggacgagggaggaaacttgtcaggataacatttcgtctatgccagaaataaaatatgatgagagggaaaaatgttaatagacctgagaaagttcaaacccattaggttcaggtgcatagatatctaaatcatgtggaggagaaggaaaggcttcttcttcatcaattactgaaaggtttagagactctggcgtcccttcagtgcctgcaagacccaattactataaatctagaccaaaacctgctcgcactgactacggaacaggaggagagagctatttaccagccatttcctctggggtgttcatccactggtccaccagcctcttccactctctgtgcatcccatatataaaaacacaatctttatactcgggagccagaaagtaaggaagagtaaaatgttctaagtattgagctaacacaagagcagctccctaatgatcaaccaaggcttttataatgacattttacaatttgagacatcctacaaggcaactggtttgcatctaaatcaaaccgtggaggttcaatttttttggaacattttgccaaagtttaattcacatcacagatgcgagagtatgagaacaaatgaaactaagcacacaatgagaatgatgaaactcatacgcgaaaagagtctttgcaagtttgctaatcttatcggaactatgtctcctcagaccattaacagcctttccaatttcagtatcctgcaagaacgtaaacacttaaatcactccacagcctcgaaaagctccatcagaataagcaacttccactacaccaaatcatacaatatcaaaacaacaccaaaaaaacaaaccttaagaatgtccacactcatagacattgactcaagctttctcagagattcgagtaacacagaatctttctgcaaaaaagatgacagaaaccaaaaactcaacaatcaacacaaagattccaaatttaaccaatgaattagcacaagttttaatgtaatccaagcaaagagactaaaaacctcatcgtctttgttcgacaagatatctctgatcctcataacctcatcaacactcacagacgcctcttcaccttcacccgtcgcaacaccagaatcacccctatcaccgccgccgccaactccaactatctccaccgccgcttcgtctccagctatcgagagctcaaggtggtcacaaccaatgcagcgactcactttacaagagaagagaagctcagcaattctatcactcctggatttaaactcctttggccaatctgcagcagctaccataatcgcatgatcaatgataccaaaaatatcagaatctcctcgccggaaatactctctccaagtatccaacgaaacagatggtctcatcttcgccatcacgaaacggcgagggaaaatcgattccggaatccgaattcctcgatctgcaaaaccctaattaaatttgaatttaggtttttgaatacgaatcaatatagtactagttgtgtagttttttttttttttaagtttctctgcaggaaataaaattcgcctgagaatctgacaaaagtttctgcagaaagtccacaagaactttcccgagaaaacttaaagaaacagagcttgagccaattaaaagagggcaagagaagaagaccctagaattttaaaaagccagaaatttatgtcgacattaaaaaacttaggttataaaaaaaaatggtaatagttttgatcatttatcttgataactcatctgttttatttaagtaaaatattgaatttgtcaatatatatattaattctaaagatataggcttatgattaactgaatgattatttagttaatagtaaattagtaataactagactatacatgtgtcgtcctatatgacataatgacccttgatgaaaaacacgtcacatggcctagctagtataaagatgggatattcgtttttttaaagttatgttatcaacattacattcagagcatactgtaatagtaaattattaacacattacacatgtcctgataccaacaatggggtactcatttttcaaagttatggataattacatttatcacgtgaattacttgaaaggtaatctaaataaacgcgtttttggtgtcgcaattatgtcgttttaaaaagcattgttcatagtcccacagatgtttagcactattttttaattagtactagtattaaattattatttttgtatttttttcattaaatttctcgttagtttcgtgctttgactcttttgttaagcttcagccacatgttcccgttgttgaagctgtcttttgaagtttcgtcgtcgatatcatcctcgactctattttcagttgcgttaaagacttctcttcttccaaaagtttccttttcttctattttaaatattctttcagcacttggagattcacaagtttgtcggatcaatccattttaactccggtaagccatacttgcatgattcgttttgtttccaccgatcacatgttatcgtttatgctccatagcttaatctttgactcattcatgatctttttttggtttaatgttaaaacccatgcatgatcttgtttctgcatatttttgttttggttcagtgtaaaaatttctgcataattttggttctacaaaaatagctactatgcaaaagcaagatcacggggtcaaagattaagctatggagcttaaacactacttgtatttgactatttgtttctacgtcatttgcgtttgatttgaatctaaaggccttttaatcgatttcttgtcatgtgtttgtaagggttcagtgttttatgtatctttcaaattgtgcttctagtgtatccattttggatttgtgaaagttgtttagggcttatatatctaaaattgtaaaacctattttaaattaatataacaaaacagtttcggacttttaactcataatatctcttcgaatttagttcattttccaactttgaaattcgttggcttgtgatcttgaagccttgttccgtccggaatttatgttacttagtcaccagtagagttacaaacgatgagttattttaatcttttttctaaaaggtccttgacaatggtttgacgagaaaaaatcgtttttcctttttgcagatccatgactacgactaggcggaaaaatacacattggtgtcatacttgtagacgaggaatccatcttcaaggagaaggcagaagagaaggagcttgcatttactgtggtaacacctttcttgaaaggctatatgagaatgttgaactaagcccttttgatttattcggattagcctacgaagaagctcgtaaccgtcgcaacaacagaagatcggttataggagaacaactaagttttgaagagttgtttaaccggctcccagcactacaagaccgtcgtggtcctcctccagcatcactagccgcgattaactcattgcaaaagatcaaaatcaggcagaagcatctcggtttagatccctattgtccggtttgccaagaccagtttgaaatcggatcagatgcaagaaaaatgccgtgtaaacatatctaccattctgaatgtatactcccgtggttagtccagcgtaatacttgccccgtctgccgcaaagaacttccacaagaccgaaataatagccggaaaaatccattgtggcatctgtggccgttcaggtcctctggtttggcctcaaaccataatggatcatcacctttccattgagatgctagcttttgaatcaatccatgtgcatgtacgtagtatatgatgatattttatttttccatgataaaatgttgcttttttcaatatattggcatgtacaaaagggttttgtagtcttattaatgtatgaaaaatattgtttatcaaccttgatattatattttctcattattttcttaaaaatttgataattttcttgaatttatccattcggtgacggtagttcgagcactcttctgtcggtggtcttacccaaaacgaccaaccatattatttaaagtttccaaggtgtataaaatttgcaatgatcataattaagataaatcttaaggaaaatgatagtgaagttaagaaagtatatatgtgaaaattaaattcagttgagcgtaaatagaaaacccttacaaaaaaccaaatccctttcttatttttatttttgtgccattttctatatatattaaaaaaaaaacattcttataatctgaaatcggaaaaattcacttcactctcttcgttttgcgtttttttgtgtgtgtgttttaaatatcaaagccatgttttgggtaaggaattaaagagcaaaaacctcgattccgatttcaaatattcgaaggtgaaatttcttcattttctgcgaatttggtagctatcacgttctcaatctggtgaattagggcttttgttgagctgtggaagctaatgatgggtgtacccaccgctgaggaaggtggggtttctctttgttgctatgtcttgaaaccttagtttgcttttgtcaatgggtaaaaccgaggatgatgtgagtctccgtgtcgccggcggcgaagctaccggcgattcgacggtgaggaatgctcggtgtgggtgttgcaaatggatctcaagcttcgttgggttcaaatgtttattcgtgctgcttttatcagtcgctttgtttctttcggctttgtttttgttgcttccgtttcctatggatcgtgaggattcgaatcttgatcccagatttagaggtaaatctcctctttctgaattcgtgcaaaagtttcaatttttgctaaaagctattttagctgctgaggtcctatttggacaatgaatttactctatagctttaacattgatttgagtctatgtttctcatcttctatgtcctgaattttgcttattactaattagaaagctattttgggaatgagattttgactgtgatttgtgctttaatggtcagggatgagtcaaaactgcttcctctttgaagtttttagataggaagattatgttattgaggagaaataaatctgtgaacctttttaaagctatcctgaatcatagttacttgacattattagtagtgatgcgtgttcatatctcagtgactctgtcttggctttcacttgagacacctgtaaattttccatgagtagtgaagagaagacatcttcttacaagttttaactcagggaaaatggatgatcaatactctgatttataggttttagggtcatggatatggttatcgatcactgttaggatattcgttccttgttaattgtttctcacattttgatgcaggtcatgctatagtggccagttttagcatcaatagatcggcttcttttcttaatgaaaatacattgcagcttcagaatgacatctttcaagagatgagctacatttccatcaaagtatgatgttttcatctttttcttaacttttaaattattgtttctgattcgttttgtcatctcgtttctcttctgatctaacttggctctaatgaaacaataggtaactatcctggctgttgagccgtcagatgaattgaacataacaaaggttgtgtttggaattgaccctgatactggataccgagaaatcttacctctgtccctgagttctatcaaagagatgtttgaatcggtgctcataaatcaatctactctccagcttacaaaatccttgtttggggaaaccttcctttttgaagtgctaaaatttccaggaggaatcactgtgattccaccacaaagtgctttccctctgcagaaattcaagattgttttcaactttaccctaaactactctattcaccagatacagataaacttcaatacccttgctagtcaactcaaaaatgggctgaatctcgcaccatacgaggtttgtcatttctatcacaatacattattttctaaatctttcaatcatgttgaagttatgaattcattagcaactgttaatgccttgagttagattgttctgaaacatggattttacctgaatgcagaatttgtatgtaagcttatcgaactcagaagggtcgaccgtgtctcccccgacaactgttcactcatcagttttgctaagagtcgggacttcaaattcaagcccaaggttgaaacaactgactgataccatcacaggttcacgctcgaaaaaccttggcctgaataataccatatttggtaaggtcaagcaagttcgtctgtcatctttcttgccaaacagcagtgatagtagcaccaaatctccatcaccctcacctagtccccattcgaagcatcaccatcaccatcaccatcaccatcaccaccaccaccatcaccatcacaaccatcatcaccaccaccaccacaatcttagcccgaaaatggctcccgaggtttcacctgtggcctctcctgctcctcacagaagccgtaagagagctccatctgcacctccaccctgcaacccagggaatagagtacatttcaaggagaaacgcgtgcagttttcatccacacctgcgcctgctccttctgctggggcaccacatcatcagctgcactcaccggccccaatttctgcagccaagtctcatatagttccaatctctgcccctctaccacatgtggtgtttgcccatgcagctcaaccacccataacggaaccacgggaaccacatgcaaacgaagttgctcatcctcaaccgcagtcctcttcatgtaagttgctacttaaagtcttccaatttagcaaagatatatcaaatcatagactcccaattctaatcaaatgccttcttctttctgtgtttggcagcagcgattgaggttttaccagctatgccatggattgtccttctcatgctgatagtggcctggcttcatgaataacgacattaacatgtctagtaaactgtatcgacagagtactcaaaacttttaaatgtataaaatgaattcatatggaaactagatacagaaccggaagagttgttatagaatgatgctgcacaaaagggtgcagccttctacttaagtcccaattgaatatatatgctctaagagcttcttttgtatattatatcttctaaattagaaaagttctgcaaccatcggatgtattatacagcctaaagctattggaaatgcctttaaaacaaggattccactttatgcttatctcaaaattaaaatccaaaaccttagaacataagagttatacaacacagggaaaaaaagtcaacaaggtctgtatgtataaacaagtcaatgttcgcctacttaaggtcaagatctgagtagctcaaatcaggtggctacgagatggagacccgatcgaggaagaacgcatgagtaggtaacgtacttgacactgtcaagaagcaccaccacaaagatccgggaaagtgattttgggtttgggggaaccactctgtcggtttcagagtcaacgacctctcttggatcaagtaacactgagacaaccatggaggatgatgatgtgggtttgttagtgtttccattaaaggtcttattttgagcgtctttgtttggctgggttccggtgatattgagctctgacgccacaagtgaaacaggaagtccctcaaggattctcctgttcttcattctcttgccgtgggtagtgacattttggagatgctccgcagaaatgctggagactgatgacgggactatagcaccaggagcaatatcaaactggaaaacctcggtgcacatgctgtaatccattagtggccctgcaagagaatgcaatgtagagttgaaaatccagatcactccatttagtagaaactacatagagaacaagaattacctgagccaccttcatgaaaccattggtgaagtcttttcccttcagaagagagagctgttgaatgcggaagcattgctgcatttcctcttacccccggaacagctaatgcagaagacagtgcaccaggaatggtcaaatccggttctttagtttttactgtttcagtgatattcttctttcctaaaccccttgctttctcgctcgccaaaacagagtgaattatcaagttcccatcgatcttcacaagcccatcgtttcttgggacatagagagaagcaaagagaggatcactggcattgctcaacgaacttggtcgtccttctactttcggatgagcattataatctactcctccacaactatctctctcaccatgactaatcctactagaatggatatttccttcagaaattccactatttcttctaacatcagaaccatcgccgaccattaaaaccctccccttatgttcatcgtaataccggtggccatcatatttagacaaaccgccaaagcttccacgttctcctccaaaatttacattcataaaaggaaccaatgtaccaaacaagaagacaaagaagagaattccaataaaactaatactagcaaccttcttgagcttacttttaccctcattcttcttactctctgccttcttcggtctacaactcgagacaggcttaggatttaacttaggaatgggaaccaaaggtgtctgtgatccatatcccctaacaggatacggcggatacggcatccattgatacggtaaaggcggggcagccatataaggattcataggaggagcaccagaagcaacagccatttgttgccttaaagcgacattctcagccataacataagcaatcttaccattcaattcagcaatggtagcattcatactcttcacttttctttcaagctcctcagtttgttgcttcttcctcaacctcgaaagctgagcactttcacggttcctaatctgccttatcaacttcctcttgtcgtcgtcatcatcaccttcgttgttcgtagcgactgatttatcatcggacttttggtacttgcagctccttaattcgccactggagtctccattttccttcttcctcttgctaacagaagatttctggtgattgcttgattcaggggaggatgatgcgtcaacggtgtcggacacaaaagtcttggagccttgagatgaaacctgtgaatgaacagactcagatcttccttctaaacctccatcgccgcttctgttttccgatgagtccaaattcgaacgattgttaccgatctcctcagggatcaccaccgcgggctccgataaatcgaaatcgaagaaatcatcagaattatcaaacgagaaatcaaaatcagcgaaatctccgttctcatcgtcgagtaagaagtcgagatcggagattggcgcatccattgaaatcggatcagaatcagataggaaaagaggatctagcggcggaatagaaaacaaatcggactcagaaaacatgctagggttcagattaggtatctccggcggaggagcaaccacggatgttgattccgtcatcgtcggaggattcgaaaatttattctggcttcgcttctcgatggttccacacggtttataactttggaacaaggcaacgtcgacgaatatacttaagaattaagattatattacatccacgcgcagtcagcgcgtgtacatcaaactccgaacacgtgtgtatgtttagtcaaacaaaaactatctacttattggcttgttgcttgggttaagaaattaatggtgaaatgttacaatgtgttgtatgatgaatgtagttcgttttatgatttagtgaaaatattgaggtatttttgctatttcagaatcgatattagttttattttcttatacataagatttctttatgaaataaaattcaaaaggcgaccaaaatgatgataaagatccatctagccaaacacaaaactctttgttctccccaaaagaaatcaaataagaagaaaaccgaagctgtataagctccgcacaaaaccagagattattataatcaagtcataaacatttttcttgttaagtcataaacattgcattccaaagatgttgagaaaaaaaacattgcattacaatattccacagacataaatatccattgatcaaaagactaaccaatgggtgaccatcaaatccaataagaactagtcttaaacaaataatatccgaccacttaattgaaacttgaaaaataagaaaagaaagaagagagattagttcatgcaacaccaaagaactcatcaccaaccgattgccttatctttggcagaaccataggattctctacatgatccaaaaagactttcaaagaagtataataaccaattcttttgaagcagatttttctagctgtgtgttccttgagatcgtaacacagtaaatagaaggggccacgctttaagcccggtgtaaatataagctcgccggttccaagtatacccgtgaagctgaatggtcgaaatctatatatctacccaagaaggaaccaagacacaaaagtttgaccattcttgtttgctggcatcttctagaatccatacaaaaagtctatcattactagcatataacaaattcgttacagctatcttttcgccgtagttcgctagaacttcgacggccggcctcggtaactcaacgacactaaacttttcagaccccacaacaaagcacattagcgactgatcatcattgaccctagcgaagtaatagataaccccattgctaaatattccttgagttccaggagtaagataatgattaatcgtacattcgatcattctccatttcttctgtttacatcctagagtgaaaactttatgctccttggacacaatatttcctgatctactatagtactcatccgatatcgtcatgcacaagactttgtattcatccttaacatgatcgtatccaaagaagggaaatatttcttggtatattttggttctgactctcggtaaagtttcaaattgacaagtagtaggatttccaattaccactttagtagaattgtttagacagcagatcaagccacgaacaggtggagaaaagtcataccagatacgcggatacgaatcagggtaacagccaaccgtttgatgatcagaagatggatcctctcgagagcaagagtggaagaactgcatatttatttctcgatcgtcgactgccaaaagaagacgtggtcgattcaaagattcaaagaactttattatcaaatacatgttggtgaaatctttgttaaggactatcgatgaccaggacttggaaaggaggatgaacgtcgatatgattttggccttcaatttcatgagaatcttctctttcagatgcagaggcattccttcaaaggggtcagtttgggaccttgtaacaagtttccaagtgttactgatggttcttttcccctttacctcttccatggctgttttcacttacgctcactatctctcttttttcttgctttttttttaactccgaacccccaatgtttttagaggtttggagatttgatgataaaccgttgtcaacgtgtggacaggtttagataaacgagatttattagataatcacgtagaaagtatgactaacataaatcttgggagacattgtctcccttggcttaccaaaaaaaaaaacataaattttagtttgaaacaaaaagtaaaaaatataaaatctcaaatttttggattcaataccttttaaattgtgtatacatagacgcgtggacgggtctagactgctgagctttattagattcttaattagaaaatatgactaatatatattttagtttgaaacaaaaagtaaaaaataaaatctcaaaattttagattcaataccttttaaatcgtatacacagaggcgtgggcagttctacaccgctaaactttattagaaatgttaatcttcgatcaagggacttccacgatacaaactttttgtgtgagataatacatcccgaaactcatacaaaacccataactagcatctcaacctctcggcaaccaaactaaacatacgcgttacgtccccgccacggagaattggcgttattggtcatattatcaaaagctaatgagagtacaaataagaaaattacagtagttatgttaacagttttgaatttatgaatcccacttctaagctgtcgttggacattgatgtcccaaaacgacctaataacgtcaatcatgatcatttgccgttgacattcattagcaaaatactttgtaaatggtgtaccaattaagtctcaattgtaaaagatttaacgttgatatatagataaattagactgccatgcatgtatatacttatgctattcttggtccatatgattctatgaagtttcttgtgatcagtagataaaaatactatatgatgcacaaaagcatgtgtttttttattgatttggtaaagttagtcccaaaagagccacaagactgcaatttttttctaaaatatataataatataatgttgtagaatgaagttaaataagcttctttttgaggaagtatcgtttgagatacaaaacttgactaatcgaaacgacaatagctactcctaaagacattaagccgagctgattgaccctcgtgtttgtcttctcgtttatttccctcatatatgcttccctgcaccatttttttataagagaatcttaattaaatccttttttgcgtattccacatatatacgtaagattgatatgaaagttattaataacctgattctcaaatagagtatgttggccctaatagcacttgcgtattctgtagatcttcgaatctcaagctccacaccctggaaccatatattcaattacatgtgtttttttagattattataatcatatattagaattggaaatgaaggacttgcctcgatcttttcttttttagcaacagaatcccagtctttggctctgatacccatcttccaatcaagactgacgataacagagctattgactgagtgatgtgactggtcgtgatgcattgctaaacaagctaagaatgttccactctcgctcgttgtaaacgcagcctgaccgtgtgtcacgtttgctatcttgtacagttccttcccatatggagatgttacctatacattttaaccaaggcatatatcaacacacacaagtttatactatattttcactccaactatagacaacttataaaccaaattaacccttattttctcaatctattaatccgaaatctcttggtagaaaagttcatgtgaattttgtggttaactaattgatttttcctatacaaatctatcagcagtttaatgttgattttcgatctctaatttgagtgatcttaactcgtagtcaaattatttctatctcaaatatataacgtttgaccacacagtaacgaaattttcccggatgcatgaaatttacgaagaaaaaatggagtatatatggttgatgtacaaacccgaacatctaatgttggaccaagttgagtgaaagcatcgtcgatgcaaatgtaatcaaggacaacgaccacgttggcttggatctcttcgtagacgcatctctctcctgattctggaaccgttaaccatattgcctccacccccggaaaaagagagccaccgccggcgaggtaaatcaaaccaatgaatagtaccggtgagatcgccattttcgagagagagaggtaagtttaaggttattgaaaaccaaaaaaagagagaagaggaacaagttcaaaggctattcacgttattatgcaagagaaggttttaagacattggcgcgtggagttaaagccatcgttgtatccaatcagtaagggccatgtaggatgtggtgaagattgtctacggagccgtttttggagtatttttacttttatggaaactacgtttaattttgaccaacaatatcatcttaataaggaagtaaatccaaacaaaatatcttcacattaaatgtccttcaaataaattttattttatttctcttttctgtcaactctagataacaacaactagatttttaggcattccaatggattgattatagacgtgtttcatttggaaatttactaatgtaaaaatattagagagaattgaccacgcaacccacaaaacatagtaaaccacgcttgaaaaagtgaatagccatgaattagtagctttaagtttagaccatatcatgcatttaagatccattaagtagattacgtaacgttcgagattaactgctcctaattcagtgataagattacactgcaacatttcctacgctaattatacttggggagaagatactttgtttttcggtgcattgatatttgtttgacaaaattgttcagaacgatgcaccatggaaaaatgaaatgtgacaccaaccaaacattatacttttatgattccaccaaaatcaactttacaaaacccacttctcgattaaaaaatgtcacactgtattaacataaaatattcaaaaagtccgacaaattaactcaagaaaaaaacacagagaaaaatgaatgaataaaaaaaaacaggaaaggaagcaactttcgtattattctcttccccacttgattgcgatttgagagagataaaggtcgagaaagtcttttcatctccttcaccctcatcgtttcgcgtctcttctcttctctctcagaaaatgctcatcagaaattgtctcctttttgtttccttgatgtgttttctcttctaatctccggtgaaacaaagaacaaaggattcataagacacaaagcagagaaggagagagagatacgaggcttttcttcatctttatggcttctatgaccgagaaggaagctatggtggatccttttctggtcgaggctcttcaaaatcctcgtcatcgtctcaccagttagtcaattttctctctttcccacgattcgattttgctttctctctgttgtgtttgatctgattttggtcatttcatttcctggtacttttctagggtttcatagaattgggggacaattatgagtttctctaattctcgatcctgtgtttggttcaattatagttaatgttttggtaattagggtttgattagatccatgactattaccaatcctcttgattgctctatgacccaaatcataatcacttgtctttttagctcaatctgaatcctcatgaacatgttagagtttaattactgtatctggaaagattctcttaaaatgtggttgatgggtgcttaaaaggttgcttctttttttgttggttggtgtgtgtttctttagttttgcgaatggagcttgatatacagaagttctttcaaaaccctgagcagcttcagttcgaattcccgccttttccaacatcgtacctgcgtcttgctgcacatcgagttgctcagcattatggactagtaaccatggctttggacaatggtactggtgcaggagatggatccgataacagaatcctcgtgacgaagacagcggaaagtagatttccttatgtctgcttatccgaaatccctgtgaaacaacctgagaatggtagacccgagggtttcaaaatcgctatcaagcctagacccaagagaggatctggttgtgggggtagcggatcaggagtacagcagaatcttttgagaagtgttgaggagagaaaggaagagtatgataaagctcgcgctcggatctttaatagtcctagcagttccgactctgaagattcttcatcactacgacctccctctcttgaagtgagaaacacatgtataaaccggaatgagactgaagtggcggttaataatagtcctgtcgatgctgttactcgagactctggacggacttctcgagtagccattatcagagatagagagaaagatcgatatgacccggattatgacaggagctatgacaggtatgtcgtggatccggcctacaggtaaacctttcaatctctttaatggtgatattcaacaaaactaattggtgttcactcttaaatctaaaggtctttttcttgttcgtaggtacgttagggttatgccgtctggccaaagcttcagtccaatgccaatccatattccgtttcacgatgggtttttcccgcatatgccaagaggtcatcaagccaacctaaactatgggcatccgcttaaccctgctttgagtccctttactcataacgtggcttcatatacaccgtggccaaactcacccgttatgaactatgcacagccgttgaacggctcagacacaaatctttacaggtttgctgatactaaactgttgttaatccgccatttgattggttatctcaaaatctagtgtttgcttactcgtcatttgcactgcaggtatccttctgcaagtaatccctgacagcaagagtagtgtttgagtacttcaatgtctgtaatgaaaagcagattctatagatattagcctttaggagctccctgttctgttccgaacaatggctacttctttcttatataacaaacaagacatctacttttttatatctctgaattatattattatcgaactttgaatgagcttcagagacgacgagacagaaaccaaatctttgatgatagcttttcctcttatggtgaagtaaattgtcaaaggaaattggaactagattcttaaatgctactatattttaaaaaatggaaaatgattgtttttcgttacataaaagaagaacatgaggtggtgaaggcatgaagggtccttttctaagtttgtagagacgaagacactttcccaaaattcctgataaatcacttctttgaccgatggtctcaaatcacaagattcgattagagacttggggataaatttggattggcaatcaacaatgtttttggatttaatatttaagattagacttatgggaaaagaaccaatcaagagttataaaattatttaatatattatttgtactttgatttggtcattacaagattaaataatcgtaatacacactctttacgtgaataaccgtaaaagagagttgatataacgattaacgagttcaacaaaaagtctatttcagaataaataaaactttaatttacattcttttttttgtaaaggaagaaaaaaaagggatggggtcagacttgggagagacaagatcaggacatgccagctatgaacccaccaccattgctttaaatcactcatctcctaaattatttaaacgttcattataaaagctaaaaataagtctatataactttatttgggtttggtcccttcaatgattccatatagtattgcgactttatttataattggtagtagtgaataagttggggtatgattaaggatgtaagagcatcagatcctcttcattctgattctgccttcccattgtctttgtctcttttgcttattggtctccttcatgatcattttcacattgtactattgcatcattgattcttgtaaatcaaaaccttataatatatggagttaaaaaggtgactgaataaacagtttcagcaattccaatatactttcagtgtaaaaggctacaaccaaactcagctaaactcagctttaagaacaaatctacaacaaaatgggaaagcaaagaacattgtgaagtaagtttttgtttttttcattcttttttccaatcttgagtttgttcgtacggatgtacgttcaaaagtaaactcatctttacattaatcttacacaagaaagctacaagggttaatacaagccttgacctgaaggtgcttgagcttcagatacagaacttgaccacacattgacgctggattgtatcaatgttaaactgataagactgcacagagtaaacgccaccggataaaaccgatgcacaagaacgatcagctgactcatgttcttgatgactgcagagacattttgaacatctagtaacctgacataaatcaacaaagcaagctatggttcacaaatacaaaaagggtcaacaatcagaatcttgatgaagtattaccggaaagataatgactttttaatcgtctcgagttgggaataaagttaagacagttctccctccattagcgtttgcagattccaaatcctcaacgtaattactaactggactatgcaatgatggtgtagacattctctgaattggttgctgctgcgtttgcctcaccgccaagaacgaaggatcaaacttcccattagtcgtcggtgatccaaatccattactagtcggtgatccaaactgtccattactcgtcggtgaactgaatccaccattagtcggtgaaccaaaatgcgcagctgcgatttgacggtggaactgaggcggttgtaaatgaggattagctgctgcagcagcggccgcagcagcagccatttgttgttgttgttgaagagtagcaataggaacaaaagacggcatgaaatgatcagaactgggaacacgattaggatgaagaaagtgagcaggaacaggagagctagcgaaaagacgatcagtagctggatctgaaccagcaccaccaccagaagacaaaccttgcattctcttaagataaagtctatacttttgcaaatgactcgcaacgttttctctagttaaaccatcaacactcataagctgcataatcgttttaggaactgcgttcttaatccctaaatgcgcaacagcatcaacgaaacgtttatgcagctgcggtgtccagacaagacgaggtcgttttaaagtccgagctggttcgtctccggcagctcctccggagcctagatctgctgaatctgcagcgaattcggctgaggaattggcttgagaagatggaagctgaagctgagacggtgtaggaggtgtggtttggtgatgatgatgatgatgaggttggtttgagtttccgtttccgtgatttggggttcgtatatcgaaggctagagctagatcgggtgagattagagattgtgatattggcatgagctcttctggtgatggaagttcttcttcccatcttgcgaaccagtctgaatcgtcttctctcatttttatctttgaaaaaacagaggaggtaaaagctcgagtttttaagtgttgatttcacaaaaccagaaacatttttgaagatttagattatagagaaagtaacagattcagtgaggtgagaactacgaaattcgatctgtagaaaaaggaataaacttttcaggaaaaatttaacagaggaaatgagaaaaaggttggatttttatgagtctttgtggcttgaagaggaagaggaaaaaggaagaaggaaacggaatctgagaattagatgatgattgagaaagatggagagaagttcgaggtggatctttagctttttttttttttttttttttgggtactctcagctttttcaatctttaatttatgatgagagtactttaccaaatctacattttatttgagagttctgattattatttttcaattttattacatagttttttgggagatttcaatcatgtcaagactcgaccgacgataacttttggcgcgtgttgtccactttagaatcgatgaagtgaacctgaaccacttcaactggtttggtttgatcctttcttttgattgcctttttttaattggatgtgagactccaaaatggaaagtattctaataaactaaaatctactactaatctttgattaagacactgatcaagataaagagaagaatgatttactaatgttgatcagtgtataagttatgatgactcggtgtgttattttggactttggaaacataataacatcaacaatctttggcaataaaaacgtgtatacttggcttaacatatttcttttattcagttttcttctatagtctattttatgtagttagaacatagtatagaaatgcgtgatactgttagcatgtcattgtcaataaataattatgtttttagagaaatttgaaggcccagttttggtttcgcttgcaagcaaagacaagaacattcaatgatataatatgaatattcaaaattgatgaaactgaaaacatattaaaaagaatagtcattaatatcatcatcttttggtttaacaacaatgaaaaagttattaactctctgattattgatccattccttgtaaagataccaaaaacaaagtcatttgatattctttatctcaaaagtcaaaacatatttgcttgcttagaagatgtgcatctatttatgaaaagacagaccatcaatcgtctgcatatcataagaatcgtaaaatgaagaattggcaaaataccatgaaaacaattagtaagctagcaaattagcgagatagagaaggagaatattaattaccatcaagcagctagctagccgtccttccaagaagaatattattatcatctaagaaatggattttgaggttggaccagacatgataatatgatgaatctttacaaggaacgtagtggatcttcttccggctgaatagtgctcatttttcaatttctacatatatcgcatattgagcagaagctgcgatgatgctgaaaccctatacatagactctaactcttcccttatcttctttttctcttcaacattcgtgaaaggtatcagtgagatttccaccgtcttcaaagacttcagagttttcgaggatgtaagccagaagttgtttctcttctctccttccttcaaagagtttccactccaagatctcaaggtgagacaacacgcatcgcggtacagaacttggttggttccaagaaagtggaacatgatcaataaaaggctgagaaggaagaattctaattaaacacgtttcaagagagatatttacagagttgatcctaatagcatctccattggaagtatctcaataagatacccaaaaaaagaaaaaaaaaattaaaaaaaaaaggtatgagagaagggagaaaaagtagaagagaaggagagaagggagaaaaagtagaagagaaaaattagaagagcttttagtttaggagcattatgaagcaaaagcataagtggctccatccaatactctgaggaagaaggatacaactgaaactctatgagccgagagaagttaatggtgctacaactcgcaacctgcacttgaacgaagcagaacacaacataagtaattaaacgcagcgatagtatcacgaagaaaataagatatattacgagagaagggtatcaaaatggttggttaattaccttgatatgagccaaatagagatacttgacagaggagaaagatgtcagaaacttgtcattcgggtaaaaaccacagagggaaacgatggccttttcaaggcatggcatattctggatggagaaattgcctcctaaagagtcaatgatgctaaggtaatttaatcccggggaatctataaccaatgacctaccagaaccatttttttcaagtgattgcgaatcaatgaaccttgtcacattgtcactcttatttcggatcaccaacaaatatctgagaacagggcaactcaataaaagcctaacatgagaatcttggtctttatacaccacattgacaaggagcagcgattgaagggacgggaggcaagccgcggaaggaacatcaacaagaatcttgcccataagattcaatttcacaagcgttttgctggtgtaaagcctcttactggcaggatctgagagaaaactaagacttagggttagctctctaacgtaccggtcaactgcattcgagacccactttccgacatctacatcaacaggacattgtggaccaagcatgatacgcaagctttctactgaaggtgccttgtgtagttgcaatgacttttctagcaagtcccaaatactctttccgccttcgttgctttctgtgtactcgagtttaggcaacatcgtccagagaaaacgccatcgtttcgacaaaatcatggtggtcaccgcatcttttgttgggattagacacagtatatgcaacagaaatcgtcaggcaaggcactgatcctgtcagacagctcgtttaaattttttccgatagatctccgcttctgatgacatcctttaagatcttgttcgtcagaataagaaagccctagtttgattacgtagatagaggcgagttaacattcttccgtagcaagataagttagtattgggctaggccttttaaaacaagttgaaactcgaatatgtttagaaaaaggaattgtgtcattgtacattgggctttttaaacaagttgggcttaagtccatgtttggtcaacactctatttcgggtattgtctctgtcttcctttagcggcggctttactttagattcttctagggtttctagattgtataccctagataagcatcctataaagtaaacacaagtacttgcagagactttagattagagggctagcgactgcagaagaagagtaacacgtcatctctgtgcttctttgtctacaattttggaaaaagtgatgacgccattgctctttcccaaatgtagacaaagcaataccgtgatgatgtcgtggagattttgttgagatgctacgagcgtgtaaatgtttcatgtttgttgtttgattttactgactgctgatttctttttttcttggatctcgctcaaaactagatcctcactacagagcataactgttgatttttcttattccagatcttgctctgaacaagggcatctaaagtcacagatgcgtgtgattattgttctagacttgcagacttccttcttttttttttttttgcaaatccagatttgttttctgaatggtgaattcgtggtccagtaaggttttgatacctttcaaagagataaacttaacagaacaaaattttgttaaatatcgtatcaattcgaaagaacaaaaatatggtattgaagaacgaacataaatagctaatttctcgtggttaacttcgaaggaaattggacgtgattatttctcataggacaacatgttcttgacactgtttaatgtgcaaacacaacaataggttagaagccctggtgtcgaactaactagtgtttctacatctccatggattttattattttaagctgagattatgtagaaaacctttgagatagaagtttagatgtagatgtaccaaacacaatcattatagcatgtttattagtatctctcaaatgagagaatgagacattatggttatcctaacccacttaggcatttaaccacacatgtatataaaaaaattcctaaccaaattaagatccggagattagtgtggattcaatccgagatcttctgcttaaaaaaacaaaccaaacaaaaaacagttcctccgattccgttgaagacatgcaaccaaatgatttggtatggtaggtgtatgaaaaaattattatccttatccaaatttcagcaaagaattaataatagcattatccaaagtggagaaacatctttatccaaaaaagaaaaagagaaaataagcgatagatgaacaggtggaacgaggttcgttcagtagtcgtcgcttctaatcaacttccacttcttccacggaaacaagcaattcgatcaaacgtgaaagcaatatttaagatttttgtctcatactctaagcaagcaatatccaaataaacattcttatacctccactcctcctctgtctgattccttcacccaattcttgtctcgtttccatcaatccattgtctttgattccagaggtttgtttctatttcttgttgattccaattcgggtttcttcattgtgcattctcttgtttatgtcatgattcttattctttgcttatcaaagctctatactttatgaccatgatttgagagattctctgaaaagatcacacctttgcctctgaatttgagaaattttagtttctctgtatctgtctggtttagttcttgaagccatttgtgatttaatgtctgaaggttttgactttatgagttgagattgaagccactcttgatttgcaacaagatttgtcattttctatcatagccttattttatagctttggcatcatatcttaaattgagaaagactctgccttgttgcagttccaatgaggacaagaaaaacagtaatgggtcctatatattctcatgtgtttgtcttccttttggtctagacaaactgataagtttctttttgtagctggtactttcttttgaggcttttttaaaaattatccaacggcttgaactgaattggattcaatgtttctacaaatgtctcttatatgtaggttcttggtttatttggatgtggtgattatggatatggagtcttggaagttgctcagaagtgtttgtgtgctttcttttctccttggctcttgttttgtgtatcaaagccttcgtgttgttgatgctcaagaagatccaaaaccagccgtgactttgcaagtagatgcttctaatggaggtggacgacccattcctgaaacgctatttgggattttcttcgaggtttgttaatgttacggtctcaaatagatctttgcaatgtacgcaatgtgttcaaatcaatcataaactttatatgctctatgttcattataggagatcaaccatgctggtgccggtggattatgggccgaacttgttagcaacagaggttagttttttttagcttgttactactgaaatccatgggaatcaatcgttgtttggcttcattttctttctttacatgatgagaaaaaatgtggtagtaacttttaaggaaaaactttggtttccagggtttgaagctggtgggcaaaacacaccctctaatatttggccatggtccattgttggtgatcattcatccatatatgtagctacagaccgttcatcatgttttgaacggaataaaatcgcactgagaatggatgtgctttgtgatagcaaaggttgtccatcgggaggtgtcggagtttataaccctggttactggggcatggtgagtgtcaaattgtgaacactttacagctcggttttttgtttccctcggtgtcaagagcatgggtttagctgtttattcattttctatcttctgttagaatattgaagaaggaaagaagtacaaggtggctctttatgtgcgttcgactggtgatatcgatttgtctgtgtcgttgacgagctcgaatggatcacggactcttgcttctgaaaagatcatgtgagaaataatttcagattcttcagttaagtctgaatatgtttattttgctgtttcagtgtgtgaaagtttcaattgtatgctttcatttgtttcaatgtagagcttctgcttctgatgtttcgaaatggattaaaaaagaggttcttttggaggcaaaagcgaccgatcctagtgcaagacttcagttaacaacaaccaagaaagggtcaatatggattgaccaagtctcggccatgccagtggatactcacaaggttcttttttcgctctctctgattccctgtagagccttgagatggaagattacagattgctaatagagaaaatattggaagaagaactctatcaaatactcgatctttttggttgattgcagggacatggttttagaaacgatcttttccaaatgatggccgatataaaaccccgtttcatccggttcccaggtacgtattatttaaggctagtagcatttttgttacttattctatccatagacgtacctcttagttcaatatgacaaaaagcatgacttaagatgaaataagctaaagtctattctttactctggatatttgtgaatttaggtggttgttttgtcgagggtgaatggttaagtaatgccttccgctggaaagaaaccgtaggaccttgggaagagagaccgggccattttggtgatgtttggaagtattggaccgatgatggccttggccactttgagttctttcaagtgagacttcttcttttctattgagtacataatgatccccgaagctcgttattgaatattaaatgaacattcttgcagatggcagaagacatcggtgcagccccgatatgggtgtttaacaacggtattctttcactctccaaaaacttagttgtaactgacttatatcattttgtcttccaattctgtcaaccttattttttactttgtgcagggataagtcacaatgatgaagttgaaactgccagtatcatgccctttgttcaagtatgattactaaaccttcctctgtttcactagtgaagaagccggaaaaccaaaactttctcctctttttgtttcaggaagcactcgacggtatcgagtttgcccgaggagatgccaattctacttggggatctgttcgagctaaaatgggacgccaagaaccttttgaacttaaatacgttgctattggaaatgaagattgtgggaaaacttactacagaggttttgcatttctctatgatcacatcttgacttagatttttgttgagcatctttgacactaaatgagattacaactttacaggaaactacattgtgttctatgatgctatcaagaaagcctatccagatatcaaaatcatctccaactgcgatggatcctctcatccactcgaccacccagctgattactatgactatcacgtaaaattttctatcttgacagaaactgtaaccgttgtcttgtgttctctcttccgcctgaaaaaagtgtttcctttttgtcacagatttacacttctgctagcaatttgttttccatgtatcatcaatttgatcgcacttcacgcaaaggtccaaaggtgcggtaatagattataacaaaacttaattccaacaaacacaagatgaagctttcagcgttttactcactcgtgaactttgtttacaggcttttgtcagtgaatatgctgttactggaaaagatgctggtacaggaagccttcttgcctctcttgcagaagctgcgtttctcattggtcttgaaaagaataggttccctttgaatttctcttcccaggctttgatctcaactaaaaacatcaaataagttaaacatcttatgactttttgcagtgacattgttgaaatggcaagttatgctccactctttgtgaacacaaatgatagacggtatctctcacttacttttccgttcgaatggttactcaggaagataaggcaataatctcaaattgttaaattggtttcaggtggaaccctgatgcaatagtcttcaactcctctcatctatatggaacacctagctattgggttcaacggttttttgcagagtcaagcggagcaactcttctcacttcaacactcaagggaaactctacttctcttgttgcatctgctatctcttggaaaaacaatggcaaagattacatacgcataaaggtaaaccgagtgaaagattcaaccggagctctgatattgaccctaaaaaactgtttcaaaatctgttatttgcaggctgtaaacttcggagctaactcagaaaatatgcaagtgttggtaactggattggacccgaacgtgatgagagtttcgggatcaaagaagacagtacttacctctaccaatgtgatggatgaaaattccttctcacagccagagaaggtaaaaatcaagagatggaagaaacatcattatcatcacaaattctgagtgttcccatgttcttattggtttttatttgcaggttgtaccacatgaaagcttgctagagttggcagaggaggatatgaccgttgttctcccgccacattccttttcttcattcgatttgttgaaggaatctgcaaagataagaatgccaatctctgattcttcttcccatcagaaaactaccactgtgtgaagagaaacaatgacaaggaagtatcaactttcatgtcaaaagtctctttgtggttcaaatctaattacattccataaatgcttataacgtacccttgtgtatatataataatagtctggtgaataaatttactttctttaatcatgagcttatctcgactctagatatcttgatatgcaagaatgatgaagcaacagtttcttcttagcataaaagaagatgacgaggcgtgaaagtgggctgggccattttatttccattattgggcttttaaaagcccatcataatgaattttgaaaaaaatggaggagcatcaaaacaaataaaaatggcgaaactgaagaacacacgattcagattttcaaaattgaattttgtagtgatctctctcctatataaacttcctcactcttcttccatttcaaatctctctctctgtagtcaaaattagggtttatttattcataaggaagagcatttcgaattctgtagttcaaaattgaagatcatgtcggcgtcaacggtgtcaatcaccgctagtcctaggacaataaggcggacgccggttctctccggtgagaagaaatctaattttgatttcccgccgagcgaatctcatgccaatgcggcaattggagagtcgtctgctggtacgaacaaggatctgattcgcgccgaggctgccggtgagagatccaacacctacgacgtaggtccggtgacaaggaaatcaggatccaccgcgacggggactaatacaaccaccacgcagcgtcggacgcggaagtctcaggggaataagatagatagagggaaatggaagacagtggttagggtattcgcgaagcaatttggggctcttttgttacttgttggattgattcagttgattaggaaattgactttgaaggattcgtctctgtcttcttcgaatttcccaattgaaacggaaatggtgctttcggaattggagagtcggatttctgcagttgatggtttggtgaagactacgacgaagatgatgcaggttcaagttgagtttcttgataagaagatggatagtgaatcaagagcattgaggcagacgatagattccacatcttctgtgttacatagtgagttgaagaaggtagagtctaagacagagaggttacaggtttctgtagatgagttaaatgctaaacctttggtgtctagagaggagttagagagagtttacgaggagttgaagaagggtaaggtcggtgattctgatgttaacattgataaactgagggcttatgctcgtgacatagtggagaaagagatagggaaacatgttgcagatggccttggtcgagtagattatgcgttagcgtctggtggagcttttgtaatggggcattcggatccgtttcttgttggaaatgggcgtaattggtttgggacaagcaggagacgggttcatagcaaagcggttaagatgttaactccgagtttcggggagcctggacagtgttttcctctgaaaggaagcaatggatatgttctagtcaggctaagagcaccaataattccagaagctgttactttggaacatgtctctaaggtagtactaacatctcaatactaaactttcacaaaatgattgatttttatatgttaatttgagccttcaagaagggttctctgttaaatgttgttggtattgagatgccctgtacttcggattggattgctggtgacaataggttatcgaatagagggcaagaaactagttttgtgaatttgagttcttatagtttgaggtttagtttaggcactagctgtgacaatatgcattgaggaggattttacctattgttattttctgcaaatcactagctttagcagttcctttgtctaatatcaatgccactgtgttgttgtgctttgtttgggacatcgttgacagagaaaagaaccgtatgtatgggaagagcttgtaagtttacaattagtggaactgtaatattcactgtttacggatatccttaggaaacagtagctgaagggaaatagtctcaagagtgtgtaatgtgatggtcacacattgctttccatcattgttcatccttgtgatcatttgtctgataaatttcttcttgtctgaccactaaaaggcaatactaatcttacggttatgttatgcaccatttaatcgaacaggctgtagcatatgacagatcgagcgccccaaaggattgccgtgtatcaggatggctaggtgacatagatatggagactgagacaatgccccttcttacagaattcagttacgacttagacaggtccaatgcacagacattcgacattgcagactctgctcactcaggacttgtcaacactgtcaggctagacttcaattccaaccatggaagctcttcacacacttgcatctaccgcttcagggttcatggccgtgaactagactcagtctctgttgctcatgcttgatctgaaagtccacgtcaaacttttcttctctttgtaacattccctctaatagatatctctcttctttttttgtgttagtttatgtggtgggaaagcttctcttagtctgtaatcagaatcatttggttgtattcgtgattattagcttcaaatctgttttggttcggtttatttggtcagggtatgtatcctccgaattgaataatatagatcttagtttgatgtccggttttggttttgtaacagagtttcaatttaagctttcacctaaaacaaatcatacaaattctaatagagtatacatatttcattagttgaaacaaatattgaatttggattattaatggttaccttgggtacttggtattacaacgatatgtgatgaataggaagagtgtgtatatagatggaccataacttgttagtgtgaattgcgtaatcgacaaagtgacgacttcttcttctaggctgcaccgtcttgccttgtctaaaagcttcccaacacatcacatgcaaaatctacggtcaaataatagatatgaaaccctcttccaagtcaacacagcttgtttgattataaattaaattaaatacaaattcatctttgacatgtctgattaatgttaattttttacagtgtcaactggcataacaaattgagctaaacaaaattaagctctaaaaatagccattttttacggttaaatcacatgaagaaacctttcctaaccaagtcaacccatgtttggtcgtcgtgacggtggaccaccggctccaaaaaaactcttcatttgaccaaaacgagtataacccttaattattagaccaacatgcattacataaatgataaattcagtttccctcgagcccatgcattcattaaatagcagaaagctcctcgtatagtctatatatatagcagattttagatccaaaataacaaacaccatcaatacacaaacaaaacaaaaaggatgaaaatgcaaacactaaacttcacttcttctctcttgttcttgtcttttatcttcctctcatgtgctctgcttatctcatcacaacaatctccatcacagccacattctgagcctccgtcacagctaccttttgagcctccggtagagtcaccattcttccctccgtcacagccaccaatattcgtgccaccgtcacagccaccttctttgcctccgtcacagtctcagtcaccttctctcgcttgcaagtcaactccataccctaagctttgccgtacgatcctcaacgctgtcaaatcctcaccgtcagatccttaccgttacggcaaattcactataaagcaatgcctcaagcaagcaagccgtctatccaaagtcatcaccagttacgcgcggcgcgtggaaagcaaaccaggctcggccacggccgaggaaataggggcggtggcggactgcggcgagttatcggagctgagtgtgaactaccttgaaaccgtcacgacggagcttaagacggcgcaggtgatgacggcagctctcgtcgagcatgtgaacagtcttctcagtggtgtagtgacgaatcagcagacgtgtcttgacggactcgtggaggctaagagtggtttcgccgccgcgattggttcgccgatggggaatctcactcgcctttacagtatctcgttaggacttgtgagccacgcacttaaccgtaacctgaagaggtttaaagcctccaaagggaagattcttggtggtgggaactcaacctatcgcgaaccgctcgagactttgattaaggtaattaattaaaacttgtttctaattcttttcttttttcgtttttgtttgtttgtttatactagcttttatacattcctttacatattattataaagttgttaataatctagttgtaaagacattacatatttttgaaatggttggcatagagatataagaataggaatttggggaaataccaaaaacattatatatatatatatatatatatgccttcttatcataaatccttagaaaaaatcaaaacagagtttttaaatcgatgatttataataatttttgtatggtcaccactcaccacaattcaaacatgaataatgaaaggttatgcaaaagcctttttggacatacatgtatgaatagataagcatcgtaggaggacatatactaagttaaatatggtatgaatttactactttggacgcacggaatgatttaatattcgtgcatatctaaaattttctagatcgagtcataaatggatgtgctcttgttttgtgtgtgtgagccagaacacgcgtaagagagtaaatggcacatggcctacgcacattttagtacaactcaacaatgatcaaatgagtcctatctttgactttaacaaaagaaatcaatttggtccccattcggatccaactgtattcacgtgcataagagtgtcccggtcatttcatgtgtggctacaatgaacattgattttaaaaaggcatgagtctacaagctaatcatgtactaagcacattttctttttctggtatagggtttacgtaaaacatgcgacaacgacaaagattgccggaaaactagccggaacttaggggagctaggtgagaccagcggcggttccatcctcgtgagtaaagcagtgatcgtcggtccgttcaaatccgacaacttcacaaccatcaccgatgctattgcagccgcacctaataacactagaccagaggatggttactttgttatctacgcaagagaaggtgtctatgaagaatatattgttgttcccatcaacaaaaagaacttaatgcttatgggagatgggatcaataagacgattattacagggaaccataatgttgttgatggttggactacgtataattgctcgagcttcggttggtattcttatctctctttttgtcatttggaattacttagttaatgatatatagttttatttttattttctagctgtggttggagagcggttcatggcggttgatgttacattcagaaacacagccggacctgaaaaacatcaggcagtggctttgaggaacaatgcggaaggatcaagtttttatcggtgtagttttgaaggctatcaagatactctctacgtccattctcttagacaattctatcgcgaatgcgatatatatggtaatataagttttgtttccgcttcattttccacactgatttattaactgttattggaatatgactttttaaactaggctcaatctcataactttgagaactattgctaagtagttaggactcaccaaaatagtcaaaactagtcaattatataatgtggtccttgctttaacatataactattcttctatttcactaatatgttttaacatatatccccttttttatcctctgtttgttataggtaccgtcgattttatattcggaaatgcagccgcaatttttcaaaactgcaacatatatgctcgaaaaccgatggccaagcaaaagaacgcaataacagcgcatggaagactcgatccaaaccagaataccggaatctctatcatcaattgtacaataaaagccgccccagatcttgcagctgagcctaaatctgccatgacattcttagggagaccgtggaagccatactcaaggacggttttcatgcaatcatacattagtgacattgttcaaccagtcggatggctcgaatggaacggtacaattggactagacacaatctactacggtgagtatagtaactttggaccaggtgctaacacgaaccagagagtgcagtggttagggtacaatttattgaacttggcagaagccatgaacttcacggtctacaacttcaccatgggagatacatggttgcctcaaaccgatattcctttctatggtggtttgcttagcaaagaatgaaattgatgaacaacatattatatgtaaacatatttaattatacgtacttcctcatttaaaaaataaatcaagaaattttcatttgttctagttgttgggacgagtcaatgggagtggttctcatgtaaatctagacgtgcttctaactttatttattgcttcagataaccaataaagctaagttttgatgccatgaaatttgattatatagctataatatatctggactataccacaactacgagtatgtcatttgaatcatatcaaacaaacatagatacaaaagaataagagtaacactgaaaactctcacataatgaaaaaatatatatttataaattacaaagatccaaaaagaaaagagatttgaattgggaatctcgttaacggaaacgacaaactcagagaccggacctgaacggcactttcgtcgccggaagccatcttccaccgtcgatgaaaggtttcaccgtaaacctattcgcttccttcgtactaagaaacctcaaacccttccacttaaccctattcttcgtcgatgcaccaggaccggtattcttatactcaccgtaaaatatagtatccggcgcagaatctccggtccacggtaaccagcctttccggtcaataaaaccatgcaaatacgagtccattataaccgtcgtcgagaaattcttccatggtcgacctagaaacgtcataacatcggttaggtcaccgagtggagagatgttacaacggtgaatcgagattcctgtgttcatgttcggatcagtacgtccttgagccgtgattgtgttttgttgtcctttcattggtcggcgagggagaatccggcagctttggagaactgaagctgagttaccaaagatgaaatctactgttccgataatggtgcattcacggtagaattggcgttgtgcatgaacgtaaagcgtgtcttggtatgcgttcatcgtgcaacggtaaaatgctgtgagatctgcgcttaccattagagcaacagcttgatgtttggatggaccagctgtgttgatgaagcccatgtctcttgccataaacccttttccaaacacagctgcagaaaacagagcatgtcaaaaaccgatttcttgggttataagtaatgatattatgttcggttttctagttgatattatttcagaataacgttaccaatcataattctaaacattatatctttgatttatgagattatttagtctactttgatattattaggccataattaaattaatgaaacaaccaagtcgtgctatttcgaaatcctctgtttccaaaagtaaacaagaagaaaaacaaaaacagagagaggtttaccgaatgtggcggtcttaaaagtgggagttccatcgatgacattaagtctaccagagacaatactcttgctctcgccatctccaaccacaataacattccacatcttcttctccaccttcacattctcaaaataaactcctttcttcacatatataatcgtcctcttctcactcttctctggcacatcttgtaaagccctctttatcgttctatacttccctgaaccatccttcgccaccacaatatccgccactttcctcaaatccgtgctctgcaacaatctccgacccgcgtggaagtccacctccacgtctgcagttgttaacaaacgcctccggagtttgaaagagtcagcgatcttcccgagccatgtgatgatcgctagtgcgttactcgtcaactccgttgagttcttgagatgactttcgccgaacggcctcatatctggagccaacgtttccacgcacgtccgttgatacgtcccggctgaactcagccatgtacggagatcatcgactagctcaggaaccgtgacatcaccgtttgatgatgaggttaacgtgttgttgaggttatctatcgttaggtcaagaagctcagcgcaagcgttcatggtgatgttgttcttttcatcgcctaaggatgaagagaaagcgttgatagcttttgaaacttcggcgattgtgattttgactgcgtatctgaagagctcttctggattgagactgcttgcgtttggagctgatccgagggtttcgaagcatttttctttatgcaacgtaacgtcgcaaacggctttaacggaaacggagattgagtctccgttgttattagtctccactgtctctggtgacttcttgtgagccatggttccaaacacagctccgatcacgattccggcaagaatgactagtgatacagcgatgattgcgatgttctttctcgtcttacgacgagcttcgagccttacatgttcacgctcgtcgactttgccgtaaggagaggacatatttgtatcctccgtccctcttttctaatttttctttgtattcttttgaagtttctcgttagttatgtttggtttgtagatgttggagttggagggtccatataaagacgaaggaaaaatataatcatttgaatagacctctaacaacttacgtgcgaggcacaaagggggattataaatcttcacattaaaataccaaggatgtatttaactacaagtgctcctcatgttttagtcttttatgttaatataagcttgtcggtgaaacatatttgtttaagattgggcactatgttttctgttggatttcagcttcggcatgtttcttggtttaacgaatttattttttcaaggagttctatctctagtttacaaagtttggaagtatatattcaacttgatgttatgtttatgatttgtggttcaattcattctcggtttcttcttttaatatgattatattttgaaaaaaagaagaagaagatctttctatttatatgtttatttaatagaatctcttgaaatcctaatcagacattacaatattcatagggattataatgtcaactttggatagttagttaagtttgatataataaagctgtcaaagaatatttttactaaaaaaatttgagagcaattcatttgtttttcatctgacattgtcggcggatgtattctcctgcttccgtgagagagttttcaaaccttgttttgaccaattacatatactgatgatatacattgtacaacttcttgacccttttatttgaataatcttgacgctaagtcagaacatataaaattaaatcaagaaaaactcaaactgtaagtagaaggtcatctgatcaagaaagctcgcaaagaggtaatctggcgttggagaagagcttgcgttgtaagatcttatatatctgatgggttatatcttatatgagatcaagtcttgggtaaaaatgtaccaaggatcattgtacgtataaattgacattgatagcgagtatgagtatgagagatacctatatcacttaaagtgaacgaaattcatatggataacaaatgagatgagatcaatgttatctcgtctctttctatttgaaaatagttcaattagtataagcagacatattttttttgatttgaatcaatatatactactgtttttactaaactcaaccagtcatggaatagaaaagatggtgaaaataatcaaggcttttaactgaagggaaattaaaggtttaccaaacactaaccaaaaggatagaattagacgtgttaccaagcagcaccttatttggtcatcttcctcattcgaaggttactcgcacttcctctgcacacttcttcctctccatctaacctcagtactcctacaatcctctaagaatccatagatcaactgctgggaaaagcttcgcgacaatgtcttggcctacggattctgaggttattcttcatttttttttccatttacgcaacgaatctgcttgttatcgttggttaactcggtgccaatatcctccactgtgttaattttcgttagaattagcgacggagatgtgttttccggttaaccatttccccggcgaattgtcaatcgcacatgtgatcgaacaatttcattagtttctatgtgtggagctcaatgtatatgctgcagattgccgcgagtgtttgttttttgtgtttggatgttttcgaaatttggctttggtgttaatcctacgagatcgttcatttatgtctccagttaaattccataaaggaggcagtggctcagatgagtggaagagataaaggagaagttcgagtggtggtcgctccttatcgtatatgtcctttaggagctcacattgatcaccaggttggtttctgattgtagcgatgtaatcattgttttgattcaactacaagagttagtctgattcataccatttctttgtgaattcaaatcatctttggtgttcacagggtggaactgtatcagctatgacgattaataaagggatccttcttggttttgttccatcgggtgatactcaggtgtgtattagttatcatgattcttatgtgttttggtatacctctgcgtttcttataagtgaacttgtcaatcaaattcatatgtttgacatgcttggattcttgcgcaaataagcaccattctaatttttagatgaatgtctcgttgatggtataatgcaattctcttaagtagcattccgtattctgggcttggttcagcttaagagtagatggagattctaattgtgtacaatatagtatcctggtctctttttgtttctcacctgacctgagaaagcattaaagaattggataatttaaaatgaatgtggtttgtagacaggagacaaacatatatttcggagctgggaaagttccttgtgtctgtgtgtttcacttgagccttgaagtctctgtaccgtttattctctttctaatttatatgcaggtccagttgcgctctgcacaatttgaaggagaagtatgtttcaggtgtgcatatctttcatgatctctcatcttgtcgttagtgttttcaaacttttatatccatcctcagacgtgcataagcttgttactaagccccgtatagggtaaagtgcaccttggatattgtggaagtatttcgatctggccagcattccattatatctcattttagtatgaaaatgaacttatctttcacttaagtcttagacatttatcagattcaacctttaagtttgctcataattccctagaattcattggaaattgaagacccttagcgctgtaagggatacaaaagtatccgttttggatgagcttgcatgattttctagtttctgtttcatgcattctattttaccttttctaaaggtatttttgttttccttagtgcatttcaattttgtactcgtcatggtggtaaaggaattgaagatcttctatgcataatgctaatagcttttcgggttctgaaattatagagtagatgaaatccagcacccaataggcctagcaaacaagaatggtgcaagcacgccatctccatcgaaggaaaaaagtatctggggtacttatgccagaggagcagtttatgcgttacagagcagcaaaaagaatctcaaacaggtaacaggttcaaatttggtcttctggttatagctatagataaagtttaccattaatgggaaatgaggtttagcctgcacatttgctgtgtgatcttctggggttccacatttacccttatttggttgccatacctgatcttttaggccttgatttccccataatagttgacataattgtatttaatggaaaaggtatttgaatatgtttctaagtaattgttttgatctttgaagggcattattggttacctcagtggctcaaatggactagatagctccgggcttagctcatcagctgctgtaagtaactgaatcccgcctgtttttgtacagcagaaatttctccggaaagacaatttttactgctctttaatagtaactaaacatttttagcatatgagagtggtgtttacttgtcatttttggaaaatgaatcttgtatattattttatgatcgccagaaatgtgacaggttggtgtggcatacctgctagctctagagaatgcaaacgaattgactgtatccccaacagaaaatatcgaatatgacaggtatattcccttctaatgtaaccaagaagctcttctgtattgcttcatgagcagttgtttctctgtgaaaccagcaattagtgctgcaaattggtcaatttatatgtgacttactgcgtctgcaggcttattgagaatgggtatctgggtctgcggaatggaattttggatcaatcagctattttgctttcgaattatgggtgtctaacatacatggactgcaaggtaaaattccttgatttgtaagtgatatagtgtgcaaaaaagcaagaagcttgttcatgtggcaaaaccaagactgttcaatgggatgcctaagatgtttttgatctctaaactgaaaatgactcacgatcaaatcagatctacaacattctcattgctttcacgagaaaataagtgtttaatcttttcaattgcttcgattttaatgtatttcaatgctgagttcacttcttcctaaaatgaaaatgaatggttagaatcaggaggccttgaagaaatccttcctaaccagccatagatagggaaactttattttcttccagaaactgccatctcagaaaaactgtttgaaatatgcagactttggaccacgagcttgtacaggctcctgaactggagaaaccgttcaggatattgttagcattctcaggcttgaggcaggcgttgaccaccaacccaggatataatctgcgagtttctgagtgtcaagaggcagcaaaagttcttttgacgtatgtgcaaatctgtttgattcatatttatctacattttcgcttatttagatttaaatttcagtggaaatgctgcaaagtttatttctctattgcttgtgatactcatttttctgcatcacaagattcacacccttctcttgatttactttttcttttcagtgcatctgggaacagtgagctggaacctacgttgtgcaatggtaaaaaaactttaagtgtggactttaacttattcgttgcatgctgattagtttttctttgttgccatgtctctaactgtcccactgaatagttgagcatgcggtctatgaagctcacaaggtaagaaaataagattcttaagcttttggtaaaacaggttccacctatatcaggcctatgtaaatatgtaatacaataatacttgttcgtgcagcatgagctgaaaccggttttagctaaaagagcagagcattatttctcggagaacatgcgagttatcaaaggcaaatgttcttgaattcttgtagatgtctctttatgtgcatgaatgattcattaagctctttatgatgcttaacggacttttatgaatgtttgttcttaaatttcaggacgggaagcctgggcttcagggaatcttgaagaatttggaaagctaatttcagcatccggcttgagttccattgagaattacgaatgcggtacattacactctcttttcttctctcccaaatgcaacatatcctatagtgaatacagaccactagtatgcttacagacattattctctcttagattcattattttggttttaaattctgtgagttttgtgaaggtgcggagccactgatccagctatacaagattcttctgaaggctcctggtgtatatggagctagattcagcggtgcaggtttcaggggatgttgtctagcctttgtagatgcagaaaaagctgaggcagctgcttcatatgtgaaggatgaatatgaaaaggcccaacccgagtttgctaacaatctaaatggaggaaaacctgttctcatctgtgaagcaggtgacgctgctcgtgttcttctctgatcaatcctggagtttttggtttcttccccacttaaactcgatttttttgtcccttatatctctcacgcttattgattctttgcttgtttatctctttttgatcctgtctgagaaattctctggtctctttggtcggagtttcatcattgcttgatacattttttttgctacaaatacataatgtaaatcattctctaccgttttcgagtcgatagaagaatcgcaaacttcaaaaatgtgactaacatttctccataaatttgttaaattttcaacaattggtgaatttagttctgtaattgatctaacaaagacactatacaagtatgaaattagaaattgaaatcgaaagttagttattataatcttgtttgtataaaatagtgtatatctcaaatagagatacagattagttttttgtttggacacaaagacccccgccaaagtattgaaattcgcgcctgagaaattctccggtgtggctctctagggttttagcactttaatccatttgtacttgtaaaaatccctaaaaccctctgggcatgactccagtattatgccattccactgcttcaatccctaaccctaactctctcatgtctctctcctccactctccgtctctcttcctcccttcttcgccgctccttcttccgattccccctcaccgacccattatgccgtctccgccgcactgaaccctccgccacgcgtttcttctcctcccgtactcctcggtccggcaaattcgttgtcggtgctggtaagcgcggagatgagcaggtcaaggaagagtccggagctaacaatggcggtttggttgtttctggggacgaatctcgtattgtgccttttgagctacataaggaagctactgagtcgtatatgtcgtatgcgctctctgttttgcttggacgtgctttgcctgatgttagagacggactaaaaccagtacatcggagaattctgttgagtgactttcgttcggctcaaagctactgatatttttaagcttagtcagtggtattgttccttctaatgttcgattattttgtcttccagctttgcaatgcatgagttggggatgtcatctaaaaaaccatacaagaaatgtgcaagagttgttggagaggtatattattgatttttggaaagtgttttctcagtcgatttctctaaatatcttattctgaagaacgatttgtgctgttgaattctttgggttttcaggttcttggtaaattccatccgcatggagatactgctgtttatgattctcttgttaggatggctcaggtaaatatctgaattcatggaatgtagtccagtcctcaaataatgtttcaggcacgattcgattcttcccaaacttctgacttttttgttttaatacctttgtttttttggcagagtttctccttgagatgtccacttatccaaggccatggaaattttggctcaatagatgcagatcctcctgctgctatgcgttacactgaatgcagactcgatgtgagtgccttttaccttactttcccttctagttgaaatggttttccctgcaattcactttttctagttgtttcacttgtctttgctatctatagtgtatctctcatctctactttttctcttgtcttgagatgaacatgtatttttgtcagtgttttcagctgattgtacttattttttttctgcagccactggcagaggcagtactattgtctgatctggatcaagatacggtaacctcactattaatttgttgccaagtttaccgatactcaactagatggtccttaacctcttttgttttggcaggtggattttgtggccaattttgataactcacaaaaagaaccagcagtgttgcctgctcgtcttcctgctttgttgttgaatggagcttctgggattgcggtaaaataatcaaacaaatcttaaatctgaactccttaatagattttgttcgagatttcttcagttaatcttgtgcagattttccctgctgtatgagattgaatatgcagttgaatcttgatcatttcacattgtttaggttggcatggcaacaaatattccccctcataatcttggggagttggtagacgtgctttgcgctttaatccataatccagaagcaacggtatcactcatctcccctttgtttttctgtgatttatcaatttgtgggtcttttgttttacatgaaaaatcctctgttttataagtagacaactcataagattttgtttccactttcttcttcgtctgggcagctgcaagaactgctggaatacatgcctgcaccggattttccaactggaggaataataatgggaaaccttgggtaactctttgctttccaatttctccccaaagggatcttatacattaatgacttttgtttgcccacctcgtttgctaattttttgagagtaggctatctataggatcaaatagaaagactcacttctaaagtgtgaaactttttttttatggaaatagaaaagcattttgttttgttttgatctatgattctaacagattacagaagctgtacctatatcttaaaaggaacctagaaaatgagtgaagaggatggtccagttaatagttttcctttatttgtctgtcatatgcagtttttgaatcatcatgtttttttctgatggtgtgagtgattttttaatattctgaaagcttatatgttgtgtagtacatttactctcgagtttgttgaatacctttattaaaaaaatagtttgcattcatatgccatttccttttacaatgttggattcttataattttctaatgtgtgtttgcgctttcaagggttttggatgcttaccgaactggccgagggcgagttgtagttagaggaaaagctgaagttgaattgttggatccaaagacaaagcggaatgcagttattatcacagaggtgatcaatttagttttttagattaatgttcagatctccatggatgagggtttcaaaaatgtttattagcagtagagtaatgcctttagtgtgactttattgcagattccttaccagacaaacaaagctacacttgtccagaagattgccgaacttgttgaaaataaggtacaactaaacttgcgacatctaatgtttattttgcttcacttagcaatatgtacttattttactcagaggtgtgttacatttctagtatgtccttatatgcttgcaaagtttcttctttattcattgatgttggtgtttgttttcagacgctagagggcataagtgacatacgtgacgagagtgatcgtaatgggatgcgtgtggttattgaggtattacactgtttcctctgcacttagatgtattagtctgctttaaaatttcatattggaaggtaattaagataatttccaatacttctctatagctcaaaagaggaggggatcctgcacttgtgcttaataatctttaccggcatactgcccttcaatcaagcttcagctgcaacatggtggggtgagttgcatcaaccgataacttcttatttcctgtacttttttgaagagtgggcatataaaagaacttgggcattttccaggatgactagttgaaaattctctaatgagtatgttatgcttgtaaatatattaaggatcatgtattcacatatgcgtttttctttatcgtaactggattatggtattctgtgttttacagtatctgcgatggagaacccaagctaatgggattaaaagaactacttcaggtgaccacttgtctatgtaaatcatttatctacgtagcccacaaggagtaatagaaaagtgaagatcagagataggatatttacttctgtgctactgtaatcacattttaaagtaaatttgttgattactttctgtttcttgcttgtgtgtaggcatttatagatttcaggtgttctgtcgtcgaaaggcgtgcaagattcaagctttcacatgcacaacaacgaaagcatattattgaggtgcgactagaaatatttaactttcttaaatctgctcgtgaagaccatgatgtaatgatgtaaagcattttttctaatatcttcactgtatatatgcttagggtattgtggttgggcttgacaatgtggacgaagtaatcgaactcatcacgaaggcctcaagtcattcctctgctactgctgctttacaaagtggtgagctatattttactttgacaatataatcaatgtaacaatcttgaactgcacattataggttgatgtataaacagaattcggaaaagtgagcgagaattaggagtcaaaaagtagactagagccaatttttcttaggtggactgatagatgtagtctaggatgtacactattaaaagaatacatcttgtggtgaactcttccatattacatttgaacattatatatttcttgtctttttatctggaactgctggagtctcattcgttgtaagatttgatcttaattgcaaagatttcttagggatttatgctttgtaagtctctattgtaagggacgataccatatattaaaattaacacttgtcaaacatttacttatgtagaatatggtctttctgagaaacaagctgaggctatactggagataactcttcgaaggctaactgctcttgaggtgctttcttattctcgctaagttcaatttatgaaacttgtaggcttgacaatgttctaactagattctcccttcataaatgcagcggaaaaagtttactgatgaaagtagttcactaacagagcaaattacaaagttggagcagctattatcaacccgaacaaacatcctaaaggtgacacactcactttttagttatctgttcttttggctattgatattagaaatttagaacacctagatgctagtagaatgatagatgcatcaatatatgtactccaaatttgtaagcttgactgtttgagtccactgaggttcaaaatctagtccatgcattatgatgtggtataaggattcaaatgcttcttccatttcttgtttggtacttatttttatatctgtaaagctgcttactatatgttgctgttctgggccaatgttaggaagataactgatacatgatgattttcttgtagaccaaaattgaactatttgcttcgtttacttcattgtatattacttactactttattctcttcgttgtttttcttgtatttttctttagttaatcgaacaagaagcaatagagctgaaggacagattctcaagtcccaggcgttcaatgttggaggattctgacagtggtgatctagaagatatagatgttattccaaatgaagagatgctgatggtatgttgcatacttaaacctagaaagtttctcaacgttgaaatttttgttgtttgttttgtaacttttgatatggatgactataggcagtcagcgaaaagggctatgtgaagagaatgaaggccgatacattcaatcttcagcatcgtggaacaattggcaaatctgttgggaaactaagagttgatgatgcaatgtctgactttcttgtttgtcatgcacatgaccatgtcctctttttcaggtatgtatacctcaaaatttcctttgtgtttgctacgcacatggatattaattttctgccttgttgtaattcattgcttatacttgttgtacattcagtgaccggggtatagtttactcaacccgtgcatataaaattccagaatgctctcgcaatgcagctggtacacctttggttcaggtaattacatatctgtgtatctatgttttccttctgctatgtcaaaaattattcaattttatgaaaggctaatgttttgctgtgttcatgtgacttgtggaagcagatattatccatgtcggaaggtgaaagagtaacctccattgttcctgttagcgagtttgctgaagatcgctacctcctgatgcttacagtgaatggctgcatcaagaaagtatctttgaaattattttcaggaatacgctcaactggaatcatagcaattcagttggtttgtcccctttttcttcttagtcatataggaagtcttcttaacaaggttactctaacaaaattatttgtcttcagaattctggtgatgaactgaaatgggttcgttgttgctcaagcgacgatcttgtagccatggcatcccaaaatggaatggtcgccttgagtacatgtgatggtgtaagttgtggctctcattttttctaaatgattcatctttcatgtaaaccttttaatacttgagcaaactctgatggcttttgtttgtttaggttcgcacactgagcagaaatacaaagggagtgactgccatgagactcaagaatgaggataagatagcgagcatggacatcatacctgcatctctgcggaaagatatggaagagaagtcggaagatgcttcacttgtgtatgtttttcttaacttatatctgctgatgtttgctctagaaacttacttatgtcttactgtcttcttttgttaacacaatcacaaaagcaggaaacaatccacgggtccatggctattattcgtgtgtgagaatggctatggaaagcgtgttcctctgagtagcttccggcgttcgcgtctgaacagagttggtttatctggatacaaggtaggatctggattttcaccatttttggttgtgtttgtgttgatttttcccttacatctaaatctcaatttgtcagtttgctgaggatgatcgtttggctgctgttttcgttgttggttactccttggctggtaagtatacactgccacaaatacggatttaaatgttctttgattgctgtttatatataatctcaccattgggttttcttgcagaggatggggagagtgatgagcaagtagttctggtgagccaaagcggaactgtgaaccggatcaaagtcagggatatctcaatccaatctcgcagagcacggtactcccttcatgtgacagtcttttcaaatgtatattttatatggtttctcatttgattgttaatttctcaggggagtgattcttatgcggctagatcatgccggcaaaatccaatctgcatctctgatctctgcagcagatgaagaagaaacagaaggaactctaagtaatgaagccgtagaagccgttagcctgtaaattttacaatcccaattccaccagtttttgagacaattgtcaagttcagtacatagagtctatgtgctaactctcttcattttgtttttttgtgatgttactacgagaagagaaaaccatgatcgaagttagttattaacattaatctgcttcacattttgttgggtttaactatatacatatgttaagaaagttgaaaccaattattctggttataaccaaaacagtagtgctcttctcacttttgttttgttgttaaccacaaatcaggagaaatattttactagtggtacaaagacgtaagcaccaaaccccataatcacaagagcagctacaccaacattcaccaaaggtatgtcatatgtccgactctcttcttcacccattcctcttcctcctactgcaagaggaggatccatgtcgctcttcttctgtccttctttgactagtaatggaccggtttctggttccacgacttcagcattatcctttagatcgcctctatctttggctaaaccagcttcgtctatcttcttctgctccactctgtcttgaatctctccttcactaaccatgtctccaaccatctcattattctcatcctgcttgtttctcacgccatcatcaacatccagtttgattctttcatctccctctttcgtttttagcttaggctctgcttggtttctctgagcaacattcttctctattcttcttgcctcatcaccaacaactggttttgtaaatttatcttctttctttggtcccaagttaatccttcctccctccagcttctgacctatttcaccatcttcctttttctcaacaactttggcatgttccttggattccactctagcatctatggtcggcgttctgctaatctctttttccttcaccttctgtccagtcttaagctgacttatatcatcatctttctttctctcaattactttctcttcttttgcctgtaccttaggttttaagctaccaccaagggttggtgtacttttagcctcttcctccttcaatttatctcctatcttttgctgaactatgtgagcagcctcctttctctcaaccaccttctcttctttcgcacgttctcttccccctaagctagggattgcctctcgcgctttaactttcgcttcagacttctcttgactgcccgttggcactgctcttttaccctcaaccactgatttatacgttttgggtgcttcttcattcaacgttggagtggttttctcttgacttgttcccacttgtttctcctcctccaaagctttctttcgtcccaaggtactcccattaggaccaggccctccacttttctcctgattagacctctgtccaatcttctcctgatcttggactgctttctcctgtttgttagcttccacgattgctggaaactcgatggtcaagagtccatgtgagaaggaggtgctcaatttggtcatgtcacaggtatcagggacacggtaagcttcactgaaacgagccttagtctgagcagagagcggtcgctggccttgaatctggacagtccttgtcctctcatccttttttatttctatttgatccctataaaaccctgccggttccacacaataaacgagaaattcataaagtttgttatcaattaaagtttgatctcaagaaacaaaaagaaagaaagagagaagaaaaaagaccaggaagattaacgtagaggaaaatggaagatccggagttagtccattgagctctcggcttgaaactactcactgtcggagccagcggtggcggatgacggccacctcccggccttggtctcttgaaaatcgccgccatatatgtttatatatagatcacactatatcaggacaaaaagttcaaagcctttacgaaataaatgaatcaaactgtatatgaaaacataaaaaatgtttgaatgatgtatataagatagaaagagaggtaagaagagattttgagattacggtatgggtttaggattgctttagggtatggactttgtctgtttcttcatcccaaggtctcatatgtgtaaatagtttcttgtacttcaaggaaagaagcttttaaggttttgaagaatatgcgtatcaacacaaagtgatgtcgttttatttgttatttccattttttttttgtttccattttaattaagctagtagccgatatatatattacgtggcattcaacatgtgaaattaaaagaatccctggacctaactaaccacatcacttcaccggataaaacctccaccgtcttcttccgccgcaatttctgtctccatggccggcgttaacctacagctccgtcacgcatactccatagctcaattcgttccaactgtttcttctcctcctcctcttcctactcagcgagttcgcctcgggacttcaccctctcgtgttctattatgcaatctccgagctaattccgccgccgctccaatcctgcgaactactcgccgttcagttattgtttcggcgtcttccgtatcctcagccgtcgattcggattcgttggtggaagatcgtgatgacgtggggaggatcccgttgcttgaagttagggatttgagagcagtgattgctgaatcgagacaagagatactgaaaggcgtcaatttggttgtctacgaaggagaggtgcgtattaatcaatgcaattttatggttaagacttgaaatttaatttgcagaaagctttgcctggtagtgctgtctcattatatgataaagttttgagtttgatatcataacttgtgaattctatttgtgtggatttgttttgcattgctgccgattgtaatccatggcttcttttgtggttgctaataggttcacgcagtgatggggaagaacggttcaggaaagagcacgttttcgaaggtgaacattttatttgtatatcttgtatctcaggattaacattgatgctgcagagtattgttctctttctgtttgttatcttagtgagagtcttattatttgtaggttcttgttggtcatcccgattatgaagtgacgggagggagtattgtgtttaaagggcagaatctacttgatatggaaccagaggatagatctcttgccggtctctttatgagtttccagtccccagttgagatccctggtgttagcaatatggatttcttgaatatggcattcaatgctcggaaaagaaagcttggtcagccagagcttgatccaatccaggtgccttatcgaattaaatgacttggatttggtttgcactgtttcttacttgttgttgtttgctaaatggtcccaattgtagaactgtctatgtattatgtcttactgatatcacatggctcatgcagttctacagccacttggtatcaaaactcgaagttgtgaatatgaagaccgattttctcaacagaaatgtcaatgaaggatttagtggtggtgaaaggaaacgcaatgagattctacagttagcggtaatggttctgcttcccttgtttctcagtatccataaggactgcatatgataagaaacaaatgtgattagagaaggtagtggattactaagctt

SEQ ID NO: 1286 - DNA, 103517 bp, Arabidopsis thaliana
gaattcgacaaagagtgcagaatttgttgcattgctcggacacatctcagtcaaagatcatgttcaaaaccagcagaaccccgagattttacttccagcttcatcgtgggtcatcgaggctcataacgtagagcttgtaccaggcaattccagttccaagatcctcagggttaagctagaatggagacagaaagacctcgaagattccgcattcacaaggtacaatgtatatgcagagaatgtgaagtcgactgatctaagaccgaggaaggttctagagaaaccgaaaagcgagacagtgctccttggaattgctcacgtaccagcctattatgtagcggaactggtggtagaatcagacgtgaaggcagtccgtttcatggttcaagcttgtggcgaagatgcttcattggggaagctggatgaagctcttaaccttcttgtggacctagaaggtctctcagtaaatcacgattgaaaacaatctatatatatttttacagggtatctttggcctaaattctcttgacccggctttaattcatttgggtcgggttttgatccggtttcgtagcaattttatcatcttacgttagatgtacacgacgcttaatttgctcaaggcttattctagagacaccacacgtatgccacaagccttttctcctctttccacgtgtccaacaaacagacaaccacgtcattcccatccctgaaccatcgccgttcccttaaacctctcaccgttcgcttttactccgacgtttacagagactatgctcttcgttcctttctctctctagatcttaagcccaaatgttgcacaaggcttctcccgctctctctctcttgagctccggctacaccggcggtggaaatctgtttcctccgtcgagaaattcgtcgaatcttctgttttctccgagtggatccaggttttctgttcaggcggcgaaaggaacgaacacgaagtcgttaaccggagttgtattcgaaccttttgaggaggtgaagaaagaaatggagctcgttcccactaccccttttgtttctctcgctcgccacaagttctccgacgattctgaatctgccatcaacgatcagatcaagtatgttctcttgcttagttttttggtttagtctgtctctagtttttcgaatctcttctctaagaatcaccccaatcgaaaattttgaaggaaccaaattcattgattgattaatatcttcccgaatgatcatcatttatcatcatggtgctactgatctgaatcgcaattgttcatatcttgctttcaatgattttgcttgtgggaatcgtgttagcttggttaatacgtgaccatgtgtatgaatatgaatcttataatttgattttttgtgaatcatagcgtggagtacaacgtctcgtatgtctaccatgccctgtatgcctactttgacagagacaatgtcggcttgaaaggtttcgccaagtgagtttcttctttagtctaagcaaaaaccgtatttttgtgtctcttcagctgatgaatcatctttttgtttttgttgtgggtttaactctgataggttttttaacgattcgagtcttgaagaacgaggtcatgctgagatgtttatggagtatcaggtataatttcaaaatctatcaagtgatggacctttcaaagtgtttcttatgtttgatggatttgatttttagaacaagcgtggtgggagagtgaagctgcagtctattttgatgcccgtctctgagtttgatcacgaggagaagggagatgcattgcatggtaagttgattcaagctttattgtagcagcgttttggtaatctttgagactaatatagatcttagtaagcctcatatatcgtctttcatatagtagtattaagctcttgatgattctgactctttgattaatcagcgatggagcttgcattgtctttggagaaacttacaaatgaaaagcttctgaagttacaaagtgtaaggactttatcttttcatcattagaagtactattctaagccttaatcccatgatttcactatcacagagcacattttgacagtgaagaagtagtttaatctctcttccgtgtttggtccttcaggttggtgtgaagaacaatgatgttcagctggttgattttgtagaatctgagtttctaggcgagcaggtaaaaacaaaaagttgtcacattatcattacattaaagtacacaacgatcctcaagtaattggtgaaaacaggtcgaagctatcaagaaaatctcagagtacgttgcacagctaagaagaataggaaagggtcatggtaagtctttatacaaccccaaagataaacctcaaaacttcaattcactttcttttgggtgttacattaaattaccgtccggtgtgaaaactgcaggagtgtggcattttgatcaaatgcttctcaatgatgaggtttaaggaaggagagttcagcttctgagtttgatgacaatcttccttgtgctatatggcaccgttctatctctataacgacgtctctaagtttggtcggagaaaagtgttcttgctcgttctttcttttctttgtttttggttaaccgaatgcttgtgagtgtgtacttaataatgtaactcgtagtctgataataaatgcaagtcccactgtttcaatgcgactatcgccataaatatcctgaacccgaaactccgaatttttggaatggaacggatcttggagccaagtacgtgtcgtttatgacattgaaacggcatggcgttggaaccattatacaacttacagagaaacttacagagagtgtatataatgtacaagaaaaggtgtttaaaaccattaacctagacatcttgaaatatcatatctatcgcagatgtcatatgattgctgttcccatacaaaatcgtcttgatgtgaatctgatctaacggttaaccacgaagtaagtaagggcgatcacacacacgtccttcaaatagtagcgggctattaattaacttatgattgtacatttgtactagttttgttaaatgtgtgattaattatgaaggaattcatgtggaagtagagagatgggctaagagaatcttttctagtgccgttgtttgtagaagaagctttaatgatttataaccctacgtggagtcgaaactagagtccatgattatgggctaaggaagggttcaatgttgattctgtctcttaaagatgaggagttgttatcgacaagctgcaaagggtacatattcaaactctcacattttttatagctcacgtaatctcaagttctcaactaaatggcaaaaaaaaaataaaagagaagagaagttaacaaaaactgattcttcgaatatcgatggactaacaataccattagtacgtacttaattatgtaagcaatttgacaggaaaaaaattgctcaaattaataagaaagaatgtatgtgtaatcagacaagcgtttcgggagatgcagtcaaagtatgcaagtccttctccttctccgaggggaaattatacgcaaagagcccaaaggaaaccaatacataaagactggtaacgaacaatgccactccgttatagtccttagagtataaagcttcaaagatgccaaaaagaccaaacaaccaaccgaagaaaagcgtgatcaaagcatgtctcgtctccatcctacacttttccgttagctgaataagccctatccctccggtgaacaacgatatggtgaataacgatatgtataacaaagacaacacgttctccgtaaacacgagtgaacaagctagcggcgttatgaacactaggtacaaggcaagctccgagaacacaacctgaggaatcctctttttaggtgtagtaaactccgtgtagcaagtggagggaggatcggtgaagaaaagatatctgagtatcgtcactgcgtagaatgttgtggcactgaccgcaccgtctcttaggaaccgagacgaggagtcaccagatggcaagagaaggttgagggatatggagaggccaaagatggagagtagagtcattgcataccataatcctctgcatacaatcacatctcttttactcttcatcttctccattaagtatctcatctctctctctctcttttttaaaaggctttatctctcctcgtgtgatgggtttcagagacttaatatagggatggtgaaataggtgtagaactaggtattgaactgactaatctttattgattcacaaaacatgtgtatttatacaagagtcattgtatgtgataagctcaaactcctaaactataggaactaaaacatatcaaaagaatatacgacatgtcccaataatagggttttcgacttcttgtctttgaaggctttttagatttattatacacatgctaaaaagatcttcacctcacaacgaaacttactaacaaaaataaaaatataaatataaaataatattaagaaacttctagcaagatgtggcgttgtctctgattctgacttctagcaatattaagaaactaacaagatctacaggctcaccaaaacatgttgttttatgtcttccataggttcctttaagtccatctactcaaaacaaatccaacactgctttagcaaaatagtttgcacagacaatgtgactactccatccaatgtcaattaacaaaaccacttaaatccaactcatatctcttttgattacctaatagaaatatgtgcgtagctcatgttttgctcttttgcatgatgtcccttttagtaattgcaatatggcatagtcaatgaaattgctaaaacgacatcgttcaagaagcaaaagagctcataaacaccctctacactatctagaaggttacatagacgcctgtggacttatagtcgtcaaattgattcctggattcgccgaaaactcgaaatcgttgtactctctcagttactatctctctgtctcatggcgaatccgacggagaacctcgacgcgaatccacaaatccgagaaccagaagctgaagaagaagttgaagaactgaacggatacgaaggtgacgatggaggagaagatgacgatggagaagacgatgacaccgagtcgaaatctcaaacgcgcgaaagcggatccagtgtagacagaatcaaggcggaatcgctattccgtcggatgcgagctgctcctgtgccggtgcgtgttcacgacgtgattatcggtggaaacgagaagactaaggaccatatcattgaagcggaagtggatgctgtgagagaggcgaccacgttgcaagagcttctcgaagcatctagggttgccaattcgaatctccgtgcgttagatatctttgattccgtcaacattacgcttgattctggtcctcctgagcttcctggtactaccaatgtggtaatcgacgtcgtcgagagcaaaagccctctcaccggccaaattggtgcctacactagagcagaggtattgctttaatagtaacaattcactgctatgtttaaattgtgttggtttattacgtattggtttctatagagttgaatttgtcatcttcatgaagctgtttttgttcttcaatactgtgatgctcttgtaggctagatcatcaagcgttgaagcatctttgaagtataagaacatttttggttatggagatatttgggacgggtctatagtttatggctgtgacaactctgctgaggttggtttggggatgtatttgccaaggttcagaggattgtctactccttttacttcccgtcttttcctttcgactcaagactggcttaagttttcatcgtataaagaacgatccctcggtctttctcttggtcttttctcaagcaagtatcacgagctgatctacacgattgcgtggcgtaatctgatcgatccatcacaagctgctgcagtatcaataaggagacaactgggacacagtctgctttctgcgttgaagtatacttttaggtttgatcagagaaactcaagcttgaggccaactaatggatatgctttcatctctacatctcaaattggtggtcttgctcctgatagccgaagcttacgcttcctgaagcaggttggtctcctcttctttcttgttgccaacatttagatgacctttattttaagtttggaaggttgtaagttcttacacagcaaattctgtggtttcagtcccttgttttcatacatatcttccctagtatgtctgaaatttatgctcactgtgagagggaataacaagaatctaagacatctgatagttttagcatctattttcatttgtttggtcaggaagttgatcttcggtatgctgttccgtttggattttacaatgctgctataaattttggtgtgtctgggggtgtctcctttccgtggggaagcggataccagaaccgtccttcatctataccagagagattcttcttgggtggcaattcatcgcctgtgtgctccttgagtgggccatctgcgctgtggggattcaagaccagaggagttggtcccagtgagccaaagaggaaaggtgatagtgaacgggattttgttggaggagatgcggcagtgactgcatttgcggatctctcatttgatttgccagtgagatggttaagagagagaggaatccacggtcatgtgtttgcctgtgcagggaatatggcgaagttatcagagaatgagtttagaaacttcactgctccaaagttcttggagacattcagaacttcagttggtgctggaatcgtcttaccaacaagcctattccgtatggaggtttggttctcatcactactctcccttatgcatttttatcgaatgaaagtgcaatgattaacaccaaaattatccatcgtttttgttttgttatgagacagcttaactactgccacatattgaagaaacaggaacacgatcaagcgagatcaggggttttcttgacattctctgcttcgtcctgagaaatttttgctgaagaatcaaggtactccatatgatatggcctttcattattttctttttcttaaagccgtgtcccaatgtctggtagaatctttgatctattgttgaatcgagaaaactttacatagagagtcgattctttttgttatgtttgcatggatttctcatttctggatccacgaggaatgataataaagagaaaagaaccaccattaattggttgaatgattgatgcattgatgcggatgaacccttgattggataaatttaaaactgtgctaagaaaatttacagtttacacttgccatcaaaacttcctccttttttggttttacatttatcctttattcaaggaaccaataagtagattactctttattttccattctttttcatggatttctcagtttctggacaagcaaccttttcaatttctgcacgtatattttatagtacgacaaaaatgtgtggaaattgactattcaacttgacttagtcttttattctttgcgtttaacagaattccctagtatcttaatataagtcttctattatgtgaattaaacagatgggtgcgaattaaattattctacctaccatcgaaatctctatattttctttttcataatcgatattcaagaatgctaattaagcatagagaaggatgacaggctcttggaatccaacgagtatcatcatccctgttacactttcctttctcctctcattcattcacaattttgcggacgtggttgcagctcctactaggcacttgtgtcttcccgaacaaagggatgcacttctcgaactcaagaacgagtttgagattgggaagccttcctctaatgattattgctatcgcaataatagccgtgtaagccctcatccgacgacagagtcatggaggaataacagcgactgttgtaattgggagggtatcacgtgtgataccaagtccggggaagtgatcgagctcgaccttagctgcagctggctctatggcagctttcattccaatagcagtctttttaggcttcaaaacctccgtgttctagaccttactcaaaatgatcttgatggtgaaatcccttcttcaatcggaaatctttctcatctcacctctctccacctatcttataatcagtttttgggtctgattccttcttcaattgaaaacctttctcgtctcacctccctccacctgtcttctaatcagttttcaggtcaaatcccgtcctcaattggaaacctttctcatctcacatctctcgagctttcttctaatcagttttcgggtcaaatcccgtcttcaattggaaatctttctaatctcacctttctcagtctccctagtaatgatttctttggtcagattccatcttcgattgggaaccttgctcgtctcacctatctctacctttcttacaacaatttcgttggtgaaatcccatcttcttttggcaatctaaaccagctgatcgtcttacaggttgattccaataagctcagtggaaatgttcccatctcactactgaatttgacgaggttgtctgctttattactttcccacaatcagttcacaggcacgattcctaataacatcagtttactatcaaacttgatggactttgaagcaagtaacaacgctttcactggaactctcccttcttctctcttcaacattcctcctttgattagacttgatttgagcgataaccaactcaacggcactcttcattttgggaatatatcttcaccatctaacctacaataccttatcattggcagcaacaacttcatagggacaatcccgagatctctttccagatttgtcaacctcacgctttttgacctttcccatttaaacacccaatgtcgcccagttgactttagtatcttctcgcatctcaagtcgcttgacgatcttaggctatcctatttgaccaccactacgattgacttgaacgatatcttaccatatttcaagacgctccgttcattggatatctcaggcaaccttgtttcagccacaaacaagtcttcagtttcttcagatcctccttcgcaatcgatacaatctttgtacttgtcaggatgcggtatcaccgattttccagagatcctaagaacacaacacgaattggggtttctagacgtttccaacaacaaaatcaaaggtcaagttcctggctggttatggacgctaccaaacttgttctacttgaatctttccaacaacactttcatcagttttgaaagctcgtcgaagaaacatggactctcctctgtccggaaaccatctatgattcacttgtttgcctccaacaacaacttcacgggcaagattccttctttcatatgcgggttgcgttctctaaacactctggatttatctgaaaacaactataatggttcaatccctcgttgcatggaaaaactcaagagtactcttttcgttctaaaccttcgtcaaaataatctgagtggaggtcttccaaagcatatatttgaaagcctaaggtcgcttgacgtcggtcataacctactggtgggaaagcttccaagatctttgatccgtttctctaatcttgaagttttgaacgtggaaagcaacagaatcaacgacacgtttccgttctggttgagttctctgtcgaagttacaagttcttgtattacgctccaatgcattccatggaccaatacatgaagccacattccctgagttgcgaatcattgacatatcacataatcacttcaatggaactttgccaacagagtactttgtgaagtggagtgctatgtcatcacttggaaaaaacgaagaccagtctaacgaaaagtacatgggatcaggcctttactaccaagattcaatggttttgatgaataaaggtttagcgatggagctggtacgtattctaacaatctacacagcactcgacttttccggaaacaaatttgaaggagagattccaaagtccattggtctattgaaagagcttctcgtgctcaacttgtcaaacaatgcttttggtggccacatcccatcatctatggggaacctgacagctctcgagtcattggacgtttcccagaacaagcttacaggagagattccacaagagctaggggacctttcgttccttgcgtatatgaacttctctcataaccagcttgcaggcctagtaccaggaggtacgcagtttcgaaggcaaaattgctctgcctttgagaataacctgggactttttggcccttctcttgacgaagtctgcagagataaacatacgccagcatcacaacagaatgaaacgacagaaacagaggaagaagacgaagaagagataagctggatagcagccgcaataggattcatacctggaattgtctttggattaacgattggatacatattggtttcctacaaaccagagtggttcatgaacccttttggccgaaacaatcgtcgacgcagaaacaccaccacccactagagaggtaatgttccgacttttgaacgagtttggtagctttccatcagaatgaattttatttctgttttaacaacttattttcgttgttataggcttataacctatctgaataatctggaagaggaaagtcaaagtaaccggacgaactccttgacgttaaccaaccactcttttagccattttcaaatccagattgtttccggtttagcttgtgtttttctcttctactctgtttttagccaactttgtaattgaacaactctgtttttcgctctttagatgtacatgtaaagttgttttttcccgcgagtttgttgttatcatttctttccccattgcactctcgtatctaaaaatgtatgtctatttgttcgtatcaattaagacgcagaaatacagagcaattatagaattggggaatatttgatcaaaaagccatttttactgtattttgataaactaaaccttatacatggatatatttgaagtcagttgtgtctggttctttattagacatttatctgctattttgcagcagcaagctgtttcattctcgacattttcaagtagtttatacgagaatggagaagtgtgttttgatgatgagtttttgggtttttggtaatggcttaaggaaagggagtgattatatgctaagctctgtgaactactagaaaagtttaggtaagcctatgggattataatccatagtggaaaaggaatggaaagcattacatattacgatttaatttatgaaatgacaagataagaagatttaattaagtaaatgacaattctttttaagttgctactagcaatttctttaaaccattacttgtttgtatatttatactcattcacaaaggttaagagataacaatattatcgttttgtgtactcattataaaggttaaaagatttaaggtccttaagatttatgaatatttgatttaacaaaagaaattttaagttttgagttaagtttttcttgttattggtataaattcacaaccaaaatgaatgatgagtagaagaggaagccaaagaaagaagagaaaatggatagtgaaggggacggtggtgatggtggtgggcttctcattctctcacttttcttgtcaaatgtcttgtcttctccatttccacactccaatttttatatgctacctgtgattttatttattttattatttgactttcttttgcttaagctatgtataatctacaataagaaccacaaaaagtgatataagctcagttctatattggtgcccactttgtaagaaatttcctcttcaatttggagcaaagtgaaagctattttgtattttgcttgattgacttgtttccactaatccaaaagtcttgcttctcttgtttcttcttctataaaagagaaaattagctgatgtgttgttactttaactctctctatctctatagtacctttgatttttcaatatatgattatgatttatggactcgaactcacgaccaatcatgtaattagcaaggaaaagctcaaagccaacacaaatgatgaataggcccatgccttgtcccatttgtttccttctctctattactttcaaaaacactcttcttcacaaaaagttaaaagactcttatcaatatataaaggaagcacgagataaaacttagaaaaaacgagagcctaacatttaccaccaaaaaatcaaaacaaacaaacaaaaagtttgagatgagagggcatgagccacgatcaagctcatcttgtgcagcctgcaagctcttgaagagacgatgcacacccacttgcattttcgctccttatttccgctcaagtgacttgataactttcgccaaagtccataaagtctttggagccagcaacgtcagtaagcttctcggtgaagttcctgaagaacagagacaagaaaccgttaactccttggcttatgaagctgaggttcgtctcaaggatcctgtttacggttgcattggagccatagcgtctctgcagaagaagatgctcgagcttcaacacgatctagctgttgctcgcactcgactacttgcccattctggggtcaacaacagccaagtgtcccctttggatgattctcctgagcttgctgcttttcttgatcttgtaccttatagtgacttgatgttgcttgatgggtctactaatcttgatgcttacttgtatgatcttggacagcctccttttgtataggccttatctctctatcatatatctctttatcagctgtatttgcactttgctttacaagttatctttgacaatctaaagtctgtccctaatgtatgaattccagtatgcataatcagatgcttacttcatcatatgtatgaaaaagggttttaacttcaaaagtaaccatcacatgcgatgagataactcaggtacaagatgagccttggaaggtcagagtccttaccagttttggaccaagtggtaggccaaggtgagtaaagtgaggtgttttagatgaagagcttctttgtaagtcaggtatgaataggagagcacatgcttatgtcatcccgaaattctaccaaacatgaaacattgatatatatgcttctatgatgttcttttttgaggctccaataatacagcctcatgtgtcaactcgtctccctcaggccacaagagtcttgtcctggagattccagagtgcagcaaagtcacataagcaaacatccaaatcaatagcttggtgggtttgatcaaattccaaactgaattatgaatgactctgataagagttctcctcagaaccgttctacgcatcttgttaagtctgtacacattcctgaaacctgcctaagcaaaagagtaattgcagatcacagaaagagagatgagcacaatttggaactgcagacactgatacacaaaccatcatacattgatacttcacaaaagtacatcttgatatgtcagatactatgagagttcttttggtaattcgcattgctactaccaatgtaactctacaatgctaaaaaagagaatgaaaaagaagaagaagaaaaaaagcatcgcgctataacttaagaaaacctaaagatcaataataataacatcttctccaaatcgtatgagctttagatccaaccattgctccttgcttcacatcagtaactcctccacaatctacaatcctacaacttcttacctatacaacaaacaaagcacaactgaagtttcagtaaactcatcaatcacaacaaaacacacataaaaatgaaaactttacctgaagcagctcttcgtttcccaagtttagatttctcaagctccaattgcatctccatcaacatattcattcgttgtaactcaagctcctttgcaacttccattctctgtttctccaattcaatcatcatctgttgcttcttcccctcgattctctcaaacgcttcccctaacttcagaatcgatctcgctagctccctaaaggctgatccttcactcgaatctacatcttcaactttacgatgcttcctcaccacaaatccccaatcacccgcatcatcatcatcttcttcgtcgtcatcatcatcatcatcatcgtcatcgagagagctaccagttgatttagatccagtaggattcaaattagggttcatcaacgccgatttaacaacagcaccggacgatttcttcataaccggaccgattaagaaatcgagtctatcaaagaagcaccaattcgataaaggtttcgccttttcagttttgtacttcttcttcaacgtatcgatccggtttttgcactgtacatcggtctttggccggccattcccgtggcttgaattgacggcgtcggcgacttctttccaatcgttttgccggagatttccccggttgagattgacgtaacgatctccccaagcttcgatcaatgtcgccgtagcgtcttcgctccaccaatcctctcttcccgccggtagacggtgagtcttcgactgagtctccggcgtcgtctccatctcggagtgggaaagagaggaggctaacgtgcgcggtggagaaagaggcttaggataagaatttctgttggatcggatttttggtaaagttaaaagagaaattacggttaaaggagagatttttgattaccggcggtgacgtcagcaacggcgattatcttctttctcctacctctctctttttcctctgctaaccgaatcaatcacactcatttctgaaaaaccggttatcgaaaacggttatcgaaaaccggtttaatcataaattgagagtcctactaactaggctactactagttatagtcaatttcaagcttcttttaatgcgtttctacgggtaatgatgataagattacattattaaactcatagactgattgataataacgattagggctagaatctcatcagttcatgtcattataggaaatcttataacgtgtatttttgtgtattctaggaaagacagtaaatatgaggttgtattagttttggtagtggtttttaaaagtcataattggaaagaaagaaatgttatcagaatattaagaaaatttatacgttttgtgtattccagtaacaagatcatttacgttacgccgtaacaaattgaagtttggaagtgaaaaatggtgggatgtaattaaggaaataggtaagcaggcgaattgttaggtaataagagagagcatcgcaaacgtgttaggtcgtagactctatgtctataatgtatgtttcgtgccgtgtcttgtctaattgtctttttgctgtctcgccaattgatatgttagtccatgcctaactactactgtttcctcataactactaaaatgtcgctgaaatatttgaaaaaagagctgaggtgttttttctgtcgatcaaagtttccacgatggtcttggtgaagagctagtagaaataagcatatagttagtgatgttaacttgggcattgaatagccatttgttaaatgggtatgtgcaaaaaaaaataacccatttaaacccatttagagaaaaatatcaaatggggttaaatgggttaccccaattaaacctatttaataaatgggtttacccacaaacaaatgggtacccatttatgttttattttatattagttatttttattaaaaagtagataacttaattataactaaaataaagagcaaaatactaaatatatttaaaacaaaacgtaaaatcacgtttttccgctaaaacccataaaattacgttttcccaccaaaatcacgttttttaccaaaatcgaaaatcacattttcccaccaaaatcgtaaaccgacgtttttccgccaaaatcgtaaaatcacgttttcccgccaaaactgtaaaatgacgttttcccaccaaaattgaaaatcacgtattttcgccaaacccgtaaaatcacgtttacccgccaaaatcgtaaaatcacgttttcccgccaaaatcgtaaaatcacgttttcccgccaaaaccgtaaaatcacgttttcccgccaaaatcacaaaaagtgttttccgccaaaaccgtaaaatcacgtatttccgccaaaaccgtaaacgacattttcccgtaaaaccgtaaaatcaagttttcccgccaaaatcacaaaaaaaaatattttttgccaaatttgaaaatattattatcattatatgttattgaaatctatattttagtaaattataaatatttcagatttagctaatgtttatggactgttgttatttatctattaagtttatgaattaattaataaaaggcaatatctcacttaattggtttaaatgggttcacatggatttactaaatttaaatgggtagggttaaatgggtttcaaaaataaatggatttatatgagtttaaagttaaatggagtgggtttaaatgggatgggtttaattggggtgggttagcccatattaacatcactacatatagttttctaaactaaatatgtcattatcatcatttactggtttacatgcatcttttatacatttcaaactttcttatgaaaacgcagatgtgaaaagataaatcatgatttacaggttatcaaagtgatgtgagttggaacgtaaaacaatttagtttgtcaactgaatcttagacgcaatcgattattgttactcttaaatcactttacaataatatcaaatatcacatcctgcagccaagtaatcgagctaatccatgatcaagtataggtggtgaagcaactaaaaatgtagccaatttcgtttgtacgcataattaaacaatgctatttattttagtatgttgctacttgccagttgctaccattgggatctcgaaaacacacaaacgtacgtgcatgttgcctaatatagtctttattattgttcctaaactaattaagacaaattaaaacaatatataaagtaacaaaaaaaaatcccactttccttcaaacttgagtcttgcttgtacagacagttgtactacttgtggaagctgtttaactcaaattaatattctctttctgttattttatttaaggaaatacaatcacgtgactgagattagcactagtatactatatatatacatcacgacgctgtttttatacatactatatatcaacggccagaattaagtaagtaaccatccatcgccaaccggaaaatgacgtcatcttcaccgtctccacaagcctcgatgcttttgtactggcacgagaatcaatacgacgaccggaacttccagattcatggccggacactcttcttcgccttagctttattctccgtcgtgctcttcttcgcactactcactctctacatccaccggaactgcctcccccgggattctatcaatctccacgcgtcctctcccgatcgactcacgcgttgccgtagcggagggcttgatccggcggagattcggagcttgccggtggtgctttgccggagagaaagggcggaggaggaggaggagaaggagtgttgtatatgtctaggtggtttcgaagaaggagagaagatgaaagtgcttcctccgtgtagccattgttaccactgcgaatgtgtggatcggtggcttaaaaccgagtcgagttgtccgctctgccgagtctccatccgtgtcgactcgtcaagctaatgagacagctagagtgatagtgattaagatatgaatttgttttttttttttgtaattgtgtgggtaaagatttatacatatacttgtgtattgcatggacatggatggaggatgatgtttacacacacacgaatggttatggttttttctaaaaggatttaattttcatattctgtctttatcattgattgtgaagtttttataatcacttcatctgtattttaaacatacgatgatagacatttttgtgtagatgtttataagggtaaatggacttattaattcaggtaaataactaaatgataaaacaatgatatgttcatatttgatacagttacatgtaaaattctgtgctatatttctgtataaataacatgctatttttttctaaatccattatttcaataaaataaaagtattcgttacaatttagaaaggcacaaaacatgttacaatttagaaagtcatcggtatgggctttattgggcataaaattagtatcgatcggcccaatatttggaaaaagaggaaacgagtgtctagggttttgctgtcatataaagaagcaaaatgagtggaagcaacaaaatctttctgaattggcggccgctcattttcctgaaatttgcatagaatcagaggagtgaagagtttatcttctgtgaattcaccatgagggctaaggtgagaaatgggcttgtatatgttttctattatgaattttctctaatacggaataatagttggtaatacggaatgatggtgtttttggggttgtaacagtggaagaagaagcgtatgaggagattaaagaggaagagacgaaagatgagacagcgatctaagtagattttcgaacaaacctggttttgtgttttgctttcgttgttaaatccaactctgttttgagtttcagtttgaatgtttcgttggaccaaattaatatggaagttatgttttctattatatatcttacaaatgttgatgttctactattctctgaattataattttgagattagatttgggtgattgcttcagatgttgatgattggagggaatatatagctatggatgctttagaagttgatcataggaacaaagtgaatatgcttgtagttgtcttatttgattcctggaatagagtctagttggccccttacggtaccaatgcagtccagtagttagctttgctttacgtccgatagtggatctggtatgaaggatctctgattcaatcccccaaaacgaatgggcactcgcattcaaactttggaaattattggtcaacccatgttccactcgagatcaattctctagttcagtaggagaaagtgattttaattcattgttaatcgatagtcgtttacagagaaaatgaatgagatttaagtaaaagcaagctagtctttaacaaaggactaataacgaagcccataaggcccataattaaaagccggctaggctcattttacacgaatcagagctactaatcccaaagtatctttatacattacatgtcgcataccactaagaacgaaatattttgggaaactagactgtaaattattattatttggcaagagaactatgttttcaaagtgtggtcaatacttagattatttgatataggaattaggatagaaacattttggttacgagatagcgttttcgaatattatcaagtggtgatgattcatcagacactgtattttgaaatttatcgaagcaagaacaagaggaagtttgtcgtacgaaaaaacataactcaaaaaggtttaaatgaagtgaagataagctgaaagaaagaaggaaagaacaactcatatgaaaaaaggtcaaagagtaaaatgataaagactataaaggagtctcctctcctccaaaggaaaatatttaaatgacctcaatcaaaaatgactcacctaaaccccctcaaagaatattacagacgaaagctggtttattatccacacaaacctataaaacaaaacaaaacaaggaaacattccgacagaattccgcggtcacagtcttctagtaagcgaataccaccatggcagattgcgctactatgagatttcaattacttatatggatacttgttttcccaaaggtcttagtagccgcccatcggtggcattccatatggaggcattggaggcattcctgacattcctggcattccacccatttgtggtggtggaccatacccgccacctcccattcctggcatcggtggtgcgggtagagccagtggtaataattgggcgtacatgttctatttgagaaagagaaaaaaacgagcataaggttgtatattgatttgttttttaaaaacattttaccgtatgatgtctgagtgtagtacctgttgtgacatgacatccttctcttcctgttctttggccttcacctctttttgtgcctccagcttgtccttgattagctcatccactttgccggagtattctcggataaactgtgaagaaaaaatgacgggatcaaagagagttgatcatagcgtcagtatggttcctatctcatcaggtagagggtattttagggattggaggataaattacctggaggagatacgggaaggcaaagtcgatcatattgttgatccaagcaagttctagagcaacgtctggtcggattaagtcataacagacaaagagacatgtagcaaagcattcctttttcccctgtaaaaccagcacaacatacaacaacggggatgtaaatttcatcttcagtaccaatagtctttctgttttaccatatacggtaaaaagttgaaaatagactaatggctttcgatgtaatcctgcctgaaacctatccatacctgttcaatgaagtagacgagaagttgttctgcaagatcatggtcgccggattgcgaagcagtttccatacagtccttgtacatgttatctttctttgacaaagcaatcgattgcttccatctaccagctttcttatagatataagcagccacacgtctcatttcaacaagctcgtgtttctcaatctatttcgcaccatcccataacgataaattagtatttaaggggaaatataaatgtgtactcgatagatagatttaaactcttaccttctgagcgagacctatctggtcaaaactgtcatgcaaatcaatagactcgcgcaacctgtcatagtcttcttcttctgcatatatctcattcagagcttcatttacagcagatacattattgctctgaactgcaaccatatatggcttaataaggcgcaagtgaccagcctgagatcagaaacaagaaataatcatcagatatagattgttaagccactggtgataagtttttaacagaaaatattaaatcaatggtcagcctctaaccttgcgcataatatcaacgacacgcgtgtgatctaaccgcagagcaagcacattgagaagatcgttgattatatcagggtgctcttgcaagtagaagtgaacggccttatagtaaagctcaacattcgcaaccttggcaacaatgtctttgaattgcatgtgctcccatgcttcaggagaatgattcataacagtggttgcagcattatcaaactcatcatattgaatgtaaagataggtaagttcctgccaatgctgttgttcatcacaggcccggataagcttgggaatattgagtcgagtagagaacaacttgatgtgttccataagcttctcataacgatatctggcgtacagtactcctaactcggtgaagatacccatgtgagcacgttccagaccaagtccactctccataagggagatcaattcattgaagcatcctctgttctggtagtactcgcttacttcttccaggtcatccacctattaaagcacaaaaatattacaaaaaggcatacaaaattgaaattgaaacccaattataactaaaaaactttctcgggaactaggatctgttatttatccacctgtatgataatgttaagtccacagatttgagccagtcggaattcctcagcatcaacacaagcaaagcagacttccttccatgtctttgcactgtttgctttccttgcagcatcaacagcaccttggaactgttgcaacttcacaagggtgacggctaacttggcccaattcgatatgaatgcatatattatctttgcagcctcatacagagcttcatcgtacaaacggtcaccaacatgttgaaggttggcaacgttgggcatcagaataaattcttcaatctcacccaacctttcaatctttgcataagcatagatgagctcactatccaccttgggttccttcaccttctgtctaaccatcagaaggtatctgaccaagtcatcatagacattagtatcttcagaggctcggatgacctccaagaactgagtggtgtcatcagctcggataaaggactcaatagcatcactgactagtccttccctgagctgtgccttagcgacttgactccaaacagcatcttcttcgacccggaaagcaaactcaacagcacgttcaatgcttctgacgttatccaacaatacgttgacagcctgaacatttaagttaaacttcttgaaaatcgcaaatgcttcctcatacaattgagcatccactgccacttctccaacagctggaccatcgaaattatccagcctgttaatgtaatccataactctggacggatctgccttaatagctgtcagtataagtagattttgcagattgaaatttccactgaaggcagaattttgaagcacaattttttccagaagctcaattagctcatgtggcaaatcagcagtcatgaatgctttaacagctgcagaaacttgctctgggctcttgctttctggtaaagcagtagacacaacttggtctataagttgcctcctatattcattttcttccgtaagaaccttctcccagaggtcaccatccatcctctccactacgtacctgcagttggaaaatcgtgtgtaagtagtctacaaagtaactagtgtggaatataagtaagaagtctagtaagcaataatcaaatacctggcttgtaacttgaacaaagagttcttgttggtgacattgatgagttcctcgtcacattgtcctcttctgtatgccacaacagccagagtgggatcacgtttctcgcagtacttacccacaaccttagagtcgtagtaaggattggtggtcaggaaatgctcggggttgttgttactgtctatgataattttacccaaggcattatggacatgcacatcttggcttccctcactaactagatgctccaagaactgagtgaggagacggagtcgatttctgagaagacatatacatattagagcctaaagaacaaaatagcatacatatgaacgaaattcaagatgctaaaagggttcgcacctcttttcacattctgcaacaaggggttcaacaggaagtaatgaacgaacagaaagaatgaggccttttataaaatcttcagggcattcgtcatcaagcaactgccccacaactaagggagcattcccaggattcacctacaaaagggatcgcatatataattctttcatgaaaatcctaccatatttaacaaaagtctaaagaaactacataccttctgaacgtaaccttcaatgtaacgcagcatgttgtttgtgtagaggtaatgagtaagatcaggtacaaagccaaaacgatcacagacattaatcaaaggtcgggcatcaggaagcttagcttccattaaaaagttcttcgtcttttccgcatcataaaagttagactctctagtcacacgctcaacctcctttatttgaccagtcttggcagctgcttcgatgtacttgaagtgaatctcaggatcctcactatcacacagagggaagacattgtaagtcataaaaatacaaattgctgcatggtgcttgtttacaggaatgacagcaggatcttgataaaattacctcatactcaagtatgaacctaggaaaaagtacagcccttcgtacgacttgaattgctcaaagagtttaatgcatgcatcaacaccaagttgctcacagtactccttgcaagcctgcaaagacatggacacgtcagtgtcacattaaacaataaaattcacatcttacaacaatacagcacatacctgaacgattatctgaaggttgcctctcaggttgaccaacaggagatctttcatgcactccattgcccactcgctagaaagagtaccaaaaaactcgacaagagcctgcaaatttgagtagagggatattcagcaacttgaacatcgagttgtttagcaaccaacaattagttcagaggtaatacctgtggctcaatagcatgtgtgttcacaattacacgtttgatatcaggtaactctgagtaatgctgcacaaagcaaaaggaaacgaagttagaggggaaaaaaaaatacatctattaggccaagaatattaaagaagacattgagcaaaaacctttaaagattggatgtaaagtccagccttttcacaaagctgagcaacacgaggccggtcataatggctgaacatcccatttgctaagattgcatcagccacattaggaaaggttaccaaattgatctccaaaacctgtgttgagagtgcactaaaaggtctaagaaaggaaggtgagtagggaaagcacagagaagtaaaaggtggcaactcttttcaaccttagtttgcagaaaagcatgctcgggtaaatttggcttcagaacatccagaaggaaagcagtcgcttcacggatcagatttctctgaatatgcaaaagtaagtacattagcacatgatagctctcttgtgaaacaagtaatgagatacaattttatgtacacagtatattctacgtgttcacctgaaggaaaagatcagtgatagtgttgtagtcaactggacaacctccttccatttgggacatcattaaagcaaaatttactgctccctgcaattagcaggaaaaaaaagaagataattagcagaaaaaaaagactattgatcttttacagggcaaaagcttagttgcttgataaacaacagcaggccaaaatttatgactcttcttgtgattacggaacaagaatctagtaaaccagtccttccacagtttaatatgttgcaaagtatcaaaagtgcagcaaactaacctgaggatccgtacggagtatcgtttgcagaagaaacatgtaatcaggtgtgtacccaacctagagtcacaacataaaacaatggtacctcttgagcacaatgacctttagggtaaacataacaacggagggggcaaactttaaaacttaattgtttacctgctttgaataaatcaatattttgtcaaactcccttcgctctgcaaaagctgcaacgacttttggagtagctctagctttgatgtatatttttagagcaaggtcattatccacagtctgaatcagaaaatattaccgttacagcatactaaagaagcccataggagacactttaaatgaaaatggtcattttaagattactttgacaaggtctccgagttcttcactgcattctaacttatcctctgccaaccagttttccaagaggttctttttgttttgattcacaacaagccgagatagttccaaagactcatatgaattgagcttccctctagtcaaaagggtcccaaaatactgtaacaatggaggagtttgccctgcttgtacaggaacactctgcaaaattgtaaagtgtgatgttgtagtttcagactggtgttacaaacatacattatagacaacatgttcacagaggattctttgcttgaatatggaacatatacctggaatttggccaccgtatcaggtgtccgtagaatgccctgaggagattcagcagcaagctcagcagcctccttgtactttgtttgagcaaataactcttggaaccgctggacaacctgtaacatcaaaattgaatatgaggaactttgcattaagaaatgtaattcgagcaatgggtttagaggtctaaggagtttatgatatttactaagtgtttttaggttagtagggtttaactgtgtttactttcaagtaaccatggtttaaataggttatggatctttagtctctatcggtataagatgtcttgggagtttggaagaggtttatcatcaaattcacttagttttttgtagaattttaacattaacatgtacaccctccgtttcaaagtgtcatcttacgattcaatgtaaattttgtaatacatttatctatttacccctatttaaatattaattaacaatgtgaaatagaatttaaatccaagagacaattgtcttctaggatatcatgtaacatttaattattctttcatttgcttgaaaatgtcaaaaatgcacttgtatattgaaacggaggaagcgtcaaatctcgatttctaattttctacattattgtttctatcagaatgacctttttcgtcaaattggcacaataatgacttcaccaagaaaatagatccacacatctgatccaagataattatcacataccagattttctgcaccagggaggtttcctcttttagcaagattgacagcaagttccaaattgttcaactgtaatataaaggcatagatttcttagcatgtcatgatgaatagatagattatatagagaagaacaaagtaaaagttgaacatacttgaccactaataaaaggtattatggtggcctcatttactgttgccaaaagaacttgtcctcgcctattaatggcatagaaacccccaactgaggaagcttcagacgttaagaaaattgggtccggacttatccgatttctgtagatagcagaagctgtctctagatcatatacaaacagcaggccaagcttggtgatgacataaatcaagttaaacttgtgagagacctgttgggagaaagagaagtcggtgtcatgaatttttcacaagaaacttactgaagttaattgaacagctaatgcaactacaaacctgcatggccacaggaaaatcatcagcaaaatctggggggaaaaagagatctgcctgcttttttgtaaatgatggtttccctgaaaaaaagccgcccacctttaaacatcagactaataccaactaacaataaccatgaaaatatagagcagtagtttaagctaacctggttgggcaccaagttcaataacatgcagctttgatgttatctgcccagcattaaagctcttgcttgcaaatgatataagaatcgaaggattctcattcccagggacctatcaataataatgtcgcttgtcatactacagttcaagatccgaccatggaatgaagtagcaaaggtatcacatagtttaccttaaactgagcaaaagatgcagcatgtgcttcaagggcctggctccgctgttgatccacagagaaaagctgcatatttcctttcaccaattgtggtctctacagaggataataatgacaagattccgtcaaaaatatacaacatgactgccgttatgatgtcttaattcaacctaatacgtggtgcaggaaccctacctcaggagagccaggggcaattccaatcaagaccaaccacttctcattaggagagcacttatagtttataatttgattgtttgccaaattagccgttctatcaaacatcttaactggctcagaatcacctggaaatatcgaagcaaaaatgagaaacaacatatacatgatatgaagaagctgacagtaagttaaagatataaaaccttcaattgaccaatgatacacagaagtttgtgtgaccagtcccagcatcttaggtgtgatccacttccaaaaagcaacctataatatccaaaaaattcagaccagtaaaatcagagtctgtctgaagagtacaacatgaaagataatcgggttacaatttgtttgcttcaaaattcacctgctcaggcatctgatgtgacttcaactttgcctttgcttcaatgttaaatatctgtagatgatcctgagtagttcctggaacttgagctatatacgatacgaatttaagaaaaagttaacaacaaattaaggaagaaataagtaatagcttatacaaggaaacatccagtacaaaccaaaatttctagtttaactacactaagcttgagacacaacactgccacgagaaatataacacgtgttggaaaacagagagcgctatactgatgttttctacagcattaaacatgctatcaccccaaatccagaaaaagagtataggactacaacataaactcgaagagtgtagttacacttccatactactttaataaaaataggttttctatcaagtgacgcatcacaacatggacagagtcatttaaacttcaaataaatcaaaacatcctatccgtaataaatagcatatgtacagttaacaaaatgaaggagaagctatcaatggtagttctggagaaaactttaataggaaccacttatgggtcttataactgatcatacacttcaaaaggagaatcttatgggtgttataagtgataatgcgatcgaaggaaacagtgtaataccttttaaggcaaggatcctcgagtttgggttcataagagcagaatcagcagttataggcctccttaaaggctgcatcggcatattcatatcgataattacaacactgttctgcggtgccgtctctcgtacacatatgtacttatcagactccatagtaacatttgtaaaggtgatgaactgttgaccgatcccaacgctcggaagctggaaaatttccaaaacaaaagtaatcaattggcatagttcattaacttagttacaagatccgagtagataagcacattgcgcaacacaataacttaaaactaaggactatatacattcagataacacagatctgagcgtccgcagagaaaatctgatcagagaacttgatctcaacgatcgggtagaattgagaacagaatgaaacttgaatcaatcatataacagtgtgagcagaaccaaatcgatagaaatcagagactacaactatagaaacatgttaatcgtccaaaattttagctcgattcccggagatttaaaaacagagaactcaccgttaggacctccttcataatgatgggcgcgttagcagccgccatgtttgacctcagatcgcggcgagagaatccggggccagaatcagatccacggaaaggacgggaccgtcaacggccgagcgatgcgagagaaactaaggaagatttgaaatcgcagccagatctgaggcaagtgaaggagaaaggtgatgatggtggagagagattcgtttttttctttttggaaagtgagaaatgacgaaatagcgatccaatcggagtcactcgtcgaatataaggagagaaaccaaaggagagacgacgtgctacaagtgcctgagctgtacgatgtgcttttgccaaagttacgggttcggatagtattcgggtcgagtttcaaaccgcgtaaatcgacgggtcgggttttgtcacgacacacactactttttgggaattttatgcgtatgttttgagcaatggtcaatgactcaatcatggttaaaaattaagatgaacacaaacgagaacgaagtttgaaataaattttctaaatatggagatgaaacaaaaaaaaaaaaactttttaccaaaaaaaaaaaaagatatacgaaattttctattatatcttatcaaaattagggtatgaagaccaaaatatttaaatttatgtcgatttaagtgttgcatgaaaaaatcgtataagaaatttacgtcgatttaattagtgtttagtgaagattgtattacttataattttaactcgaattaaatgatataatcaattttgatgtatataattcattctcacaagaaaattaaagagcaacaccaatatggatcactaaataagtaaacatgtatacgtagatttgaagtcattcattgatattctgcctcaatgagagattaaaagccaacactgtatttcctcattttcaaaaacaggatgctataagcgtttgtgtcaccttctaattataacaaataatcaacattggaaaacaaaagttatgaagtagaatttggttatgatctcaaaagactcagttttaaagtacatcatcaaagtcatagattcttctatataaaatctaggagttgagtttagtgtgatagagtcattggtgtaacctaaaagtttgattttgaaatagtgacagttttgatatgagtatatatgaaaaaattagttgaatgatggagtgactatcaaaatagaacattctctgaactgaatcgaacaaaaacaaaaatatctcaatgctaaaatgctaacaatccgctgaaaatcaaaagattttatgggggaaaaaaagtaacaacaagaactatagtaccaattcaacccaagaaagaaacaaacaaatcaaacatcggttcgtcaatcttttaaagatttgattctgtatctgtcaagtggatccctgaagaagagacgttcttggtacactctccatgcgtactccttgaaactaaaaggcctaaatgcccttctctcatcacttcttgctcctccatcttcttcctcctcctctgcatactcttcttctttgtcgccgtcactgatcatatccttcaatgatgaaaccatactgtccatgggaagtgtaagcatcaatgtcattgttacacactttactggaccatctttttgtcctgaacacaacactggtcgatatttcactcttttgacctctccatttctccaaacctgccaattttaagttgtttgttagctgttcaaaagttgaaaactatattgtagaaagctgttaggttttgacctaaaaaaaaaagaattgttgaattctataggacactaagtacaattgcgatgtgatgtgtataagtatttaaatatcggaaatttccaaattcttatttctttcccaatgccataaatctgtttcaaacgaaaagtgaaaacacattccccggttatgctccacaattgttgttgttgtcaacaataaatatcggaaatatccaaattcttgttctctttttgaacgatgcgttggaaaacatttattttggataatgtttaaaatacattaaaacagccagttaacggtatagtggaataaagttccattacaaaggatgataatttgataattatttaaggaagacaactaaccaattaattatagataaataaaagagatatatgtgttctgtcaattgtcaaaagcaaaagagaactaacctgagcaatgtcacccaacgtcacaagaaccgagtcaactcggggtaaaacggacacccaaccagactcggttagcaaacaatacttctgttcccttatctgatactgtaaacaaacaacaaaaggataaaatccgttggttacctccggttcatcatcaggaacaccttggttaacccacatcagagtattaaaccgggttgaatcatatccaaacccaagtgcattcgccagcatctctaccgtcttcagtccaactttctctagagtccgagtgaactcacggagcgaactcagatttaactcgctcgagtcggttgaacagtcggcgtcaaggcaaaacgatggcgtttcagcatcggcttcgtagcctagcggccatttcttcggaaacgatgattccttcttctcttcactgagctctaagagcgagagtgagtcagactcggctgcttcagcgatcccaggagggaaaagaatatcggagtcatcgttaatgagttggaaatagccgaaatcagtcacggcggagataagatcgtcccattcaagtctatctccggcggagagagataccatcggaagagaagggatggagcgacggttggggagtgaaagcaaaggagggagacggtggaaaagactggagagagcgtcaactgctgtctccgatttgctggtggtgttgagatgtgagcatgacggggtcggaggaggcgccgccgtggctccaccgtgcttgatcaaaggttggtggtggttgaggtgagctgaagagaaagccattgaaagatggatgtgactttggaagaggcagagcgtatatgtgaaaacatatgtataacttgcgtgtacgcatggaatatataaggctttactcacacgtgcgggattatgtataacctaattttctaccatcttatttgtaaaaattaaaaacaatatcaccattcaccaagtacatttatcatgttttttttctttcaatgacataagttttgcatatttattttacaattattatgttattttttccgataacacgtttttacatgcttgtttaaactagaggcggcaaatattatttatatgtgggtttgccattacagattttagcaattttgttaagaaaattgttatctaacaacatagaggaatgattaattacggaaatttgttttttggttgaaccgataaatattcttatatgtgtttattagtattttagaatcgcaaaatgaaggaatacacaaatataaccaacagacaagaaaaacatgataaaatcatctttatacaaaattgatatttgttgaattgttgatgtgtataatgaggaaaatatgatacaaactaagtaaaagatcttttgtatagtaaaaatttgggaaaacgattctcttttttgaaattaccacaaatattatattttactaaacatgtatttccatgtatgagtaacctcatctgtacgtgtatctattagaatcataaaatacttatcatgagaatgtatctgcataaatagatgctgctagctaggtgtacagagaaatactaaaacaagacaaatatatagttcgaaattcctattttggtagtggaaaattaatagaaataatattacatttatttggatgtaaataaaaataataacttaagggatttatttcgttaataagaaaaaatacctattaaataaccaatcaagctagtgtatggaatgctgtcatgatcaaagagtttgtaatatagttgttatttgcatgcgcatatatataactatataaagttcctgcactgttcccttgtaaagttttggttagttgtcgaaaatattctcaactttttcgcgtatattattcctaaatgtcccttactttggatatggttgtctatggaccatggtatcaatccagactagttgcataattatcaatcgtttctctcctttccttcttaaacgatttcttcaaacttctgatcacacaaactcggtgctgtatctagcagtgtcaatggaaagcctttgcttaactcaacaagactttcaagtaaaaagcaccaaattaagctctcgatgtcgagaaaaatactcggatccagtaatggaaatccgttggtggagttatgaattgaaacagtacttgtccggtgtcgaagtaaactgtgtgtgtgatttactcgttgcgcgacatttaaatgattaggtggttattattaacaatccataaaccaggcatcagaatcatcgacagaaacagattctcttaattgatgattattctggtctccacgttgaacatttacaaagcttgaagatagttaggaatcagaccagatgcttttccttagatcatcccaaatactccacaatgaccggatacaaaaagcttgaagataattaggatttttccttctccctaagatcgatcagaccacatgcttttccatagatcataccacatctttttcgttagataatcccacatcttttcctcccatagatcagacgacctgctgactcccatagactcccatagatcagacctcatacgcaacatctttttccttatatcagactcagaccacatccttgacgtaatcctaaaccactccttatcctttagttctggccacatcttcttccttaaatcgacgtggtctcccgtccactgaaacacacatagagaagaagatgaaataatagcaatggtcacaacaacgatgtctttttattagtatttttttttcctttctaactaacctgtcgccgatctgcctcaagttccgatacgtttcccccaaccacaatataaccttcacacacacacaaaaaaaaatagcaagctgactaatttcgactcgactcgtagaaagaatgaaagaaaatctaaagtataaaatatatctcatcgattcatacctaagcccaatcccagagccatccctggacctcgaattaaaaacatctctctcttccactctacaatcacaaatgatatcaacaaaacggtcaaaagatttttgttttccttgcgacaaatacctcgaaaccaaacctacggttgcaaatttgaacgttacctctgctactgcgggacgtatagaaattgcggcactgtaaggatttcgtcttgatcaatagatcgcacaaagaaaagaaaaaacaaaagggataatcatgaaaaaatcttcgatttacctgagcgattacggatctcagattgttgttcggtggcatgatcgaaaattagggttcgcctctgatttgtgattttcttctcctcttcaaaaaaatgggtaacattgtcgagagtaacattgacggatatctcgagagttccgtggttcaatgggcttatactattgtgccctagctgagttactctcattgtttatttcattcacaatcagtttatattcaatttaataatattaaaaaaaaaaacttgaatcccaaagtctgttccattgttactcaattaatgtcgacattcacctgaaattttatatgtacagtatgtactttgttgacaaattatccttgcactgaattacggaattgatcatgaatgtaaattgtgtgcctctagttattttctgatatgtttttttttttcattttttttttggtaaaaggttaagttttataccatttttgattttggacagaattacagagattacatgaaacagattaaaacaatctacagaagataaatacaatattactactcaaattgttttggatcgcttctaagcgttcaagaccaagttacgagatgaaacaccgattccgagctcgcaaaacttagaaatttgcgtggttgccacagagccgaagcactggaatcctcatcttagttgccacgagctaaactattcgagggccgtccacaaaacctcgatatagaagcctacaacttctccacaaaacctcgatatagaagtccacaaaaccacgagctaaactatctgatttctgatatggttttggtctgtttgatttcacacaacacaaatcaaacatcagcacaaccatagattatagtattaagtttgtttcttttcccacaacatcgaacaaaagacgaaacacaaagcaacatcacaagttcacaatcacagattataatgagcatgttcgtttagttaccgccggcggttgcgttttgccgcaggtagttgcggcaactaaacgaacataaatagctgcgtctgccgcagccgcaggtagttgcggcgacgaaacgaacaatctaattaattcattttgttcacaaaaaaaaaaaaactaattgtctgctttcttttctcgtggagtcaataaaaggacgagccaactaaacggatcctgctgtacttcctgaaagagtgaaaacactttagtttttaagaaacaaacaaaaactcataaaatctcccaaatgtttatagaaatccataccacttcgggaaaacgttctctcagatctctctccatcgttcgaagatattcgaatacctggattgtttctggtggaaacaaaaaaaaaagatcaaggatttgttttttttccaatctctaattaagaaaaaaaaaactaaaagaaattgacgaaatatctgaacattacccaacgcacagaaagcataaaatccgttcattaccgatggcacaaaattcttaaactcaacgccgacgtaaacaattctttcggctcttttcgacccttcaaaatcgaaagaagaatcacaaatcgaaaccccatgttccgagaaaattacacttgcgaattttgatagattatgatcagaagaacgttacctctgctacgacggggagaagaaaaattaccgcgtgacctcgtagagaaatttcggctctgtaaagatttcgtcttgttcaatagatcgaaaagaaaccaacacaaaaatgaaagaaaaagatataaatcttcgatttacctgagcgattatggatctcagactgttgttgagtggcatcatcggaaattagggttcgctcttcttttcttcttcgcctcttatttgtgattttcttctccccaaactgaaagaaattcatgcggaatcagagaacgttaccatggtgggatgaagatgaattgcggcactgtaaagttttagtcttgttcaatagattgcacaaagaaagtaaacaaacaacaacaaaaaaaaagactgtagaaaagaaaaaaaaaaaggataatcataacggaatctttaatttaccagcgcgattaaggacctcagattgttgttcggtgccatgatcggatattagggttcgttcgctcttcttcttctttgtctatacgcgatttgtgagaataaaaaaggtcggatcttttgagagttctgtagtttaatgggcttatactattgggccctagcccaaatgagcgacactattgttcattttgtacaaatctcttgggctaatttatttcaggctgaccaactaatttggtccaactagttgggtttggcatgtttaatttcaatttccacttggttcaatttttatgttcaccgtccatgtaacttgactagtagcatgagatttggtttgtccctattgaaacaataggtatagggtgtgaaacattgaaacgtaattgactcaaattctcaaataggtttcttcaccaaactcctcttgttttgtctaacaatcttatatagtcactaaaataatgtgtataaattttgctaccgtcatttaaaagttagtgtcatgaaacatatgcctcattatattttattattttcgttcactttatttcaaaggctttaaactatatgacatcataaccaaaacaagaattaaaacgagatcaatcaaacccgtgttgaaacctcaacttgtgtctaaattgaccgtcacaaaaaaaaatctcacatcacaccatcactaataaatttccttctcctttcaagttgtagctaacttatataagacataagcgtgcgaaccagagacagagatagaaattgagagacgataagcaaagtagaaaacacaagtttctctcacacacattatctctttctctattaccaccactcattcataacagaaacccaccaaaaaataaaaagagagacttttcactctggggagagagctcaagttctaatggcgaacttggtcttatcagaatgtggtatacgacctctccccagaatctacacaacacccagatccaatttcctctccaacaacaacaaattcagaccatcactttcttcttcttcttacaaaacatcatcatctcctctgtcttttggtctgaattcacgagatgggttcacgaggaattgggcgttgaatgtgagcacaccattaacgacaccaatatttgaggagtctccattggaggaagataataaacagagattcgatccaggtgcgcctcctccgttcaatttagctgatattagagcagctatacctaagcattgttgggttaagaatccatggaagtctttgagttatgtcgtcagagacgtcgctatcgtctttgcattggctgctggagctgcttacctcaacaattggattgtttggcctctctattggctcgctcaaggaaccatgttttgggctctctttgttcttggtcatgactggtaaacttaaaaaccctaacttttttcttgttttctcctctgctttagtctcctttagcctttgatttggtcaactttggatgattccaaagaaccaatcgaacaaattggtctttatccatatctcttcaaatagctttaggacataattggtctctcaggtaacaagctgtcattatcatcatactcatcatgttgctagtagaccaacccaattggcaactgtttgttggttttgcaactgtgtaatctgctttgaattgtgaacaaaattattgatttatgttgattacattgcagtggacatggtagtttctcaaatgatccgaagttgaacagtgtggtcggtcatcttcttcattcctcaattctggtcccataccatggctggtgagttttgctttcagaccattcttctctaaaaccacttgcagaatctcatcttcttcatgtaaaaatatgactttgcaggagaattagtcacagaactcaccaccagaaccatggacatgttgagaatgacgaatcttggcatcctgtaagtcaaaaacgtatttttttggttatcttgttttagtcctgtggtgtttcttagatgcagttttattaactgtttctgtaactgcagatgtctgagaaaatctacaatactttggacaagccgactagattctttagatttacactgcctctcgtgatgcttgcataccctttctacttggtaagaactcctctatttgttatggtaacttaagctgccacaccaagtaaaaaagctcatgtctattcttctgtttcagtgggctcgaagtccggggaaaaagggttctcattaccatccagacagtgacttgttcctccctaaagagagaaaggatgtcctcacttctactgcttgttggactgcaatggctgctctgcttgtttgtctcaacttcacaatcggtccaattcaaatgctcaaactttatggaattccttactgggtaatgcgccgctgttactcccctgtttcagcctgagcaatttgtgtattatttcctctgccttactcaaaaaggtttttatgtcaaatacagataaatgtaatgtggttggactttgtgacttacctgcatcaccatggtcatgaagataagcttccttggtaccgtggcaaggtaaaatacatattctctgcttccactgttctttgactacatcgctctttcttttaaggttaaagccaactggtgtgtaaatctcatgattctcccaaaacaggagtggagttacctgagaggaggacttacaacattggatcgtgactacggattgatcaataacatccatcatgatattggaactcatgtgatacatcatcttttcccgcagatcccacattatcatctagtagaagcagtaagtaaattgaaagtaaagactgtttgtgtttttggtgttcatgctagtttccctgactcttgctccactgttatgcagacagaagcagctaaaccagtattagggaagtattacagggagcctgataagtctggaccgttgccattacatttactggaaattctagcgaaaagtataaaagaagatcattacgtgagcgacgaaggagaagttgtatactataaagcagatccaaatctctatggagaggtcaaagtaagagcagattgaaatgaagcaggcttgagattgaagttttttctatttcagaccagctgattttttgcttactgtatcaatttattgtgtcacccaccagagagttagtatctctgaatacgatcgatcagatggaaacaacaaatttgtttgcgatactgaagctatatataccatacattgcattatcttagatacatttaaattctagcaaaaagtataaaagaagatcattacgtgagcgacgaaggagatgttgtatatatactacaaattaagcagatccaaatctctatgtttccgatactgaagctttatactaataaaatatacattgcaatatatattattttagattcatccttctgaaggtttatataccaataattttagggtataattaagaaaatagttttctacttttttcacatttaaaatcaatcatagttattcttcctaacctcactaaatttgtttgattaattaacttaaaaatgggatttaaataagtatttgttacacaatatgtagttggatagtatccacatgtgccttccaaattcagtgaaccatgtttctattattgggaagtcgtcggccttctatttagatggtcaacggaccatttactaatacaagttttgcccataatatatttaaatcgactctccttcggaatttttacatttaaattgtttaaaagctctacttgaataatccaacatacaataatcttgaactaatttttttttttaataatgtagttattagaattataaacgaaaagtgtttgattggtatgttgaatataagcgtacgcctaatttgctattgcatgacacataaataatcatcttttaacactcttgaatttttaaaaattataattgcgattctcaaatttagtcataaattcagttaactatcatcgctaagtggcataaataatgtagttagatagtcaccgtccgttgctaatacagaataaaagtcaccgtccaattacacatacgtatgtaaggaaattatacataacttaattttatagagatggaactggtgagtgctacgttttatattagtacagtactatgtctagaaatatgtctacttttgtaatattttactcaaaagagagacgattgaagaaaatagataattacaagttacagccattgttactctcttcttacaagaactatgcatacagtttatttcaccatctattgaactatataatttcatattattgcctttatagaattgtacaattccaaagagcatcctcttccttgcgtaggttatcattttgaactattaagagcactttgataactgaagtaagttagaaatcactttacatgtagtaaagtatcaataaaattagtgcaattctgagataaggaagttaaagttaaatattattttaaaatgttgaagtcgtcagattcttttagtatatatctcaaggcattaaatatttcaaggttgagtacgtcgttaagctacccaaacattctcaaacagaagaaaatcataccgatcttaatttatattgttagggttaaaacatctacgaactttcacagctaataacaaaaaaatgaactccacgtgatagctaaaattatttgtaaggaagctacaaaacttttcattgcaaaatgcttcgtagttttcacatttggaattattatcaaatacatccacgtcattttcaatcttttttaccacgtatcagaaaaaacattttttatcacgttttcttgaactaacaagcaacaaactttaatcgtatggactctattcgacttcctcatcggttacaaacttacaattacggattcctacatacgttacgattttcttcagttacttattacaaaggaagataattaatattttcgattcacgagaatagtctgaaacatgtcggtccgagtttgattttatttgtgtatgatagttaatattcacaattcatttatttatgttaatccaaatcttgttccctttctctctctctttctctccctctaaccatataaaccaactatatataacagcacttcacaacttctcatgaacaagtagaaaaaaaagagcaagactaataagccatataagagacaacatgaacaacctagacgagatcaagatcgagagcaagacctgcctcaacgatcaagaacaagaagtcaaaatagacaacatgcacatgagcgaccaagacaagaacaagatcgaaatcaagaacaagagtggcctcggcgaaaagtggccagaacccatcgtccgagtccaatctctagccgagagcaacctcactagtctccctgaccgttacatcaagccgccgtctcaacgccctcaaaccaccatcatcgaccaccaaccggaagtagctgacataaatataccgatcatagacctagacagtctattctctggcaatgaagacgacaagaagaggatatccgaggcatgccgtgaatggggattcttccaggtaagaatggcactggaagataaaaatagtcacgtttaattatttttagacatgcatttttagtatgacaaattattagtctagaaacatgtagtctataaaaatttagatttggttcggttgacatctagagttctattttcaggtaatcaaccatggcgtgaagccggagctgatggacgcagctagagaaacttggaagagcttctttaatttgcctgttgaagccaaagaagtttactcaaactccccaagaacctatgaaggatatggaagcagattgggtgtggaaaaaggagccattcttgattggaatgattattactatctccattttcttcctcttgccttgaaggatttcaacaaatggccttctttaccttccaacattaggtaattaactaagtctctaattcttatgtctttatgagttttatttgataattaattaacgaattagttttgggttccattattcctatgagttttgggaaattgagaatttatagctagtataattgtaatccgatcattttatagggaagcttgagactgaagtcagcaactagtttcagttgttctttattttctttttctatataaagaagaccaaaactatgattctggtctttaataaataatttagaaataaatcaatataaaagaaaattgattcatgtgttgttatgttgattggcaatcatgttaattacataatatatcaccatgttggttattttttctaatttacaaacaatttatagtattttaaatgtgcacttcatcaaatcaaattaacgtatttccaagaaagagttgaatattttaattgaaactaaccttcttgttaaatttatctacatttgaacaaaagattatgttttcctaaatattaatatataacagaaacattcaatatatttgtataatatgcttatttctacttcttaaaatggatatagagaaatgaatgatgagtacggtaaggaactagtgaagctaggtgggagactaatgacgatcttatcgtcaaatttggggctaagagcagaacaacttcaagaagcatttggtggagaagacgttggtgcatgtttgagggttaattattacccaaagtgccctcaaccggagcttgccctcggcctctcccctcattctgatcccggcggcatgaccatcctcttgccggacgatcaagtcgtcggccttcaggtccgtcacggtgacacgtggatcactgtcaatcctctccgccacgcttttatcgtcaatatcggcgatcaaattcaggtaacctcttaaattttttctttttttcttttcctttttacgttatatacttacatgaaaatgttgacataaaaggtaaaacactaataattgtcatgatatagttggtactgaactactgatagaggatcatattccttagttgtagttccacgttttagacatgacttagaatagcgataaaagactaaccgtttcaacttcaggccaaaattttaaataataaaactactaagtttttccaaaaaatgatttatgtcattttcgtagcgtcaagccatcaaaatgatttgattttatacaagactaaattaaatataaataaaatgcagaaatatattttgtggttttaacttttagagtaccatcgtagacaataatcatgttgcaaaagacaaattgtccgaaagtgcatgcacaaattgagtattattaacgtttaatgaagtacaatatatgttagtcatgcaatagatgcaattttcaatactaacgtatatgtttctcttgtgaaaaccggcagatactaagcaattcgaaatacaagagcgtggaacatcgagtgatagtgaattcggaaaaagaaagggtttcactagcattcttctataaccctaagagtgacattccgatccaaccaatgcaacaacttgtcacctctacgatgcctcccttgtatcctcccatgacctttgatcaatatagactcttcattagaacgcaaggtccacgtggaaaatcccacgttgagtctcatatatctcctcgttaattgatatctacttcataaaatgtctgataaatagaataattgtaagccttcttgtttatatatgcagctcaattactagtgagtgcatctatatacattaatctcttttatgtgctatatactgaaggataccgaagctatggaagcttaaagaactacctagagattccaaaagattggtgaagaatgaagatatatatacatatatattgagatcaaagtgaatcgactaaagaccgagaactatcaaacatttgtttaagttaaattactttgtagtcacccttgtagtgaattatatatgtttataattagttcttttaggttctattgtatttctattatgcaaaatcaatatccgtgatttatgttgaagcatgtctatcaataattatgcctcctctatctctatgattagtaacattaataatggagcttatcggtgctagtcttttctgtattgattgagcaactaatctattagacaatttaattttcttaagaaaaattagtattgacaaacaaaatgacggacatgtgaacgcaataaatatctagtatctaaagatggtagtatggtacacatattagattaagtaatgtatataaaaaggataattcgtgttgaccatgtattacagaatcttgttagatccgatttaagttctttatcatatatagttggggacttgggggagcttgtaagtaacgtttacgaagaagattggacggatatcactttgaatacccaaaactaagatttttgtattgtgaatttgtgatcttcatgctggctttacttgggatcgcccttcttgatattacatacatgcatgatcacatttataaattgatttgtattgattttgaatattgatcattgttattattattatcatcaacatgcattaattagcacaaaccaaaacactaggctacaaatcattatcgtcgaataaatattcagtcgatgagtttaaaatttagttaaattcagtcgattgtcaactattaacatttcatgaatttcttattgagtatgatgctaaataaatagtatttttttttttaaaaaataaaaatatttgattattgtcgcaaatttgattgaaaaatttagatttggatttagagatgatttgtgacaatcttgatggttaattataaaacttaccaattctaaggcttgcgatcacatttacttgccctttagaacttggaaaacatgttggctctttacaattccggccaaatgagaagactatcactttgacatatcacataatattggataataatattctttaaaattatgaaaaacaatatcttaagacagataaaagacctaacagaagattaaaaacatatttgttcaaaattcggttcgaagcttaaagatttgactaagtctaacatatacaaaccccatgacacaacacaattgatgacacaacccagtttttttttttttaatatgaataataataatattattcaaacagtttgctactctctccctcaacttcttgaaatccctttcttgagatctaaagagagagttttgtatgctttaaaattaagaaggttaaagaaaaaaagagaagaaaagaaaaaaagttgattaacatattgattaaaacatgagaaccagagtctctctgagagatcatcatcatcatcatcatcaattgatcagcatcactgtcttcctttctttgcacagcaaggcgggcatttatactgcttgatgctctctgctttagccggagttatcttgacgcattttccatggtaccaacgttcacaaacatcacagcaaatccagaactcctcatttgtgtaatgacctccacagcttccacagagagtgtctccatgctcgtcttcttcttcctcctcctcatagctctcttccattagtttcggtgttgagctctttgtctgcccgtctattgatctctgctaattacgatttttgatttcaaagagggaaaccagataacaaaaaagaagaaaggaggctccttattttgtgtaccttagtgccatttctggatttgcttcctgagtccgagcttggcttgttgtctttcatggctttcctaccagtcactacatcgaagagagttgggagatcgttgatcagactgaataaccgcttcctgcaaatcaaaagaataatataactccatgagtggacaacacattgaaaaaggcagctaagataagctaagaactagattagcaagcgaaagtgaggaaaaacgaaccagaatcttcatatcagtacaacacacaattgtgatgttttatctagcattatttgtttgcagctctgtcgggttaaattctctatccttggaaatgcatcttacgaaatgctttttactagtctagtgtaaataagatagaggactaaaatggtagaggatcactttagagacttgttaatggtatagtgaaactactggttgagaaaacaaagtccagtttcttgcacctttaattgaaacctatctaaatgccaacaactacttctctcttgaagaacaatgaaacagataataaccaaaataacattgttttctagaatatatgacagacagacagtaaaatgatctcattagtactaatcaaatagcaattttttttgtcaaaatttaactttcacaaaacctttgtcagtaaagttctttggattccatagttactaagatgggtgttcagatgtaacaatgaaatggtgaaattcagcacatgcgaccacagaatatccgttttcagatttcatagaatagcaaataccaggcttttaaaattagggaggataatcaagtttcaagtttagccattacaatatccaaaagagctgagaaaaagtttagacagatgaagtcatgcaacaaacaatactccatagatatgaatgacgaatagcgaaaaaaacaaaacaaaacaaaactcatttcacgcaaattcaaagacaatctcattccaaacgaactccatcatcatcacaaagtttcaatttttacttcacatgagaagagccaggatggaaaacaactatggggtttcatgtaagaacaacacagaatccattgaaatcaagtaaaagttggagacatggcttaagaaaacacaaaacaatgagaatgcagaatcaaaatgttgggaaaaagagaaatacctctcattgcgattaagacgggctccaaagtagaaagaaacagagagcaaccaacaatcactgtgaacagcaacaagagaaagccaatctttcctctgcataccatctctagcgaaattgataccaagagcaggctcaggtagctccggaggcacttcctctgctggtagattcacttcccatgactcattagggtgtccgtacaaacacaaattctccttttctataaccacaaacacccaaaaattgaaatcaaatctcaataaaacacataaaagggtatctaaaagtcgaaatctttcatacccggatcgcattgagagtaaaaatcatcaacatctggaaaaaatcacaaaaacgaacaagttaaaggacgaatccaaaggcattacgaagaaatctgggaaatttagagaaagagagagagagaggatttagacctttagtgagagcacgaagaagagcggcacgacgagcggaataatctttgaagatctcttcaacggtgcgagggttagaggaaacggctgcggcggccatatctctacagatttttataagatttatagatcagtactagttgacaaggatcgatgtctgtatcaatggtttttgagacccgatgcgttcgggcatgaagagagagagaacaatagatatggaaggagatggagagaagcagacggaacaagaaggagaagaaaaataagagagagagagaaaataaaaactttatttttatttttgggagtttggttgcgtcagcgaaaaggtttggtagtagacgaagatgcgtcgctttttaggtaaatggcattttagttgggcccttaagtgttaggttttaggcccaaataagtccaatctcctaagcgacttttttgttatcggcccaaatttagttactttgtgattttaccttcaaaacactaaacccctgtctggaggagtgttatgtgatgagtttcagacatttgttaatgtctgtaaaatgtaaacaagaaaaaaagaaattacttgaacacaaacttggtgtgtttctgtgatttaagatttagataagtataaactttaaaatggtaacgtttttcgagcgaaactgaatcagattatagcagagacacttgtaatgtaaacaatctaaagcaaagctttatcacattaagacagtgaattatgtgaagatagggtcttgttgttgttgttgtgtgtgttgaaatgtttagtcccattgttcttcccagaaataagtccattctgaagaatttactgtctgtttgccatctgctgatacaagatcataaggagagtcatctgcgaattctgttggcattgatttccagtgaagtgatggatgccattccgcttctttaaccactcttagtatctctcccgctactattttgcttccttgtgctgacaaatgaatcccgtctctgtaacaaaccagactataccgttaaaacatttcaatgaacatcgtcgatactccattcccggttatcgcatttggaaactctgagaaagtcatatatatcaaaggtctctctatatttcttcagaactcaaaaaatacttacgtgaagcaaacagttttccagtcatctgctttctgaaaagtagagaagagatcaactacttctaggccgagttcttggcacagctctacacaagcatctgaataagtcttgcagaggtcgtttgtgcggattacctcgctcaagtatgggcttgtgagagaaaaagaagcacatctatattaataaggccggagagaataaggagaaacagagagatagtgaagaaattcagggaagttacctttggttctggcgaactttagcctcatccactggaggagaactaagaaatatgattcgggtgaagtctgaaaggctctgaaacagaaaatagaggaagaaattagcacttgaaatggcttttaaacgtgactgacaggagataaataataaatctaacaattataaaggaagtataaacctgaagatgaagagcgatcttcttcatgttatcaacatattcagtaagtggtacatgaggtcctagtccagacgagtgaggcgccattgagtcgtttcctccaaaatagacaatgaccagagaaggttgtactgcagcatcctgcatccgtaacaagttgcaatttttaggcgacaaagtggaagaaaacagaagctttgaatatgatggttttctacaaagttaagctcattctaccaaattttttttataatgggtaagagaaaacagcttgagatatcaagaaaactcggatgaaacagattatgcttaaacagagacatctcccttgaaacagatgcagagtcttgtatgctaaatcaaagactatgcaactaaaatagccacttgtgtaatccttttggggtacattttgaactagtaaaataatgttcacaaagaattcttactaggtcaaatgataagcacacatcaacctatacggactaatataaagacctataaaacgctgaatctttatcataatctagtattgaagaaactaatagtctaaagagagaagaagcaaaaaaaaagggagttgaaagagtaccttggggaacacttggtcgacaacttccaaagcacgagaagagttccatccataatatcctcgcagaatgatgtcggcctatacacataacatccaaatggagaaataacattatggttcgcataatacacgcttacaatcgtaaaacaaaagacgaatttcaatgaacaaatgtatagttagggaaaataataaataatacagagtaattagaataagcgatctacttgtagaatcaacgctctagtaatctaaccaaggatgaatatcgaatccagaagccacagagagagagagattgatgaatctgacgataccttacgagcgtagacctcggaaagaatggcgccccaaccaccatggccaaagctcatctgaacaatggaagatccaaacaaaacgatctgaggccgcgcgggtccaaccattgtctccttcctaacctctctgttcctctgtttcagagctgaagacaggccgttctttctcccaccgcaaaagctaatcgtccggtgaagatgaacaaacctgagcgatcctctctctcactctttgtcgtaaggtgcgagattaaatgcatgaacgtctcgttttttcttcttgttttttgattattataacagacaaataaaagaagaaaaaaacaataaaaaaacaaacaaaacaaaaccttttgttatatcatcacgtgcattactgttatttccttttttaaggatttgtttctcatactagttttctctttttgtttctcaaagtattttttacttgaaatgctctctaccaaaaagtaaaatgatgagaaatcttttctttctttttcaatatatatgaaaatcttagtttaagaatgaatatctcttgtataagctttggaaagaaacaaagtcaagaagaatagggtactaaataaagagattgggtagagagagagatttatgagcaataattcaaatgatatggtcgttggttggtaagtaaaggaacactgaattaaaggagcaccaaatatagatcaaccatatttttgaactcttcattcaatgtctcaccttctttctttatatgttatatatatggatggttcaacaaataaccacgtgaacatgttgaagtgattacattgaacgtttagtaactagcatctatcattggtcatagtttcataagagtatatataatacagaaatgaaataaatttcattataaaaacaaaacatattgctgtcaaaactgtttttaagaccaaagactataataataatgtaactgctcaggttagtgagtgaacttagagaactcaatggagagggaaaaaaaaaaactaagaagaagaaaagaaagactaactcagcaactcaaaaatctagtgctccggatttggatgagcagctaccagatgtgccatacgatgttccactggacccgtctacaggggcttgattcagacactctagagccaagaatcttctcttcttcaagctcattgagaaggtttttgcctcaagaattacaggcacctgttccattaaacaattcagatcaaaccagtggtttaggaccatagtgaatccattttttcaacggtttctaagcaagttcatgtcattctcatcaaaagagagaaaaatggattagatggggatttctggataagttgttcagtagacattttgaatttcatcagacttttatccattgaatatgtttttttgacttggcaaaatacaaaggggttcttgcttacaggtttcagggtaataatatccctatataaattgagaattacacaatttgtaaatacctgtgtgttgatacgagcaaccttgtgtatgttgaggaatccatttatatccttgtagccagtgaggagtttctccaattccttgtcaccatctggaaaaaaaggcaaggatacttgtcaagaaacaactatgataatctatttatgaataagaaaatcagggaaagcaaacctgggattgctttgatagagagcaaggtatctgccatatgctgcagtcttttagaggaagatggggagagcagggaaggcgggaaagtaacaatggctaccgcatttgaaaccataagcatacttttcagcaatcttatgaatgagagcatgtctgattcctgtgttgatagaaacaaaatgtcaaaaaatcaacaatataatacataacgacgtgatactggtacaagcttcagctatcattaactatagagtcaagagaattttcgttagaaagcattgttgacttgatataggctaaaagttccagaaaactctcctaattaccttttcagaatactcacacaggggagagcaaaaagactggattgcgatgcggccaatagatgcaatgttactgctgtttctgtgggaaacaatacacaggttcttaagaaaaaaaggacaatctacttaacaaagccagtaaataagagaagaatttgaacaataactgactcagtaacaaactaaaacaatataaacaaactgagcttggaagtataagagagatgtaaaaagaattgagcttgagcagaatttgctgcataggtatgaccaacaaaatttattgattcgaaactagagcgagtaattgagatcaaataagaaaggatgccacacaaccttggaaattttgataaaaacgtagcacagtggtcctgagcaatggaaagatctgaagagtctaacagactgacacaatctatgggccgtccgctcagaaattgcctctccaagggctttctcatatcaaagtcattggagtaatcatctgatccagaataggtaaagaggattatgtttccaaagaatgatatctaacttactagtagctcaatttattcttgaatgatatgcaaatgaatatataaccgcactaactaaattaccaatagcattcttctggttttccaaatacttccgatactgccaagcaatcctcaagctctctccctacagaattgacaaaagtgcacactacccaatttttaactagccaggaaaaaggcaaacagaacgaaggtacagacaagaaagtagcacctgatcagggtcgggcgcagtaggcttatcctctttggatgatgcaggatgcggcaaagtaccaagaaacccttttggatcttttgaaggactagcataaagaagtggttgattgttaacaagcccctgagacatgtaagttcttaacagatccatatgatgcggtgcttcaggatcttccattaccattactaagcttcccaaaggatacccaccacctagtatccctggaaaagtaataaaatacaaaccttttagccccaaaaccagactctcttatcctcatgagacttgatgtgtaaataaaaaggagaaagctcactgtcaagatcacgaatccctgacgatataaaagctgtgccattaggaccacttttgagaccaggaatttgaggcgatgacacaactgatatgttgcgagagaagctgctactactacgaacgtttggtgcagccataaccgaattaagtaatcacacacggaactcagctccaggttcaaaatctagaaaatcccaaaccaaaaaaaaacaaacaatcaataatccgttactaaattcctctatacccacaatgaattcactactttctattcattcagacatttcatcgaacaactgtcacgcagctgaaactaaaatcgtcgactaacaatatagctaaagattcatattgatgggaaacctagaggctataaatcaaatattaccagctattttctaagtaacagaaagagaaaactcaaaggcttcgtctttgctacacgtttgtgaagatggtctcagaagtaggaatcttttctcgcaccaattcaggtgctctttgtcgtctccggcgactaacttggacgaagcagaaggaacccagaaaaggtttttgctttttagtccaatagagactcttgctcgtctagagggtttaatatgcaaaagatttttcgtaattcgcataaaaaattaagttccgtatattccaaggccatccatgactttttgtcaggtccacgttactacaaggaaaaataaaggtgaggactttatttttgtaatatcgtcaaagaacactttatatgatttttctctattttaaagtttcttcctttttcatctaaaaatcggcagaaaatcctaactccagtcttgcgtaattaatgatcgtcttcccttttatcacacactcttttattattttgctcagcaaaagatttgattttttttttgcttttatagattctgggaatagtttagagatggggagattgttcttggtgaatttggaaggcaagtcttacagttgtaagcactgcaagaccaatcttgctctctgtgatgatgtcgtctctaaggtttgaatctgagctaaatcttaatttgggttattgggatttatctcctctgatgatcatatcatcatttggggtctcttttcactaggattgtgttttgaaaattgcataaattagatgatctaatttgattgccaaaatcatatactttttgatgatatctggaatctggatgatcatggatacattaatcatgatcagttaaaaaaaggagctagaattggggatatactgactgttctgcattctcattagatcaacttatgcttcaaacattgttagactctttctcagtgatactggattgcgattagatgctaaatgcaatcgattagtctaagtgcttatggttcagacattgtaagactctttctcctcttgtaatggtgaaaagatttgcaatgtctcttagtatttgtggcatatagaagatactaaagacattcctgcattctctttccgtatagtgatataattggtggttaagctgtgttagatgctgctatatgcaatcgattagtgcttatggttcacttcaatacattggaacactctctcctcatttgatttggagtgtgtggtgtttcttgctttttttacatggctccacaatttcattttgttatgaatctcttctacttggcttcacaatgtcttagtattgtggcatatgcaagatactgacaacatcttgtttgtctatttgtttacagtcttttcagtcccgacatgggaaagcttacctcttcagtaaggtgtaagttttcttctccaagtttgatttggtgttttttgctagccagatttgaagaaacccgaagatccttttgatggataggacgagctatgcattttcatcagttatggatttgtgtgaacagagtgaatgtgtatgctggcaagaaagaagataggatgatgatgacgggaatgcatacggtggtcgatatttactgtgtcaaatgcggctcttatgttggatggaaatatgtatgaaaacatcaaaatgtttattcttattcttcctctcttggtcttctgcattcggctcttgcttgctaatctaatctaaccaattattgttgttcaggagtttgcttttgagaagaatcaaaagtacaaggaaggaaaatctgttctcgaaaggttaatacccgattaatcataaccgctgatgtatcttctttgacagagatacttgagatgatgcatttgttcatattcttgacaggtacaaggtctggggtccagatgggaacaattattgggtggctcaagaagttgaagccggagacagcgatactgatgatgcttgattctcatcattcatatctgatttgtacattccctccaactctttcatttttctttattctttttcctcattttgtaaaccatctatcttacattagaacagcttccgagaccaattgtttggtcattgctgcaactactttggacacataagttaaagatctcattatcttatttgcagcctaagtttagtttgtttccagagttctttacttcatgaacaggtacagagtttaattatactaacactctctgttttacgcggtttggttcaatttgatttgagcaaaatgggaaattaaaactttatttatccgagagaataatattatgggaaaaatgtaacaattatagattatatatttttttgggtatcatgtgatcaaaataaggagacacatgacaacactaatattgttaataatgttgcaaaatgctttcaactggcttgagttaagcacttaagcttaatgttaccggagttcatacaccattatctccgatagctcggccccaacaactttcctgtaactaaccaacatcgattcgagttgtttctgaaccactggattcttgaaccgcggtatatccttcaagtacaatttttacaaagattgagaatttgattatctggaaagaaaacaggagagagcaatgatagtgatactgatagtaccttgtatcgaagtcgaggtccattaagactgataaggatattggtaatgtcactccggtttctgctactgctagagtctgagtctgagtcttcatcagagttatacatttcatcatcatcatcatttgtatccccttgttccatgtcttcatgttcactcgtagattccaatagggtttcagaagcttgaggtgatgatgatgatgaagaaaccttactgatattggacaagacggaataaggctttttatcaagcagaggcttggctacttcgaatggaacccatctgagaacaaaatacaagagaatcagttatatgctctccacaactaacaagaatttgatcttagttttgtggtttaaggaacttactggtaccggagagggcatagaagctcagacggacgataggctgctttatatctcatcttgttacaggaatgtatgtaatagccaagatagtaatactcaagagtagagcaatgagcttggttctgttttacccaatcgatttcttgcagggctgagtagtttccaagagacaaggatgcgaaatccggatcccagaacaggtatttactagacaaacatttaggaagaatatcaatcaccccaacagcaattagacggtcatcaactcggtattgttgatggaaagaaccaaagccacaaagaggaatcttttcttcatcatcataacctgaagaaggaacttcagtgagcggagtgtctaccaaaaaccgtttgtatgaagtttctgagatgctctccggcttatcattatgcactttcatttgataccgtttgtataattcatattcctctggttcaaaactcgaccttttcaagtgcatctccagcttccgctttcttgcatgaagcttgttcgaagaagactttattgttgtagcacataggctttcttcaccttcatttctatctgaggaagtaacttgggtagctgaaaggaagttgatatgacccttggagaccttaacagaaaaaccagtaaactctccaaccttattcattgcacttaacaacttctcagaaacagcctctggtgataatctgttttcttctacgtttttgcctttctccaatgtctgtgtgtgtttcatagcagctactattggaaaagcaatgttgctggtgtataagaggtcttctgacccttcagctagtttcttccttttagcagaaaaaactttctttactgaagctttgggaatctgaacattagaaggaaactcaccactctgtatgcatttttgtaccgcattatcaatttgttcagacaaatctttcatgattggttccagttcattgtttttttctcttttagcagctccaagtgattttttcactgacactgaaacttcacgggagaaagagacatcttgatcttctgtctgctcactcggcttcgcatctagttcaccatccaaaaacctttgtacacaacatcacagaaacagttcaaccagaaattttaaaggtaagaggaaaggttttatgacataactgaaaaaaagatcttggtacagtttccatatgcatccacagagatgcatatacctttctattcttctacgcactcgctgctgctccttagaagggacaaaatcacttgctttcaagcggattgtataagaagggcaacaagtcttctccatctcaggtttgtaaagatagcagccagatcgtctccatccactgtcaagaagagcttttaaaaaaaaaaaaaaaaacccaaagaatacatcaaaaatgataactaagatcagaaaagagaatcaaaatgttgaatgaagaacttcaaatcaaagaagcaaaaattcaaactttgtgtttacacataatcaaacatattaataagaacatgagattgatgtaacaaaccttgatagtcattaacggtgagtctctctgtccataaacctgcaatggaaatcattcacattcccaaatcggaaaatctttttatttgacttatacgatagtcagatcaattcaacgacaaactatacagaagattcacgaactaataaaacgatatttcaaaggcaatgcaacgaaccgtgagaaatactaaagcgggtagaagatttacagtaaccgcaagttgatttatttcgtccacaatcagcgactatactctctccgccgatgccaccacggctgctactcgcctcgttcttcgtcttcgctttcttcgacgacatgatcggagagaatccacaacgatgagaatcatggtgagctcttcccggtgaagaagaaggagaagaagctcctgatcaacgccttgtagtttttaccaaaatgaacgacacgaagttttcttctaacattaaaaaaacgtcacgcgtgttatcttgtcaatttgggcctaattttagttaaagcccaattcccatcaaagtaaacaagagccgtcagatcacaaattaatcaaaacaaacacgaaccgttagatttagatcgccgcaaaaaccctaacttccttcatcatctttcccaaacactctccgaaacagagaacattttgagtttttatctaaagctaaatcctttgagcaacaatggtgaaggcaacaaaagcagagaagaagatagcgtatgacacaaaactatgtcagcttatcgacgaatacactcagatcttagtcgttgcggcggacaacgtcggatcgactcagcttcagaacatcaggaaaggtcttcgtggagactcagtggttctcatgggtaagaacactatgatgaaacgttccgttagaatccactccgagaactctggaaacactgcaattttgaatctgcttcccctccttcaggttaatctcagcttcttcgaaaatgttgagactttctatacgctggagacttgagattgtaaatttgcgatttttctgtgtttgtttgattagggaaacgttggtttgatcttcactaaaggtgatctcaaggaagtgagcgaggaggttgccaaatacaaggttgattagtctgtgtagctgatctatatcaacttgtgtattggattctgtaaaatgttgatactttctcaatgtggttggattgaaatggaagtcttttatgatatgaacaggttggtgctcctgctcgtgtgggtttagttgctcctattgatgtggttgttcaacctggcaacactggtcttgacccatctcaaacatcgttcttccaggtttggttaataaagcattgtaatgctcgattgtttgtttgtttgaatacaaaatgtaaagttgttgaaacatgaatgtgttgtttggaatgtttaggtgcttaacattcccactaagattaacaagggtactgttgaaattatcacccctgtggagcttatcaagcaaggtgacaaggttgggtcttctgaggctgcccttctagctaagcttggcattaggcctttctcgtatggtctagttgttcagtcggtttatgataatggatcagtcttcagtccagaggttcttgatcttactgaagatcaacttgttgaaaagtttgcttctggtatctctatggtcacttccttggctctagctgtttcttaccctacccttgcggctgcaccgcatatgttcatcaatgcctacaagaatgctttagctattgctgttgctactgactacactttccctcaagcagagaaggtcaaggaattcttaaaggttagtcattaaattgtacatcttcttcttatgtggtttttgaaacttgtagtattgttcgtgttaatgttaactctttggtgtaaatttgaaatgcaggatcccagcaagtttgttgttgctgcagcggcagtgtctgcggatgcaggtggtggtagtgctcaagctggagctgcagctaaggtagaggagaagaaagaagaatcagacgaagaagactatgagggtggtttcggtttgtttgacgaagagtaggttttgtctataaggttttacctttttttgtggtggcttatagttataatctaagtgttgcttcgtttgtagtaaggctgatctcaaatgtttttggtttcaagacaattcagattttatgtttggaaagacttttatctaccaacttcaaaagaaatgttagtttttttctttatacctgaacaaaatttattgactaaaatattagccaacgttacaacttacaactgtcaactatatgagtttaacttaatcagagacgttgacaaaaaaaaaaaaaaaaaacttaatcagagaccaaattattttggttatatggtagcgaactaggaattgtatgtgcttataacataatggcttttgctcgataactctatttatgaaggattggagtatatgtcactgactcttcattagaatacacacggctactaggatattatgatttagatagactataaaacaaaaattcttaatttgttgattttagcttgtgtttaattttaaagaaaacaatgtcacatttcaaatatgcttgccaaaaattagtcgatagatccacaagttgatctctataagatcaagaacctcggggatgaagaccgagctattattgtattttaaaagtattttgatgcagaagaaggtataaggtattacacttttccattgagcaattaaaagtttacgtttctttgttcttatgctttccttcgtagtaggctctttgccctaagatctcacgcgtgccctaatttcatgccatgaatccatcctggtttcctacttttctgtttcattttaatcctaatttatgttggatcaatatttgataaatataaatcgggcatttctaaatttgttacatacgtaaaacactgttgacaggttttgctgaatagctagctggttctgtatggttaaagaactagaaaagagtggaattaagatcgttaagaaaaagctaaggttttagagtttaactatgaaatatgtatgtatagattatgcattttcgtttttggaggctatcatcacacgtctaaaattagtccatgtgttgttagagctgtcaaattttagttattgacaacactactatacatggtattttctggaaaaatgtatataaaaaaaaaacactttttaaagtgaagctttttattccacttacgtatgttaaagtgcttagaaaaagataggaaattgtactggacatacagagaagacaaaggacaaagaagaccaatacatgtcgctactttttacaaatctctaaaccttaaattcttccccatgtatgcttgtgaacaattaataatttgaatttagatataattcttcaattgcctttcaaaatcattattcagcaaattaagtaattcttcatgttaatagtaatcgttgacatccaaatttggatatatattgataatttaaactaccaaatattccaatgaactagttcatatcgtttgctaaataatgttttctatatgcaatttcgtgatatactacaaggttatatttcaaagtttctagaagcaaacctttaaaatcaaatcaaatatgaaaattacttaggaaaaagttacacgcttgacatgaatacagtttctttttaagatttggtattagttgaaccttttgatgagagtaatggaaaaaatatggaacccattaaaaaaagaagttagataatactacaaaattcctaccacaaaagaaaagaagaagataatactacaacattgacctagtagttagagccaccatacccaaactgttgtcgtatcaaatctttagtaattgtactattctaatgatcgattcaaatattataatatagagattatagataattgtatagatattgtacgttaaaagaaatatgtatatattacatggaacatcatagggaattgaatgttagtggacattacgatgtgagaccgccttcaacttttttgactacgataagaacacaattctcgctgtctgagaagtctatatacaaatgaaacaactccaatgttatctgtatataatcaataaatcatcttgcaaaatttgatcgtcgtacttatatattaattactaaatagccaaacaaagcttaagttttgaccatcttaaaacactattattgatgaagcgcgaaacgctataatcattaaagacgccaaactcaaagtttcttttctcccttaggtttgcaactttgcatctgtgtaattttaaatttaactacaaatacatattaaagtaatcatatatgaacttaagaactatactttctcaaactaatgtgtcgttatgtttttgatagttgttctttcttataaatatactagctcaactttttgttcgaaaagttgtctcagcagttacttaaatcaagagtgttgtccattaaggctagacaacgtccataggtgtttatagaaagaaaaaaaaccttccataggtttccattgcattaacacaaacgggttgattgattgctctctcgctaattttttttaatactaatagtcatcataaacttaaaattagaaaccaaggttgctttttgaggttcccaaaacttggaacccggacttgtgtaaaaagaaagaaaaaaacaacccaaaaaactatgcaaagtagtgaatgttgtataaaagcatatatcacaacaacaaaaaagaatattgcaaaaaaacaaagtatatgatatgtttgggggcatccaatacgagagttttgatatctcaaatccacgacatgctatctttaactttttaatgtacaactcacaactgttttatcatccagtaccagtaattgatgactaattgggtgctgggtgcatgccacttttttctatatatctaacaaatctaagtcataaagtttctctaaaccgaattaaatccaaaaatctacttatttagttagactcgagagtaggtaatgagatattctgtaagaaatttgtaattaaacaaagatgttatgtaaattaactgggatgattccaagtaacataagccacgtgaactttgactttgacaccgaattgatcaattttaaaaacaagatgcagtttatatgcgagagagacaaagatatttgtaagtactgttatgttgtctagtgaagagtactttgtttataaaaacaatgtttggttttattcacattgtcattttattatttggaccattttcgtcttgcttagcatcccgtgcatgtctcatctaaatcctcactattaagacattttaacgcacactacatgaatattataagtttttcctttctatttctgctggtgtcatacgtactgttcatatagacatcaataagtttcttgtacaaacaactagactatgcaaaattataagagctggattgtatattgttaaaactgaggcatgtatgagttgtacgcttaaaagtgaaatattttttcggtcgcaggttatatactagaatgcagttagattttaactaagaaataaatttttgaccaaagcatttacagtataatgcatgatttatgttactattgctgctgtctcattttcagatttcaaaaatcagatctaattgacgtgatagcatatagaggctagtaaaacactatgagtttatacttttattgatggttaaaattatttttacatcttgcagtcatctttcaaccattcttcattctagaaggagttcttggtgacttaataaatggctttttacaaatattttggtgtaggacttatattatacatgtgtgtggcgaaccttctggttctatctattaaatgccttttctttttgtagttttttatgattcagaattcagatatttgattttgtaatattatattttcttataaaagagaataaaatttcaaatttcctgtctacacttgccgaccaacgttcctcaagtgtcacatcttctgtgcaagagagacaaaactacaatctgttcacacaatgtcatgatgtttataattaatcttatcatcttcattcatatcaaactaatatcggccatccatccgtctcaataatgtaattgcatacaatctttgtttaggacttgctagctatttcaacttattattgattacagattagatctacaatttgtaaagaacttctaacttcaaaacaaatacaaaaaaaagaaagtgaatgtaaaatttctagtgtcataatttggaatagttgaagcattgaagttacaatatcgaacgttaaaatattgacactagatagtacattaccaccaaggctttctgattattcttatcatgttatatgaatagtaagaaattacgtagaacgcaatttaagtgtgtgcgagtcaccacaaattaaaggagaacaaattcaatgtttcaatcgctggttccgatatacaacttatgcatgccatggcatgaatgcgagatccaattatatactaatatatacacacaaaaacatatgtaaatatagatggaacagaagcctagataggttaggataaagaaaacgatcaaatctgcaaagatcagtctctcccaaatccccaaaaaaaacaaagcatgcatttcgtaataaacaactcatcataaaacgacacataactcgaaaacctctcctcccgacatttcatcaattcatttctctttttattttcgaaaagatgaaaacttaataaattattatgaacaatcttactatatatatggatatatacacaggccctaaaacgtaaaacagttgaggactttacatctgaacatgtctttctccgtgaaaggtcgaagcttacgtggcaacaataacggaggaacggggacgaagtgcgggagatggaatccaacggtggagcagttgaagatattgactgatctgtttcgagccggtcttagaactccaacaactgatcagattcagaagatctctacggagctcagtttctacggcaagatagagagcaagaatgttttctattggtttcagaatcataaggctagggagaggcagaaacgtcgtaaaatctccattgattttgatcatcatcatcatcaaccatcaactagaggtagtctctttatatatatatatatatatatatatatatataattatatatcattattgttttatatgatatttctatatatttaatggataatagtgtgttattatagatgtttttgaaataagcgaagaagattgtcaagaggaagagaaggtgatagagacattacaactctttccggtgaattcatttgaagactccaactccaaggtggacaaaatgagagctagaggcaataaccagtaccgtgaatatattcgagagaccaccacgacgtcgttttctccatactcatcatgtggagctgaaatggaacatccaccgccattagatcttcgattaagctttctttaagtcattgaccacaataacaaaagaaaaaaaacagatgctttagcctttaaaatgttgttgtattttgaattatgacatattatccgatgcatggtttatgagatattttccaatgcatggtttatcaaaaagttgtctcattttgtttgatataagaatctatgttatggaatgcgtatatgtatatcatcatataactaaggttgtgatttgttaatgtatttttctatattttttaaaaataatttaagaaagacatcattaacgaatagttctatttgcatcacagaaatactagaaatatcagataaacttaaaacttaaaagatgttaaaaaaacaaacttaaaacttatctctatcaatttacaaaatttacatcatctcgaaatacttaagtcttgatcaacaaccattagaccaaaaaacttgcacaatcttatcagaataaaaccaactcttttaaacgaacagattaatatccttaatattattttacccagacccattgtcttttaggcccatataattgggctttataatacagagaaggcccaaactttggttaaacccatagtgcctagagaagattaattaaaggggttttcctggagaagaagcaaactcaagttccgtcggagataaaacggaatcaaaagttgaggttttgatcattcccggagaaagaaatttagaattactcaagcgaatttgattaacccaacaatggatgttataaagacgcaacaaatatcggcaaggacaatcgagaaagtgatcgttcacccacttgtcttgcttagtatcgtcgaccattacaatcgtgtagccaaggacacgagcaagcgcgtcgtcggcgttttgctcggaagtagctctcgtggtactgttgacgtcaccaacagctacgcaggtgccttgattttactttttcctttctctttgttctcttcgatctcacagatctctgaaagtttgttaagctcttgctaatctcataattcaatatgtttagtgttcttgtctgaaaatttacttaagtttagttttttttagcttttgggttgcaaaattgtcttacttttaaaatcgttgtgtgatacttggattcagtcaaacttggtcctagtggcctaattccatattggagtgatgagtataatatggtggttgagttaatttcttagagaatgaaacagatttcatttgattttgcacagtacattacactgtgagcatgttcataagtgcgttgttgttacttgcacatcacttgtttgactttttgtttgtggttttacagtgccttttgaggaggatgacaaagacacaagcatatggtttcttgatcacaactaccacgagtcgatgtttcacatgttcaagagaattaatggtattgctcgggaaatataatgcttaagagtatatatgtggaaagcctcttttttgactgattttcatatttgctttcagctaaggagcatattgtgggttggtacagcacaggtcctaaacttcgagagaatgatttggatgttcacgctttattcaatgggtaagaccaaaatcagtctaaaatatgagatatgatggtctaatctaatatatggtttggtggtctgtttaagttatatatgtacaaacgttttaaagcattcacaatctatctctcctctcttgctagaccttatttctgtattacttcggttttaatcttagtttctggtgttgcagctacgttccaaatccagtgttggtcattattgatgtccaacctaaagaacttggaatccccacaaaagcatactatgcggttgaggaggtgaaagaggtaaataccagccaattttctaaccattttacttgctcgactgttaagttgcatctgacatacttgatttactttctgcattagttatatccatatatctaattgccttgatccgaacttctctctctgcagaatgctacccagaaaagccaacaggtttttgtacacgtgcctacagaaattgcagctcatgaagttgaggaaattggtatgtctacatggggaaacaaatcctttgatagtttgatttccttatttcagagcataagaatgatgagggaatttttttttttgtaaatgcttccgaggaaactcaatggagtccttcttgcttcgcttacgccagttggttggtcttgaacaggtgtggaacatttgctcagggatgtaaaagacacaaccatcagtaccttggcaactgaggttattttcttcacacataacttaaacatttcatcatcaagcttcttaatgtttattcaaatcatgattgttgctctcaaaacaaaatgtgaggaacatatattgaggaaactgaaattatttgtgaactgtatttcaggtcactgcgaaacttactgctctgaagggattggatgcacgacttcgggagatccggacttaccttgaccttgtaatcgaaggaaaactcccattaaaccatgaaatcttataccatcttcaggtaacacttttaattgtagttgactagtagaatcaaactggttttcgtgtttgtttttttctcagtatccgtgactgctagtaaggattattcagctaaattgaatactcttttgcaaatctgtaggacgtattcaacttgcttcctaacttgaacgtcaacgagttggttaaagcctttgcaggtttgctttttcttccttgaagttttatgttcgcacagggtttctctcatttgaactcttttttttttcctaactttattcattttgtacagtaaaaacaaatgacatgatgctcgtaatctacctttcttcgcttatccgaagtgtaatcgccctccacagtttgatcaacaacaaggtaagatagaccatcatctctctatttctctctagtaggtgattgatttgaatttgctctatgcaaaatttgttttgttaatctgtggatgctatgtttcagttgttgaataaggaacatgaaaaagcagaggactcaaagcctgttgacatacccttaatcactgagagttaaatgcagccaaatttcgagctttgggaagatatttaatcggatgttactctgtcatttgctgcatgtgaagagggtctgtaggggaacaaaacgggtttggtctcgttccgatgatcttctattactgttgtttctacaatggttgttattagtatgtcgtttctgtctccaaagattcttttttcatcgatttttatttctagtttccctaattctgatcttcaaggcaatcaagtcatagaagataacacttaccatagtttaaaatttagaaaatcactaaattagattcgtatacatcggatgtgtagagatctagtccggggttataaaaatgttatcaaaacaaagtgtgtgaacgtgtgttcacattgatagaggaataaaggaagaagattttgtcatgaaaattgaaaactagaaaaataaaagatatattgaagggccgccaaaaaaaataaagaggtgttgaaggcaaataaaggtcacactagtggcgtaagcttcgtgaaaaggatatgatgataagcggaaattttgaaattatgaaatcatgaacgtgctttgttacgcattatgcttttaagcctactttcgaagaacattttctttcttcttgataacaaaatgaacaaagattataaattaagttttgtcgtttacataaaatatgttcatgattaggaaggatttagccttaagtcgcaaagcttctcgacgtttctccttcttattttattgttcaatcttctttatgatgtttgtactcacggtatatgtcggtatcgtaataatacatgcaacttttgatgatgaattatttgacatatttaaatacatcagttttacaaagaattatcacaattatcattttataattgttattcaacaattttctagaatatgtccttataactttgctatggaaaagatgtaacaattgtacgtaatttcactttaaattttgcatcctgttgttctcaaagttatcagcatcgcaaatcttagtcataaaatagtgtatactgtatagtatatagtaatgcacgtatgacgtaagaacattgaatgttttttgatattggtacatcagtgtaaggcatgtagatcccatcgaagcgaccagatcgaaagtgacaaaataacaaaagggtggcaaaagaaataaagccataaagttgcaagaaaggaaaaactactttgttttctttatccgaaataggactcgcaaattgcagtagcatatgtcacaattgatgatcaagattcatctaatacatatagaataagatatggaaatctattaaatccgatttctttgaatatgaactatgataaaactattgcttgattaagtgtagcctttggtccaactttgcatatgaactgtgataaataatatttcaaagttgtttcaatataaatttatcaaagttatttcaagttgcataattcaaatgtgagcagtgtttagattggggcaccaaatgattaaaaaataaaataaacatttcattcatatatgttttttatacaaatgacaccattatacgtaattctaaatacgttaatatatatatgagtcaggaggttggtgtaatagatgagaagaatgaggttctttggtcagaagtggaaagcagactcagcctctattttatactcaaatcaattcttcataccttccaccaaaactttactcaatatttaaaactatactatagccatcttcttaaataaatctaacccaaaacatgtttcacaaatttctcatttttgtgtggtgtttgatctctttgagtcttttttttttttttaatctctttaagtctttattacagtatatctttataatttgcatttaacaccataaaatagatatattgtggtaaattgttagggttatcaacttgtcataaagcacaagtactctttttcacaactataagtctataatttaatcgaaaagaaaacacagattttttttaacataacaggtatttagtagacagaaacacaaaaatacagagtaaaaacaagttcttacttttaaaccacacaatacatatataataaacttggttttgcttatatttctctaattacagtttcaaaactcagattcttaagaacgctgagtttggggattctatgttgccttaagctccggcactgaagacattttctccggcgaagttaatggcagcttcgaatgaagttggtgatggagaaaacagattttctgaagagagattctgacccataaatattactccctcctccgtatcatccttatcgataaaccctaaatcagggagaatatctctatgatcggaaaaggaacggttgagattggcattgagaagattgccggttgtgatgtcatggatacttggcctgcgtttgtccttggctccggagagctgtctctggtaatacttttgggcgtggctcgccacttgcgttggcgtctttgacaccacgaagtttctcgatatgtttctccaatctcctttaccgtacttgagaaggcctaacaagaatctcctgcaaggaacaagaaacagagcattgaaaaccctaagaaaaaaggggatgacttgcgttgcaaggaacctaggaagagtgacttatatggaaagaattctgtagagatgaaagagtgtcttaacctgtgttcttcctctgtccaagggactcctttctttcgatcttgatcagatcctctagctccactaggccgtttacgacacatgtccgtgtcaaaccccaagggagaagaagctgcaggataaccaggaatgggaacacgtcctgcttcaatatcgaaaacgtcttcttcaagcttactatattgcttcataacatcaaaaacagtctttccagggatcatggaagcaactttaaaccagcgatcaggcgagtcttcagcgtatatcgcaagagctcgttcgaacatcttgttctcttctttagtccagctaccgctactcgagctgtgtaagctcaccatctcttgaacaacgaaccggtggtcagagataggtaggtgagagaatggatgcagagtctccatacctaaaaacaaaaaaagggaagaataagtttcaactacaaacacagctcaaaaaagtccattttcttgctctatgtgtggaggaagcttaaaagatagatttgtgatataaggaaataatggaagcttttatatataaggtttaatgataatatagtaggaatcaaagaagaagaaaaacaaaagggaaggaaaaatgaagaatcgtatactgagggaatcaagaacctgatttgggtaagagatttgaagcatatataaaaccgaccctcgaatctgaaaaaagactcaaagctttgaagaatttatgagaatctgcaaaagtgagtcgtcgaaggaagacaaaaacagcaaagcaaagcccacttgagagatagagagagaggagaagactcagaagctgaagaagacccagtaaagagagagagatagtgaaggaagagtaatatacagagagagaagagtcactgtagatatgggaacagagtgaagagaaagaaaaggaaaggtttctttatttttgggaagatttggcgtatttggattggagaacagcgaatggcaccactccactcggattcttgcggttcatttttctcagaaagaaaaaaaaagttgattgatctatttgattctattatttaattctttggaatacgacaaatttgttctatcgccttttttctggtccacacggagacatactgtatggttttgttataaatataatgttttgataattacaatcaaaagcgcctgtagctcagtggatagagcgtctgtttcctaagcagaaggtcgtaggttcgacccctacctggcgcgatttatctctttttatatcttaattttgtctccttaaggaggttgtttaggattaagttcttacctggaattaagtgatgattggttttagtatctatgcgtcggtggaaaatatttttagaaagtgtgacagattcaatagctaaagctcattaaatcccactatctctccattttacttgtgatgctcacataagttttaaattactttctgcaaacagagaaaatcaaataaaagtatatcggttgtatcaactaatcaaactgtacaaggttttttaacttaagttaattttgaagaagagaaggctacatagagtcatagacgataggatacgaatgctttgaagtttatttctcatctgcaatagagacaagagtaatttcttgcgacaaaagttaaccagtaactcttataatatttcgactgtcataaaatctttcaaggaacctaataatataacatctcacactgttcaaaagataaatcaagagtgtttagcataataagacataagcagaagaagtttgggagaatatgacgatcttaggcagcaatggtaaggccaccagatcgaagtctaagcagccaagacattctcaaacttgagttcttcaacagcaagaaaatctctctgtactctttcttcacaaacaaatccaacgcaaacaagtaaagatcactaccttgctcaacctcttccatggagtccaaacactcaatgcattccccaatggtatactcgtactgcctaaccgatgcactcactggactctccttcatcagctcagtttttaacctgtggcatcccggagttacaatttcaacatcttgtaaccgagactctgcaaaaccaacactgttaaatctccggtgctgcggagtaggctgctcatcatcgtcatcattgtcatcttcatcagctccaccttcactacctgagactggctcgtttgtgtaaagtgttgataatggagttgggtcatgtagctgtggtgattcggaatgatgatcaagcactctcctgcgataagaacggaaataggcttttcctggttctataagtcctttgaagatggttgctagtttatccgcgtgaggaagttgtttccttctgaatggtgctgctctatgattctcctgttaatcaaagaaccaatgttaagctgcaaacttaatcaactaatataaaaagtcgagtagcgtttataccttcaagtagtttttccagtcttcatcagtagcaccaaatgttcgagaagttgcatcccatttcatgacaggagcaccaatcacttgacaccagatcttccacgatttcctggtgcaatcccaatgattcttgagttgcggtctggtgaagcttttaccggtattctgattgatagtctcaaggatcattttccaagtttcctttggataatgtgagtcaggtctgtttccttttaaagcctcttggaacaacaaatcaacaaacagctcatgtgaagacggtgaccagtatcctttcgactgaggactcgagaaattagaagcgctttgcgtgtcttcttcatctccagtattatcattatcttcatcacgatgcttggctattcgcttccttttgctacctgaagtaccttcatcatctaagttactatcttcaaagataagctcaagtttctcgaggaacgatggaggattcaaccgatactgcccagcctcaggattcacctgtcacaaatccaatcatgagttttattatagactcaagaaacaaccaaaatcaacacagaagataaattgtacatgtaaatagttggcccagtcttgatcattagcaccaaaagtgttagtctgaggatcccattgcatatcactgcattgaacaagtctacaccaaatcttccactgcttgatcattgtatcccagtgattcttaagctggtttctggtgaacctagcgccagttctttgtagaaaaggtttcaatatatgctgcgttccaggttgattccctaacatcttttgctcgacgcataagtccacaaatactctgtggtattctggttcccacgcagctttcggcatcataactcttcactatacgaatagataagtaaacaacaacaacataattgagaagtatgtatggactaaacacacatttgtcatcccacaattgcttttgattggaagcattacaggacttatcaattccaaatgcatagattctaacaaattcataaccaggagacaacaaaagacgagagacccagaaaaaaataaaataaagcaaagatttttgcaaggcaaattctgaaaatctattagatcattcatgtgatgaaaattaacgcaatttagagttaagctctgtacactagatcgagtactatttggccctaacattgaaagaacgaagaaaaaaacgattttgagattcgcaatttgtctagatgaaatggagaaatcaaaggtgtgaaatgtttaccagaaaaacagcggcgagagcgattctgagttgtgttgttaagagtgtggctgaaaaagccggatcgcgatttttctcgctgttatcggattttggcgtttgtgccgctcgagacggtgccttgttttctcagatcactaggcgtctcattttataccggttatatccggttatctctattggcaacttttttatttattgtgttgacaggtttcaatttgtggcaataaaagagaatttgtcttcaattctatttaatcatattgtgtgattttaagtgttaattaagaagatagtcaaaattttgagtcttattacagctttattaccatgatttgttttggtaagtttaagcatggatttttatttgggaaaaatgtcgttttatacgtgaactttcaaaaagtggccattcaatacgtgaactttgaggtcggccaaataaaacatgataaaaacgttgaccgccatttaacacaaatcaaaatgttgaccaggccaaaatccccgagacgttaactggcattaacggatccgataaccgccgttagcagacgttaattatttctgttaataccgaaaacgacgtcgttttacataaaacgaaacaacaaaatccccaattcgatttcgaaatccctaattctatcgtcatcttcttccatcttctttcaaagcttcaaagtaagagtccaggaaccctaacgaatcgagatcctctcgacatcccttcttctccgaaagtttcacatactggattttgctcttggcgagctagctaacaatgtcacgacgttcggcggttcttaatggacctaactaaaacgcccaataaattttaaacccattaatgtctatccctttgtgtcgtaagtccacgtttctccaccattctttcatcatcatcgtcaagcaatgtttattaatattatgagctacttccacaagacgtctttgttagtaaagaaatgggaagtcgtgcagtatgtatacaacgtgtggcaccaccgttttttgaagcctggcaagtgaagaagataaaaacagttggttccttttttgtgaatactagtgttaagagaagaagaagcactagtgtgagatgtagcagcatagctacatggggaagaagatgacgataaaattagggatttcgaaattgaattggggattttgttgtttcattttaaataaaacgacgtcgttttcgctattaacagaaataattaacgtctgctaacggcggttatcggatccattaatgccagttaacgtctcggggattttggcctggtcaacattttgatttgtgttaaatggcggtcaacgtttttatcatgttttatttggccgatcgcaaagtttacgtattgaatgaccactttttgaaagttcacgtataaaacgacatttttcccatttttatttgtatttgttactgtatattggttattaatttggaaaggatatctaataatatcatgattcatgaaccaaaaccagagaaagtatttctctctaggttaactataatgaatttatatgagtcatacttacaaggaaaccctaaacatgtgaactagtttggcatttcattgggcttcttatgagacaatatttgggcttttaaatttaataaagagagaactagctaaactaaagcttcaaaaatctccccgaaaactatgattttctcggtatgaggcggaggaaacgggtaaggtacacaacgtttcggaagaatgacaatagtacccccaaaccgttgctctaagccacgatatatgagcctgccatagaaaagcgtttcgccttccgtttgaccatatgcgtgaaatggtagagaaagttgacttgttgttcaagaaaactccaaaaatctgtaatacttacattgaacttgtagcgacgaatgttcgtcaaatatagcagagagagaagccacaagaagaagaattctagaacaactagccattctatctcaagaataagctactaaattaaaaatagatattcataatttaatatcttatatacactagtgaaaacaattttagggtactctccaacatattaactattacatatgctgctctcgtgtgtagcctagtcctgtcttctggtttaacgactcaaccatcatattccaagtttcctttggataatgtgagtaacctctggttttgataggtctgtttccttttaaagactcttggaacaacaaatcaacaagcagctcatgtgaagacgatgaccaatatgctttagacgcgctttgcgtatcttcatcaggatgattgcatcttcgcttctttttgctgccggaagtaccttcaaagataaactctaggtcctgagaaacgatggaggattcaaccgatactgcttagcctatggattcacctgtgacaaatccaatcaagttttattacgtatagccttttaaaaaaccaccaaaatcaacactaaacataaaccattctttgtacctgtaaatagttggcccagtctcgaatactggcaccaaacgtctttgtctgaggatcccatttcatatgtgatatgactgcattgaacaagtctacaccatatcttccactgcctgactattttatcccaatgattcttaagctggattttcgtgagcatcgtgcccgtcttttgttgaaaaggtttcaatatatgctgcaatacaggtttgtttcccaacatcttttgctccttgcataagtccacaaacactttgtggtgttcatgtccccacatggatttcgtcatcataaatatttcctatatatgtatagataagtaaagacgacaacaacaaaaaaacgtaagttcttattaaaggctctaattggtaacaccattaaaaagcgggggaaataaatataaaaaaagtctgaatctatgattggttaaaattaatctcttactggatcacgaaattgttttgtcaatctatgattccaaggggtgtctaaacacagctttaaacaattataaccaaatctatacaaaatatacatccaaacttgtctcgaaaatttaatgtcatggctaaatctagaactaggcttaaaactcatgaaacaaccaccataaaccattgcaatttgttttgattagaaaaaaaaaaaaatcatttcatagcaaatgtacttgggacaattttcacaaacgtaagcatacaaaaacatcccaggagaccacataagttataacaagtgatttttgaaaggcaaattctgaaaaaaaaatcaactagatcgagtgctcatccatgtgatgaacatttatgcaatctagagttgagttatttacactagatcgagtgttctgttatcacctgaacatgaataaaaacgattttctgaatagctatttgtctaattgagaaatcgaaatagtgtctaagtaagtgtaaacagacctctagtaaagagcgattgtgattattatttgttttctcatattattgtgatttgttttctcaggttactagagatctaggtcccattttatattggatagagcatgtatgggaaacttttctattgtgtaagaccactttcaattagttgcaagaaaaagatgatttatcttcctatcatatcatattgtgatttttgaaggttaattagtcacaatacatattttagttaggttaattacatgaatttttatcattatttggtatacaattaagtttatttgctcgcaaaatttgactattttaaattagatcataaactattatatgtgcaaaaagtgaaaaaaaaacaactgatttttgtatattacgtacacgttattaattagtttcaatgctatgaaatttttatatagcgaaaaaaatttacgtttgaaatttgaaaataaattgttgtttttatatggcatattatctcattaggttaactattatgagttttatgagtttttttactacgtttacgtgttacattgatttttctttaattaggtatacaaatgaatttgcgcgcttaactattatgtgctttgtttcaaatcagagtgaagagagaatcaaagctccgaaacccttacttctcatacattatgaatcatatacttgcaagaaaaccctaaacatatgagccagttggcagtacattgggcttcttgtgagacaatatatgggcttcttatgaatgctttaataaagagatgagttaaatgatccagtaactagctaactagaacttcaaaatctcaccgaaaacgatgattttcttttctaggtaagaggccgaccaaacgggtaagggtaaggtacaccacgtttcggaataattacaatagtactccgaaccgtctctctaaggcacgagatatgagcttgctatagaagcgttcctagtttgcccgtgagcgtaaaattgtagacaaaggttacttgttgttcaagaaactccaaaaatctgtaacacttacattatattgaacttgtcgcgacgaatcttcgtctcaataaaatatagcagagagagaagcacgaaaagaagatttctagaacaagaagtagccactctatctctagtgatcaagtcataagctaacagtttaatatcttacactattgaaatgaattttagggtactctccaacaaattcaatattgcctagctatatgtaaatataaaataaaggattttcctaaaaagatagttaagaaaaaatatagaaaagagttttccataaaaccaataaacataaaatcccaataaacacataaattgttttcttcaaaaaataaataaaaagttttaagcataattataagacacaatcataagtttaggagaataataggatcttaggcagccatggtagagccaccggataggcgtctaagcagccaagacattctcaaagttgaggtctccaacaataagaacatctctctgcactctttgttcataaacaaatccaacgcaagcatgtaaagttcactacctttctcaacctcttccatggcgttcaaacacttcatgcattctccaatggtatattcgtactccttaaccaatgcatttgatgtaatcttctccaccagctcaatattgatcctttcacatggcgcaggagttacagtttccacatcttgtgactcttcaacaccaacaccgttaaatgcccagtgatgcggagtaggctcatgattgtcattatcatcagctataccttcaattcctgcgactggtttgttgatgtcgagttctgatgatggagctcggtcatgtggtgattcgacaagatgattcaacactatgtagtggtcatcatcagctccaccttcacttcctgtgactggctcgtttaggtcgatttctgatgatgaagctgggtcatgtggtgattcgaagtgatgatccatcactatgtggtggtcatcatcagctccaccttcacttcctgggacagactcgttaatgttgagtgctgatgaaggagctgggtgttgtggtgcttcggaatgatgattcactctcttgcgataaggacgcaaagcggtctttccaggttctacatgtcctttgaagatgattgctagtttatcagcgtgaggaatatgtttcaatctgaattgttcagctctcttattttcctataagacaaaacaaagaaaacatattcaatgttattcccaagctgcaaaattataccaattgataaaaacattgaatacgtttttttaaccttggagtagttttcccagtcctccgacgtagcgccaaaggttttggtgttggcatcccacttcaacagcggagagccaacagcttgacaccagcgcctccaagcatccctggtaatattccagtggtttttgagctgctttcttgtgtagcgtagtcctgtcttctggttgaacgactcaaccatcatattccaagtttcctttgcatagtatccgttacgtctggctggcttaggtctgttttcttttaaagactctgtgaacaacaaatccacaaaaatctcatgtgaagacgatgaccaatatgctttataccgcggaatagtgatatcatcatctccagtgtaattatcatcatctccagtgtcattatcttcatctccagtatcattatctgcatcaggaattcgctttcttttgccacatgatgtaccttcttcatcacctaagtcagtaccttcaaagatcatctttaggtccttgagaaacggtggaggactcgacctaaaccgatactgcttagccttaggattcacctgtgacaaatccaatcaagttttactaattatatagcctttaaacaaacaaccaatattaacacaacataaaccattctttgtaccctaaaatagttggtccagacttcagtactcgcaccaaacttctttgtctggggatcccatttcatctcactgcattcaacaagtctacaccacgccctccacagtctcaacatggtatcccaatgattcttaagctggtctctggtgaacctagcgccagtgttttgtacaaaagattcccatatacggttcaatccaggtaatcgaaatcccaacatcttttgctcaacgcataaatccacaaatactttgtgtagttcaggttcccacatgactttctctctcgtcattgtaactccttcctatatgtatagataagtaaaaacaacgacaacaacaacaacaaaacatctgaatgcattgattctaactaattgattgcaaataactaaatcgtgttagcaagtttacttggacaataatcaatattcacaaacatttaatggcacaaaaaacacaaggtgaccataaaagacgaatcaacagataatctaaataaatataacaaatcgagtgcttgttcatgtgatgtaagaccaactagatctagtgctcgttgatgtgatgaacatatatgcaacataggattgagctctttacactagatcgagtgtttatctaattgagaaatcgaacgtgaaattaagaagaagaacaaaatcttaaaaagcaaagcaaaatgtttacaatgaatccacgcttatgatgttggcgtttgtaacgcttaagacagtgatttcttgttttctcagttcctagggactgattgtcttttctctttattgaaagtttatttatttattttattttattttgtgacaattgtttcattttgttgcaagaaaatactatttatcttcaattttattaaatgatattgtgattttataagggttaattaagaaaattgtcaaatagatatctaaattaggttacttatggtgagtttttattaatacgaagtgtacaagtaagtttacgtgcgaaatttgattgtttaaattagatacataaatggatttacgcgagagatttgaaaagataacgtattttcttatacaattgcgtttacgtgcgatacttttttttttttttttttgtaattaggtatacaaatgagtttggaagtgagattacatgttatttttttgaagtaaaaaaagttttaaaatatttttttatattttaaatattacaatttgatgttccacaatttttctcaaaaataaatgcataagaaaaattagcattaattaatcaatttatttggtctggtaatatataatttaataaattaacataattttattaaatgtaaagactattttaatcaaaacatggaaaaagttgactatctttttcttctttttttcaaaaacaaattgactatttgccaacaaaaaagttgactatctttctgtacatttggcatttagttataacttataaggtggaaatcttttgtcattattacgagtcctatttttattgacaacacagattttctcctttttaagttaaaaattggcctatgtttggctaaacttaattgttgtcttaacaaagatatttttctaaaaaaaagacagagtaaatcatggttgggtcccatttactaaaaatacagaaaaattgttaataattatatttgaagccaaaaagttcaaaatatatttttactttggaagaattgctaatttatttttaagactaacatgtgtgactgttattagtcataaaataggaaaataaaagggtcaaacgaaaacaaaaagaaaaaataaaaacaatattggaaaacttgaatggatcttttcctttttttttgtttcctccatcatttttttttttgtttcctccatcatctgagatgattcatctctatatggttttagcaacaacaacaaaataattaaaattaaatttggccaagtataaaacaaggaaataatacgactcagatgaacatttaaactagacaatttacatggttttatcaatttagcatttcaccgactctgctagaagtagtgtaattttgtaatatatcacctttgtagaaaatgaacattttaacactttctaaacataaatgaattattaattcttttggtcagtaccatagatatctcattttgaccacctaaaagaagtttaacataaactttaatcacaacctcagagttaagagagaatcaaagctctggaacccttacttctctcacacgggtacttatgggttggcctttatgattgtgtgtttggatcattagtcaaatatgctctcttattctcttgaaaagatttgaaatgtaaatgatatgacacaagacaaaacattgttgcagaagaaatatgactcttgactcgttttgtctggtctcttttaagttctcctttgttttgctccctcccttttgactctgcttcaagaatttatggcaatataaacacgttaacaacccagcctagaacctgtgactatttcaagaatctttggcaaacaatatgaacccaacctctgacttgagatcataaaccactgaactgcagaacataagttggatttacagagagtagtaagaactaaaaacaggtggaagaaaagaaaaaaagctttgtcctcttccattaattaatcagtgttgtaaatgtttgatatcacaaaactagatgtaaagaatcgacaacaaaaagaagaagctaaatcgaagttactcttagaacaacctacgacgaaagcagtagaggatccgattaacaaaaaaggaacaaaagaagggaaaaaaaatcacttatttgtgaagtcctctaaatgattacttttggtactctcatcctttggtattgctttcacgcatcctttgcttttggtccaaagatgctgtgtaaggtttttcagttcacagtggaggaaacttgcctgtgtttgtttacctgagggactgaacaaatataacgaatgcttcttttttatttgcttcgtttcttggcttcgctgtagaggataactccacagacagtgagcgagtaacctaacattccagtcactgagacaggattcctgaatatcaggattgataccaccactgctactgcacctttggcgtttcctagcacctgtcatagagaagtgataagacatggtcagatgcagaatggctttagatgatcgacgtgatgtatagaaagaagagatgtgtttttacctggagagtcagagcgctggtgtgtttcgtgactaagaaattggtcaagttcacaaaataagctagcgccgaattgaatagcagataccaaacgattctaaaatcgtctctggcaagtgcaattgtaatgccaacaacatttttttccatgataagtgtagcaggaaggaggaacacaacagctatgggagccatgtaaaggaggaggttcatggaatttagcttctcccttcaaacaaatccaataaatattttcagcagcactctaaaatcacagacttttgaaggataaaactttggctgataagaatcttacccttctgaagaaagcaaaattccttgaagaactgatttaagtgctcttgcagctgtagctgcaatgcacataatgaatccaaacaggtggaaacttggctcactctgacgatatgcgaaaatttgaagaaaatcaaatatagaaccaaagtcaatgtagaaaaaaaggatgctctaaatgtaaaaaagatccaacaggattcacactatgcacgcataaaagaacaacttctagtctaatttgagcagcatataaactacatatcatgaagtgatcaagctcaggcaaatcccaaggatgtttctaaggtataatacaccatcgtatccttgttccataaatgttacctacgatttctatcatcatccaaaatgaatcaaacaaagcagattcagctcataatcttctattcctacatcacattcccatctccctaaagctacacatttcatcagctatgaacaaacacatttcttcaacatacaaaaagcaaagagcagattttgaagttaaaaggcaattaccccactggcaatgacaacaccggtaacaacagggacgagagtgaagtaagtcaaccaagcttctctcttaaaagtaatcagataagcaaacacggcggtgaaaaacggcgtcgtagcaccaatcgcttgattaaacgatacaggaagaaaccgaagagagatattcccaaaaaccaccgacacacagaaaacgagacttaacgcagcgatcttaagaaactgaactcgagatcggatcgtttgcatcggaaccatcttcatccaagcaatagcaacgtagctgagaagagaacaagccgtcatgtgacacatggtgaggaagatcggatacttgaatccatagttgcttaacaagtacttgttcagcaataaaactccgatgttcgatgaataccatgacgctacgagtccgattgtgaaaaaccggccattggccgctatcttcatcttcttctaacaaaaaaaaaaacgatctgattgattctatttgagaataacccaaaccctaacacaaaatttccacgaatttgggggaaagtttcgaatctgtctgcttttgaaggggaatgagagatcttcttcggacagagattattccatggatcgaatcgagaataggtcacatagacgacaaagagaagaatggtggaatccagaaagagagaaactgtgatcggagaagaagatgaagaagcaaaggtcaatgagagatctttggcttaagctctctctttttaaaaatgttactaatttttattcagttcatgagatttaatgcgttttgtgtatgtatatatttttataagattacagtttccgtgatttttaattcttcaataaatgcatttggtatcactttgttaatttaattataaaggactttgattgattgattgattcctcgaataataatcaaagtgtacagatttggaatgtgtgaacgaaggaaaggaacgtctgacttattatcagttttgaccttcttcgctttactttcttcttcgcgaaatttcggttcggtttggtttaatttggttaaggttttgaatttacaagaacaaaattgatattagttgtattattcggtttagttttctaacagaaacgtaattttaaatttcgaagattcgtgaacaaagcaagcattattcgcaaccatgacacaactacgttctgtagattttaattagtaatagaagatggtatacctaccaataatctatagtaagtaacagacacgtcgttgaaatgtcaaattgttcgatttttttttcatgaatgattatcacaattgctacaactattcaaatatttgttctatttataaatttagtaaaatgaaaaactggagcgttacaacttacaacttcacgactttgtggtcttacaataatccattactcaaccatcgatgctgatggtgggtctcttccacgcgttttcttactaaaaaagtgcatcactttctttaagattattaaaattttagcataaataaacaacgtctacttaattgggactttgtgtcaaatgttcgttccataatcaccttcggatagaaatctaacaaagaccctctaactaagtttagtggtttgttatactattttgttgcatgacattccccactttttaaattcgcataccaaatattgttgacagaggcaaacaaaaaaaaacaatggggacggttttaatttgtcaacaatcgaaaacaagcaaccacacaaatcactaatcagctttaagctagctcttattaaaccacacagttttattctttaaaacgagcaagatccgagaaaaacataggtgaattcagataaactcttgaaacgtagaacatagttattgaaagaggatgaaatgagcttgacgtgggaaattaaatagctatcattcagtgggaaaaaggattgaaattgttaacgaccttcttagcctggtcctgaaacgacacatatgacaccgtcccatcctttccagtgagaactttatacttatccttcctcgtcaagttagtgcactcgaaccctaacgtgtccgccaagattctctgaacatggttcgccacatcatacggctttttcccggataaacacgtggcctccactggaagcttgttcaagaacgtaacctcgtaacccggtctggggttcatgaaaaagaatatcatgtccatacagttccagcctctcacagtgttcgcatggaagaatccaaccctatagtttactgccacgggcacgatcatgtccgttaactccgcaaaaagcgcgctaaatcttaacaaaaacggttgacgacaagttgatccttcgggacaaatcactaggtctagcttgatcgtcttcgcatcaacatctcggattctttgtattcgcacgatatatgggaatgggagagaagagtttggaaaaccgtgaaagggagtatacaacagcaatgaccctgcgtcccaacaccgtggatattacaatagggtccattagggttctatgattacatacaaagagaacgccggattttacggcttctcgtggctgagaaggctttcccttgacgatgatttggcagcccaatatactcatggcatgagttctgatccacattgggaggatgaacccggaaaggatccggatgggagaaagaaccattccaaatgggatccaaatgaggatgaggagagctgtggctggtgttggccgcttcacgagtcgtccgtcgttgaaaatcaccggaactggctgcaactcaatctttcggctatgcataaccagtgcgtgaatctgttttaatgtgtaaaataggtccaaaatagtggtcactaaatgatttagtaagaaaggaatgggatttttggagaagttattagaatgatgtttccatgttactagtagcaagtgtattagtttgttataacgctattattgtattatatcatatgagttgtagaaaaaaaaaaaaaaaaaaaaaaagtaaataccactgaaaacgttatttaaattatgcaatttacgttagctcacataacgataagaaagtcgtagaagctgtcttagaggcttttccaagacctagatgaggcctccggtcatcaaataatttactaacacggttcaaaatagacttgtccatattggtttcacgtataaaaccggtgacaaaaccgagtttattcacgttcagctccgtaccgatgacattatcggctctaagatgctccttggcgacctgatctctaccataacccgaggcatccccgtcaccacgacccttttcttacacgagctgaaaaccctccacgtgtccatgcttacgtcatccatgtagaacttcggcaggacggttctagccactgcttcgatctctccttcgcaaagaccaaccgtggctatgaaaatcatgagcttgagagcagcgttgttgtagcggagaacgtcaaggagtttggtgatgggccagtgaaacagcatgacggtgaaacgaattagaccagatgcgtcaaaggcaaggagcacgaagtaagagaatgaatccttgtttttcagtatataagccgaggccatcttcttcattgtggatcaatttgattatgcttctctctgtaatctttgttagagacaaaaaattaggtgggaattgaatgaaagcttaagagtaaagaagcaatcagtgtgatgataaagactacgttgtttccaaagagaagcatatgcaattggttgataagtgtggaaccaaaagaagatctgcataaaccaaggatctaaaatatattgcttccggagcctggcggcgtaatttgagatttaatgatcaacatttgttttttactaaaataagtatatagtaagtgattcttcgaataaccataaagtcgtgaaacaatcatgttcttttcgcttatagttatcatgtaagattcctacactaaggaaaccaaaaataggtaaagtccaaaaccacacccagtaaaatccaagaagaattgaggttaaacaaataactaagtgttttctcttattagttggaccccgtgagagtcttttaagtttgaattgaacctaagttaatgacaggccttacccgtcagaaagaataacaccagacaacacagtaacgaagagagccccttcgttatataccgaatgataggagaaaaaactgagacagaaccagccaaaacgagaaatttcaacctctttggattcattgttcttcaagccaagtcacatcatagctgtcgttcaaggtaagggtctcgaggagaatttgatccgagatactctgaaacatctgcgacatatgttttcagcttcgatgtggttcgtgtgagccacccggcgtttgcctgctccatctcttcctccattttcttcttctcttcttcttccaacatactgatccttctctgacccatgtacgtcttcacagcttcaacaccttccttcaccacttcctcgggtgggacgacgagcgggttctgatccacattcagtttggtcaggctatcaagtgtgccaaaagtgtcagggagggcatggatttggttgttactcaagtcgagttcttggaggcttatgagttcgccgaatgagaatgggagatccttgagatcactgaagttgctgcttaggtttaagtactcgagatttgtgagcaacacgaaagaatcaggaaggccgttaagttcgttgaagtgggcgtcgaggtgttttagggatctcatttcgcctatactggtcgggaaggatcggatcttgttatactgaaccaggagcttttctagattcactagctcaggaccgatgttggtcggtaagtaggtgagacggttgaagctcacgtccaagataaccaacgacctacaattttgatataagaagtggtgaaaattgattcacaaatcaaacttgacaaagtggagttgttatatgatacgtacccacagcggcagatggagtcaggcaaggatgtgagcttgttagtcgaaacattcaggatttttagtttggacagtaaaccgatggaatcaggtaatgtctccagagaattcgtggagacatccagttcaacaagactatgcaatccagcaattgaatcaggaatcgactgttgcacataaacctcagtcaggtaagacaagtgacactcagcaactgaacttttcactaatcactaagaaatccagaaatactaattcagctcgagccatagattctacctcagaactatcaagaaaagagctagcatggacatcagcagcaatcgctggcaaaagccaaaatgatataccacagcgaatatttaacatgtagcttctctttcactaactaactaactggacacagtttttaggcgttctaagactcctattcctttgaagattttatacaacaggcaatatcaaagatgcagaaccaaaacaagcaaacacgcacatacataccaggatctctacatatactaccggccaaaatctaagatgcaaaacaaaacaagcacacacataccggaattacttcgaatcacattgtacacacatactagacgtccttatgcagaatcacttagaatcacattaaaaaaggcattgttcttgttcatcaccaagataacaaaaaaagagaacaagtaacattgtgatccctctttattatctaagggattactcatcaaccagagtatagtgcccaaaaatgttacctttaagctacactaacgagtactaaattctcaaatcctaaaccaaagttccatccttttaacacagacaagcacagaagagattcagaccccaccagagaacacaaatcagcttaattccattcgggagagtggatcaaaataagtaacaatgcagcaaattttttattttgaatttgtattggaactaacctcaagcttattgttggagagattaagaacaagcaacccttgaatcctcccaaaagcttcaggtagcaacctcagtttcctcccagacaaatcaacacgatccaccggattagcagaagcatgctgcaatatcccaacaacctcctcattaacctccacagccgcaacattctcctcatcctccgccgcattcttctcagcagattcataaatcctaacaagcctctcctctgcttctttcaaaagcttctcatacgaagcatgaacctcatcaagcttcaaaatcgactcacaccaagtcttctcctgatccatctcttgtctcctcttctcatctttcgccgccgcatcggttaacgcgatatcctcgaacgattcagataagaacgattcgatttccgagagtttagcacgagccttatcgactgattcgtgatctggtctaggtcctagggttcgaaggatagatcgagtctcggcgacgtcagagatcgcacttgtcattgaagcgagaacatctggttgtgttaagtgaggcatctgagtgacgatctcaatcgatgatgatgatgatgatggtggtggttgttcgatgtcgaagggaggaacggaggaggaaggggatttggcggtgaaagaagggagacgagccaagacataagagaggacagggaaattcttagggttaggttctgccgccattgttttcgttaagcttcggagatttggaatctgaatctggaaattgatgaagatgatgattgatccaggctttgttgcgtctctccacgttctctgttagtgttcgccttctctgcgttttctctgatgtcaagttgacacgtgtaagcttgtgttgctgagtataaatagtaatgagttatctcttaattaagataatttcatatcttttctgagtaaatctacaatatacagttaagatatctttttttttacttaatattacttcactttaaattcggttaaacataaaccatgtattttttatcttgaaattttaatgtaaactaaattttaaaaaaacttttgaagtaagaaatttatttccgtattataataatttaaattaaataaacaatttacttggttaaatatttaagaaaaagcatatcagcttgattttaattttattattcctatatcaaaaaaactcatgaaagaatttatgagttcaatcaaatttaatgagtagacaaataatagtatactcttttttttaataattctgaaaattacagacttttaatctattcttatttaataatgtttttccatctgaaaagatgattgaactcgggatacaaaaaaaaaccgacccatttgtactactacttggccattacccatttggttatgttctcataaaaaaaatgtttttaggatttgaagacgaagatttgattgcctagctagaaagtattcagaaaaaagtgtcgaatgctctggaatatgttgtaatgggcatagataaaattttggatcttcaaaatgaaatagtttctataactttttatagtttaatggtttgtgatcaacagttgtgttacacatctaaactcgtttattttcagcaaaaaaaatctaaactcgtttattacatgttgtaacccaaaaaaataaaaaaatgaaaaaccgtcgcaagtgatatcgacctttcgcctactttcgcactcatgttggtgtcttgacaaaacccactgtggacgcatataaccaccggaggagtacaggccaaaatttctattattaatatgagcttagttagataatccaagtctagtaaaagatttgaataaaagcaagttgtgtccacaaaactaaaataaaccaaatccaaagtcagtcacatttggaattatgttgtaatgacagtcactgctttgtcatcatctcaccttttaaggcattgaccttttgtttttgttcgacaaaaaccattttcgcattcatcactttcgaataaaattatataacagtctaagtaacaaactcatattaggataccaatttgaatttgacttttattggatatcgtagctaacgaaaaaaattcttaatcattagacgattaagattatcgataactcaaatgtttttttttctaagttatggtcgaaatattggtatacatcattcaattttaaagcataactagctagtgataatgactactacatacgccataagatgaaccagaatcctatgataatgatatatccaaaaaaaaactgaattcaaattgttgaattatctgagtttaactttttatcacacacaaacaacaactgaaacatatggaacaagaaaaagaacactttattttcttgaaaactctgtaaacttaagaattagtttatttaaaaattaaaccaaagaagcgttttaaatgaactaaaatccacatttatacagctcaatctgtacttctttttttctaaatttagcaacagaaaaataccaaattgaacaccttcacatataaaataaaagataaacatgaattgttttgtaagaaatttgataaccccacatgcatttggtcattatttaacaacaaaaagtagactcaattttaatagtatatctttagatcgaatcagcataatgacgtatctttctgacgtatagcttttgtcttggttgttctttacacatctataataaccaaacctgtgtgaacaagacctaaaacagagagaaattcacaacaaaaatggagactagagaaacaaaaccagtgatctttctcttccctttccctttacaaggtcacttaaacccaatgtttcagctcgccaacatcttcttcaacagaggcttctccatcactgtgatccacactgagttcaactctccaaactcttccaatttccctcatttcactttcgtatccatccccgatagcttgtctgaacctgaatcctatcccgatgtcatcgagattctccatgacctcaattccaagtgtgttgctccttttggtgattgcttaaagaagcttatatctgaagaaccaacagcagcttgtgtgattgttgacgctctttggtacttcactcacgatttaaccgagaaattcaatttcccgaggattgttctccgaaccgttaacctctcagctttcgtcgctttctcaaagtttcatgttttacgagagaaagggtatctttctttacaaggtacacttttgttgacttttatatatctctagtttgcttcatctttgttgacttttcttgctcttctccatatggcagagactaaggcagactcaccggttccggagcttccgtatcttagaatgaaggatcttccatggttccagacagaagatccaagatcaggggataagttacagataggtgtgatgaagtcactaaagtcttcctcaggaatcatattcaacgccattgaagatcttgaaacagatcagcttgatgaagcccgcatagaattcccagttccactcttctgtattggaccctttcacaggtacgtttcagcttcatccagtagcttacttgcacacgacatgacttgtctctcctggttagacaagcaagcaacaaattccgtaatctacgcaagtcttggaagcattgcttcgatcgatgaatctgaattcttggagattgcttggggtctaagaaacagcaaccaaccttttctatgggtggttagacccggtttaatccacgggaaagaatggatcgagattctgcctaaagggttcatcgaaaatctcgagggccggggtaaaatagtgaaatgggcacctcagcctgaagttttagctcaccgtgcaacaggcggattcttaacacattgtggatggaactcaacacttgagggcatatgtgaagctataccaatgatatgcagaccatcttttggggaccagagggtgaatgctagatacattaacgatgtttggaagatcggattgcatttggaaaacaaggtagagagactagtgatcgaaaacgcggttagaacactaatgacgagctcggaaggggaagagatccgcaagaggattatgcccatgaaggaaactgttgaacaatgccttaagcttggaggttcatcatttcggaatctcgaaaacttaattgcttatatattgtctttctaatgcggtgttcttcttcttctccacatccaaatttgctttcctttgatttaatctgcattcccataatcagacacattttatcattcaaaaactttaccatgtatatttgaattatcagtgatgatgaatttgtttcaacttgaggttttatttgcccaactaaaatctattgggccataatgtcgagaagcttaattacccacatattaaacccaattaacgtcgtaatcttatgatcctaccaaatttaaaatggccattaatatagggttcattaatatagcttatctgtatatataaatcgataaaattgaaaaagttaagcaaaaccctaagtttgctaagatgagcatgacgcttagtcttcagcgacacgcaaagagaatcctcgcttacagtaacaggcctcgattcttctgctcctacagaaacggaacgctatcgacgaaccaaactctgcatggtcgaatcgaagctgctttagatcagaaagcagaaatcacagcggtgcttgagcaatagcgacatcaacaaggttatcgattgaacccttcgttggtgagaggagtcttcgtgaagctctgcacttcccagcgacttcaccaagccctagaggtatcagactggatgattgaacataagatctgctgtctcgtccctgaagatttctcagctcgatttcaattgattgaaaacgttttaggtttggaagaagcagagaagtacttcgagagcatcccggagaatctgagaggtgaatctctctacactgctctgttaagaagttacgccaaacgatcggaaaaaaaatatcttgatagagcgagccgaattcatattcaagaagatgagagaattaggtttgctcgggagactgtcaccgtacagttcgatgatttcactctacagctctttcggaacccgagataaggtcgacgagagtctgcgagagatgaaggagagcaacattgatctcgatcgtctcaccgtgaacaaagctttgcgagtgtacgctgctgcatctgatgtggcagcaatggagaggtttctggctgattgggaaggaactgtgaagcttgagtgggtcacaatgcttgacttggcaaaggcttatctgaataatggttctaagggaaaggcgagagagatgcttcgttgaacagaggaattgaatgatccaaagtcctatgaaggactcataaggctttatggtgaagcaggggagagggatgatgtgtaccgtatatgggacttgtacaagagcacaaaagagaaggacaatgaagggtttcacgctttgattggttctctcttgaagcttgatgatatcaacggagcagaggagatatactaatgagtggcagtgctcgcgtcttgagttcgatgttcgaatgccaattatgttagtgtctgcttatcgtgaaaaaggaatggtggagaaggcagagaaactgatgaccagatggggactaaaatatcggttagatcagtgactccggtgttggaagaatgggagaaaaagggtaatgaagtgaagccagtggatgcccaaagcacttgaggcatcaacatggatgtgtgaaaaaaggtgtttaatatatttgcacaagattatgcagcaaggcttgtattggagataaggccatgaagcttgtattggagatgaaggagaacaaaattgagcctgatagtgtcacgataaacaacgttttgagagtaaacgcttatggattagcgctagagtcgatggagaagtttaagagtaaatgggatggtgatggaaaaaccaagcttgatgcaatggcagctgcttacgagagagccgggctactactaaaggcgatagagatacaaaggagtaaaaaagaagtgtaccgtctatggaatgagtacaagaataaggcaaatgatgggattgcaagagaatagagatgtgattacctctttttggaatgaaggatatcaaagtgtgattagctctttgttgaagcttgacgatgtacaaggagcagaagctatatggagaatactgggatcaatcaaaaggattagagttggtggatgctcgaataccgggtttgctaatctctcgttattgcgagaaaggtgatgaaatgaagatgagggaagtgattgatgttgagagtacttttgctcttgcattattacactagaagccattgcttcaaatacagagcatgcatggtagagaaaacagagaatgaaaaagtggaaaatttcttgttactgcttcaatcacttaagaattttatgccatctttgttttctttttttttttgtttattgggtttagaattgttttttaagggaaatttgtgtttttattctatttgattggaaacagagttatttctataaacaggtttattttacatttaatattgtgttgcatgtttgcatttccattttatatgggatatgctaagataatgtttcattttattctgcatatttcgtttaaagtaacttttcagaaattttacagctctgttatttaaattctagatataagatggatctaaatatagaatgtttctttgaatgtgcacacagccagcctggaaacaggtattagaataaaatttaatgaagtaaacgggagtataaaatagttgtacatattcctctgttataacctgtatcttaatccatcagtatatgatattttttgaatgtgcaacgtgcacagggtggaaacagctcttgggaacaaatttattacacaagtaaacgatgaccaagtttaaatattgtatattttggtcattcttaataatataaacagcaagttggtcatttgtgtattaggagaaatgggatgcttgctaattaattaatattaactcccttatttgcttgcatatttactcaactccgagagaagtgggagagaagaaactatcaagaacacacattgatcataaccaaagcagccaaaaaatggatggaggtaacccaagatgtccgttatctcatccaactaaccctcacaccctctctaaatccggccaaatcaccaagtttggttgttttacatgcggtaaaaaagcaccgctcagcaaaagagaccgtcgcttctcttactactgcatcacctgtgatgtgagtttccacaaaggatgtcacatttttccgaggaagttaacacatccttatcaccttcagcaccctcttactttcacctttccggattatgaaagcgggatcacatccgacagcttcgattatgaaacctatcgcactgcagtaaagtgtcactctcaattcatcatcacatatagtcttaagaagcctggatctatagaatgctcatggtgcggcaaaaatatcgaagacgattgtttctatcgttgttctatatgtaacttctatttggatctctcttgctcccaaagtattccacttctcctcgttgcaaacccaaagagtcatcagcatccactcgtgttctacaggcgaccactcttgactccatgtgatgcgtgtgggttagtcaatgtgttggatccaagctatgcttgttttcaatgtaattatatggtccatcaaagttgcatagacttacctcgagtcataaagatcacgcgtcatcggcatcgtctttctcacattccttgcgtccaatctccggtttcaccatgtggggtatgctatcagaaagttgaaaacaagtacggcctatattcttgcaaccgctacgaagatcactcttatgtagtgcattcgaaatgtgccacgcatgaaaatatatgggacgggaaagaactcgaatgggaacctgaggaacccgaaaacattgaagatatcctcccatttaagaaggttggtactgatatgataaagtatttctcgcatgaacataatctgaagctcgagaagtatgatgctgttcgtgatgcagagaagctatgtcaagcatgcgtctgtcctatcaactctcgtgatttctacaattgcatccactgtgatttttttctccacgaggtatgtgctggtcttcttcgaaaattggatcatgcgttgcacaaacacactcttatcctagacccatatcctcgagacagttattatctcttggactgtcccatttgttccagaggatccactggtttcaggtacatatgttccataagtaattgtaattcccatcgaattggcatagatattcgatgtattttagttccagatcatttcactcacgagagtcatgaacatcctctatttatctccacatccttcaaagcagaaattcgttgccagggttgtcagaaggagtgcatgcagtcttacctgcagtgtactatatgcatatttatcatgtgttataaatgcgctacaattccaacggaagttagctacaaacacgacaagcatcctctttctctatgctatggagagaaagcagatgatacgtactggtgtgaactatgtgagaaagaggttaatccaaggaattggttctacacatgcaacatatgttgtatcactatccaccttcattgcatcttcggatcttctagttatatgaagcctggttccatatttgattacaactattccaaattggaagttcttcgcaacagtaacagcactcgaccgcaatgcacccgatgtggtgatcgttgtccaggttacatctacttcaaacgcaaacgcgataaacaccctgtaacgttttcctgttctgtgcaatgtttagagggaggatgatggtgttgtagacataatgaactttctttgtgtttattaaagttgtttgtttatatctttgtgtgtgtgtgtctttttttcaaagaaatccggaaacttgtatcgccaccacttctaaagaatgaaatatctttgtatttgatgatttatccatcccttttttcattcgatataatttcttaagcccaaaaaagtgaacagcttgacaacgtataaagaaaaacgaacagcctgactcacataaacaaaccatcttctctaacgtaagagcgtcttaagaaaaccgagacaccgcatgcacacatatacttaccctacttagctctttgttgaaacttgacgatgtacaaggagcagaagctatatatggagagtacttggatcaatcagaaggagtagagttggatgctgaaatgccgggtttgctaatctctcgttattgcgagaaaggtgatgaaatgaagatgagggaagtgatgaattcaagtagggagaagctcaagcagatggagaccaccaagattcagcgttggcgccttggctcgtgctctgtatgagtgtatggcttaattcttgttactgcttcaatcacttaataatttatttattttggtttattggggttggaattttttttagggggtatttttgttttaattcttacagtagttcttagttttaaaagcttacttaggagaagacactcatgcagagcacgtttatctccgatcaaaccagggttggacttgcataaatgttttcatatataacacaccaaaattttatgatatatcattgcatattatatttatgataaaaatcaacattatattatactacttttatgtaccactctcatataatagtataaaataatatgatatttaataataaataaaaattacaactaaatatttgttttttccggcattacagctaaatatatttaaatttttcaaagtataattaatttgaaaattttctatacaagaatttcatttttaattagggctaaacccttaccagaggtagcccatataaatcggaatgggtgaatgcaaacttaagccgattatctttatttttttttattttttttatttttttctcaatgctggaggatttaatatcatcatataaaacattcttttagaaagaaaaaaaaaatcatcagaaggtttaactatcatcatcggacatgagcatgaggcataatcttcagcgacacgcaaagcgaatcctcgcttacagtaacaggcctcgatttttctgctcctacaccaacgtaacactatcgtctccggcgacgaaccaaactctgcagagtcggatcgaagcggcttcacatcagaaagcagaaatcacaacggtgcttgagcaatggctacagcaacaacaacaacaggggaagcagttaaacccttcgttattaagaggaatcgtcgagaagctcagaagttctaaccgacctcgccaagccctagaggtatcagactggatggtcgaacaaaagatgtacaatctcccggaagacttctcagctagatttcatctgactgagaaggttttaaatttggaagaagcagagaagttctttgagagcatcccggagaatatgagattcgagtcaatgtacaattctctattaagaagttacgcaagacaatccggagaaaaagctctgaagaaagccgaatctgttttcaagaagatgaagaagctagggttgctcttgagaccttcaccgtacaactcgatgacatcactctatagctctctcggaaacagagataaagtcgatgagattcttcgagagatgaaggagaacaacgttgagctcgataatgtcaccgtgaacaacgctttgcgagtatacgctgctgtatctgatgtagcgacaatggacaagtttctagctgataggaaagagattacaaggcttgatgggctcacaatgcttgcgatggcaaaggcttatgtgagagacggttctaaacaaaaggctaggaggatgcttcatgaaacagaggaatgattgggtcatgactataaggaactcatgagcctatatggtgaagcaggagagatagaagatgttcaccgtgtatgggacaagtacaaggcgacaagacagaaggataatgaagaatttcgaactttgattggttctctcttgaagcttggtgataccaaaggagcagagaagatatactacaatgagtgggagtgctccggtcttgagtttgataaccgaatccccgatatgttggtgtcgggttatcgcgaaaagggaatggtgatgaaggcagataaactggtgaacaagactttgtggatcagaggattggctacaccaatcactctgttgctggaagaaatggataaaaaggggaataaagtgagtccgccgggcttgagagacctcatcaagaatctacgtgattcaaatcagttgtccaaagcacttgaggcatcaacatggatgtgtcaaaaaaaggtgtttaatctcttttcagaagattatgcaacaaggcttcatctgactgagaaagtgttgggtttggaggaagcagagaactttttcgaaagcagcatcccggagaatatgaaagattactctgtctacgatacactcttaagctgttatgcaagatctagcaacactcaaagtaaagctgaagccgttttcgagaagatgagagagctaggtttacaatccaaactttccccattcaactcgttgatatctctctacagtgggcaagggaaactaagtgtggtcaatatacttctatgtgatatgaagcataagaatatagagcctgatattgtcacgaggaacaacgttttgagagcaaacgcatacatattggccatagactcgatggagaaagtataagagagagtgggatggttttgagagcaaacgcatacatacgtgatcatggtgattataacgtgatatcgtcatctagaatgtcgtttttgttaaccgtactgtcattcctagttctctagatctaccactttgttgatatgctggtattggaacgataccgcatgttctcgaaaatgtgcaacatcgttgaccacttaactcagtcttataattattgtatatgttccattttaataagaggatgttaagataatatttcaatttatttaacatatttctttttaagtaattttactgaaaaaaattaatgctctgttattttaaattcttcatataagatggatctaaatcttgtatatttctttgaatgtgcacagcctggaaacaggtcttgagaacaaaaaagtaatgagcatttattaaaagtaagcgaaagtataaaatagtgttacagaaatgttattactctgttattttaatcctagaactaatcttgatcttaatcttaatcttagtattttattttataatgtgcattactgcattgcacagcgtggaaacaggtcttgcga

SEQ ID NO: 1287 - DNA, 80099 bp, Arabidopsis thaliana
gatcaacaagatcaaaatatatattctttccaatttgctcagtgatgtcatcatctcttgcgacctttataaatagtatgaattgcattagtaacatcagtatcaagtctacaccaacacaatttcacacccaaatttaacagaagtagaaaaccttgattgtcgtgaaaaggtgagcttgagccttgtattttcttttatcttccttttcttcttgttcttttttcagcctcacctggtaggaagtaattagctgaatcaagcaaaatccagacaggtaaaaaggaaaacccgtgtatatgaatttcttacccgcaaatgttccgcaatgtctttctcatcaacgttgcagattatcttatccttgtcactttcccgaatataaacaagcatgtatgcattcgagtattttgtgaatttgaaaggtggattattgaaaccaggattattctgcggtaactgaagagaaaccaaatttgaaagtaaattcagtaaaaaaaaataacaaagaaaataaagaaaacctcgaaagagagtgctacctcttcttcaccaccatattgctcttccagtgctcttttgacatcttctttcgtgacccgttcatcgtcaaatttatacctgaaagaattagaagtttagatagtttaaaagtaaggcactgacaaaatgttttcaacagtgccatctaaaaccacaaaaggacgtaatagttatttatttcagtggatattttgggagaaaagggaaacaaaaagaaacttaaagatcatttatacagtgaatctaagtgtgaaactaatattggtacatgcacgtttagagaggtgcatggatagaagagccaaaagaaattcgataacattatccagtatcagaagacatgaattgggcctcgctagcctagatgacgagaaaactagtttgcaatataaaaaaatacgtcaagattacaaaatacaaaacgtattttagcataaaagagttgaagggtacataccactgatctgaaagtgttggcctaataaaagcataataatgccctccatgcactcctccactgtgaaccaagacactgcatagaaatgagtagcaaaatgttcaagcaagccaataaggcagcacaaaatattactgaaacataattcatcttgtctttcactatcacaaaaggaaatgaactgtccatctgcttaggaaaacttaagctacggtaaccagattcctgagaagaggaacctatcaaaaaacttgatatttcggaaacatccgaccatatctgtatagccctgtctgaatctactgtatatgaaattacaaaagcagagatacaataaataaataaaaacctgtggagggtgtagagattgcggacactcttgtctgcatcaggggataaatatcttccatcttctctgtcgagatccagttggagaggaaactcataccgatcattaatctgtaaagaaagtaacgtcagcttaaaatcaagtctaaacacagtcactacatgctgttttttgctgggtaagtggaatttcaaataccaaccttcaccattgtgtccctcataaaatcgtattcaaacctcttgagctgaagttgaagaactggtggaaagtctatgaatagaacacctttttttgcatcctgaaaataataaaaaaagtattccaatataagataagttcagagtaacaatataaattagtcaaatgcaactttatcagctgttcctgctttgaaatatactatttacagtttcctaatttagcttgcttggtagcatcacacgcactatgaaccccaacaccaaatgataagcagaaaaagagtagactatatagacttgctgggtacccaactacccatatagggacattgataatgctcaacatctccaggaaccaatatgagaaagaaagaagacagccgacctgcaaatcatgtccttctgcatggtatttgttgtctccttcaaggcgttcaacttcaacatacttgtcaaaagaagcatatacatctttgcagcctttaacatcaagctggaggtctggaataagtcaaagacacagctgtaaagttagtttgatattattaatatgttagcttccaataaattcagacaacagaagatgggttactgtttcacataacataccataaaatgactctttccgtgtagatttgtaatctacattaatgcactcaatgtaattcatgtggtgaccttcaaatagcttttgtattgttccctccacaacagttcccttgaaaaaggaaaaaaattaaaacatgaacaccaactgagaatgaaagaaagaacacgatgaagaagacaatttaccttcatcttgtcctcaagcttttcacagagaactctgttgagttcttgtacatcatgttgcataaaagaatcatatgtatcccaaccaaacgactttgtcagctcctttgtcgctacactggtatcattatactgaagcttgtaaaataaactctggagcgccaatgggatactagcggtaggtgcatcattttcagtcgttggcatgtggtaaacagcctacaaggaaaggatgggtgcattactcaaatgtctttctctagaattttgcgaactcatgattaagcaaatagaaaaagaaaacaaaacaagcatccaacctttctaaagtaaggtatgtggtataaagtctgcaggagagaattcatgtaacaggtagcaccttggttttttagtccaacaaaacctgtctctttttttgagtcatatgaccaataatcaagaactttacgcacagcaacttcagcttcaatcagaacagtgtcattcactaaatatcctcgagtgggttcatagagctcgctgagaggcatgaatgatgtaaacccccagtcgctttctcttgcattgaattgatgttgcgtctctgcagccacacacagagatagttctttcagtaagaactgcatctacttatcagataacaaaggcattggctgtttagaaagttcaaaagagtaaaacacatattaataataatatcattttcaataaagttttcaggtaagccatggtcaatgtttaagagagcggtaacttgactccattccaaagtctacaatatactccttttacaaatccaaaattataactccaagaaataaacatcagccaggaaattaacatcttacgcaggcattcagaattttatatatgtatgaacaaaattaattaaccaagataccctttctgatggaatatcggttgttgacttgattcactacagccagactgaactgtgaatatctgctccacccgtacggcaaattcgcagcatcagcaacatccaagtacattgacaaatggtcgacattgtttcctttgggaaaaatcaatatacgcctgcaagagagaaaaaaaatcagtacacatgacgtcaaccagtaaatgcacatcaggaaataaactgcaaaaaaatgcatcaaaaagtgtatatgccattaccacttataaccgcctacaacaaatacgtcagagtaatgcttcctggtattgagcctagtgaacattgggatggtccacgtgaatttcagacttggaggatcctcgggtggtggattctccacagcggtagcagcaggatcagtttgggcaactacaaatgcatcaacaatcgttaagaaatccacaatccaaaaaattgacaaaaccctagcgcacagtgaaaacatcaatttctacacccccagcactatccacaagtgctgaagcatctacatcaaaccaaataagagtagaacacagacgagaagtagaataagtagatcgaattcaattaaacacgaaaatgttaccttccataggctgaggtccctcgaccaaatccggattcggaacaagcatctcctcgtcttcctgctgctgtcaaaaccggaagaagaaaaatcagacttctgactatttagaaaccctaatttcccaaccccgtgatcagaacgtcaaaacagaaaccgcaatcacaaaaaaaaaaaacgacacaaatacagaagcgtataaaaaatctaagaaaataaaaccctaatggatcagcgaaacgaagccgaagcaggtttaggtcgaatacgcgtagaaacccacgaacacgacatcaaatcgacacaaacaacaataataggataatcggagattacatctagcggcggcggagtcatcatagtcattgctccgatagtgattcacggtcggatcgagagaagtagaagagagcgccgaacagagagaacaatgaaaggggagaagaagaagaagaagtgagggaagaaatagagaacttgcagaaggagagatcaatcgcttatttctctgcttactctttctcacttttcgataggataattacgatattttcactaaattaagggtttctattgtaattccaattactatttggattcagatttatatgtttccctgagtgttcgtctgagaaacgtgacaggctaatgagaatgcgacatatacgactcttcagatgctgtcaccaattaaaactctccacgtgtattacacgtgactgtgaccgtgacggtgtgggacgtcttcggtgaactttttggcttctctactctgcttcgaaatgtccttaagtttgttttgaactttttttctatattactatcctaaaagtttaaataatgtaaatgaaaatgcaaatttcataaattttaggaaatttcatacagaagttaatgcttagattttgtaatatattgttgtcacattactttaaatgtgaataatgtatactaaaaatagtagaacaatacttatccaccttcatttataagttttgcacttttttgacaagtacagtatgtaattaacattaatttgctacaatgatttttttttgttaaaatctgcaatgatctttattacagatttaaaaataaaaatagtaaacagtatttgagggattcactcaaaatgaaatgaacaaaaagtaacataatttggtttcatttataaaataaataaagctgccatatattagagatgttattttataccacatcattataaaatgttattttatataaaataacatctctaatatatggtagctttatgtattttagaaaaatggggtagcttgctctatggtatggtcgtatgaaaaaaaaaaaaaaaaacatgtcggttatcacttttcaagatgtttcgtttttttcttttgtttttctttcaatttgcaagatgtttttcatatagagtgtctgtaaatatccattgcactcgtctctctacaaaggtgaaggtctacaagactatacaacgttgttattatttatcttcttcttctttatatcaatcatccttaattacatttcagttgtcttcattttctcaaagtgatgatgatgaaatcgatatatatgcttattgtctggtcatggatatttatttccagtgtgttgttttatatggactattattgccgtagaccttaacttcagcgatgtttcgaatgtacatcgtgtacaataaacattttcattcgtcgagatgttatcatatgtttttttgtatgatcattgttgagaaagacaatgctattatttcatgggggtaccctactaccaggtaaacatagcttgattaagcatattcctacatatttatttggctcttccttaacaggccctttttaaaacaaacacgtccttatgtgatcatagttatggaagtgttgggctgagtttagaacaatcagagttttaaatccaacaaaaatgaagaaaatgctagggaaatttaaaattgctatcgaggttttctttctatgtggtttgtttgattgtatatatttcggttctgactttgtttttgtatttttttttttcttttgtacaagctagagataactggttttaacatatggttcaatcttgatttggataatttcatttggtttggttcatttctcatatgaaaataaacattatgattttagtatatatgaagcttaaatttgacaagtttataactgagttataattgtaagttgactgtggactaatgcattatctaattaaattgtacacttaccaaaattgcttatcttcaattctttcctaactagttgaaatctgtttctatatatctctcatttcaacgttttgttttaggtacaaagaactcttccagagatgaacttctcatatctagaaaaaaacctcaatgaggtttgaggaaagtaaaaacaattgtcaaaatccgagaaaatctgagaaagtaacaaacggcaaaagttacactatctcttcggatattgtttcacctccatattcaaattcaaatcccatcagtgatcacgtacatcccgccacacccattcctgaagccgtctctcaaagtccgatgaaagaaatctcaatcgatgatccttatctcccaccacatcctcagctaccgaaacttgaaccgccacgtggccgtcgtgtctctttagaagaattattgcatccgaaagagaaattcaccggcgatttgatgaaattcatacgccaaagcgggaacgcgatttcgaaacgcatctcggttttgctagagaacgacgatgacgacgactcgatcgatgacgtgaccgagttcaaaatctctggagtgaaagttctcgtgaagatgaaaaacgaagaagaaatcaaaggtcgtataactttcttctccagatctaactgccgagattcaaccgccgtcagattgtttctccgggaacgaggatttgatttctcggagatcaacatcgacgtgtattcgtcaagagagaaagagctggttgaaagaacagggagttctcaagttcctcagattttcttcaacgagaaacacttcggaggattaatggcgttgaattctctgagaaacagtggtgaatttgatcggagggttaaggagtttttgaaggagaagtgttgcggcgatgcaccgttgccggtgatgtatggattcgacgaagagagtaataataaggatgttgttgttgttgttgatgagatgatgagattcgttagggttttgagacagaagctaccgattaaggatcgtttgatgaagatgaagattgttaagaactgtttctccggcgccgagatggtcgagattctcattgattacttggattgcgggaggaagaaggtacgtgtgatattcaaaacttatgatcctgtgttacgcacctatgttaactttacgtagacgttgaccacgtttgtctcaaattaatattattagattaattcaaatcttaaaagattttctttccaatggataatttgattgaccaattaattctatttatttttggttaatttagtttttattttttggcaccatattcaaatatcaagtaattagatttatattttcggttattatgcaggctgttgaaataggcaagaggttagccgagaaacactttatccaccatgtctttgggtacgtacatatatataaatcgtgtcctttttttctttggtttacataattgaatattcttgatttagtgaaatgttcataaactgtatgtttgttgaatagagagaacgagtttgaagatggaaatcattactaccgtttcctagagcacgagccgtttgtttcaaaatgttacaattttagaggttctaccaacgacatggagccccaaagtgcagccattgttgggcagaagctattcaaaatcatgacagctattctcgagtcttattcttccaatgaccacactagtgttgattacatgagaatcagccagagtgaagaattccgaaggtagaatttggactcaagagtgcttaaacggattttagtctaggaatgcttactttagttctatcgacattaatttggttatgctttaattgtgtataaacgaaggtacttgaatttggctcaagacttccaccgtttgaatcttgtggaactctcaacggaagagaagttagcattttttttgaatttgtacaacgcaatggtgattcatgctttgatcagtatcggacgtcccgaggggttgatcgcaagaaggtcattctttacggattttcagtatgttgtaggaggctactcttattcacttagctccatccgaaatgacatccttcgtcgcggtcgaaaaccctcttatccatttatcaggccaccttttaataacggcaagacacggcatgaggtaattttagcgttccatgtttgtttgtattttactcatatcggtgattttcggattatcctatagttttaattctatggtttaatgtcagcttggtcttctaaaactgaatccattagtacattttggcttatgcgatgggaccaaatcaagtcctgtggtgaggtttttcacaccgcaaggagtcgaagctgagctcaaacgagcagctagagagttttttcaaaatggtggaattgaggttgtcttggacaagaggaccatacatctatcaagaatcatcaagtggtaatcaattctctttacaataatgtctacattgaaatttataaatagtgagacctaatgagacttatatgagtcattttggttattagtctaatgagctaagaaaggatatacattgatgtgtatatgtttgttgcggtaggtacaaagaggatttcagtgaagagaagaaaatgttgaagtggataatgggttatatagattcaaatgatgcaggtcttttaacccatctgcttggtgatggaggtggttcttttaacatcgtttaccaagattatgattggtctaccaacaattgaaatttaacaacaactcttctttttggtggtatattgacattaaactattggtccataaattttatgttaaaagtcatctatttgttattcatgagatttattcatgaatcacaggtatagtactactatctgaatcccggattttggatctttactctataagaatcgaagacaatagatgatgaaagaaaacttaattactactattcactattttaaagacaaacaaattcaaattaatatgcatatatagaatcgtacgcctttggtgtgttcctaatatacacacaacttattatttggaacaaaaaaaaaataatcatttaactaaaatactatccggataatgtcatatatatgaattatcattcatctatgaatatatgtcaatttattcttacgtggttgaagtagaagcctcttctttttggagaaatgagtagaagctttttatgttatcataacatcatcgtcttacttttctccttttctttctttttcttcacatttttactttctttggtatcgaaaccttaaactttcaagctaattccgagaaatgaaattttatactaaaaacgtccatgattcaagattattacaagaaaaattgacatgaattatcgttttgctctggtaacaaaatcactacgtacttaaagcaaatttgaaatatcatttctgtcttctgatgacaataagttaacggtttggtagaactttttgtagggaaacttgtgaagatagagttagcttttagatgcaggtaacgtataaacttatttgaacggttagattgagaaacgaacaaaatacattggatgcaatatcttcctttgtactttgcaagtgttgtatataaagaaaaaaaaagtgttgtatataagtaactcatattctgatattccccacttccatttcttataaacaacataatttgagtataatcttcattttaattatatatcaaacaatagaaccttaagtttttgattataatctctgcctaatcggcagctaaactcatataacccattgtttagcccagttatataactttggaagttgcataatcagcttaactattttctactacaaaaaactaaacatttttctttttgagctcatcaaattcaactaaaattgtctctcagcttcttttttcccttttcctttatagtgagtggcgttttaaaactaaaagcaaacggatcaagatagagaaagccacgatcaaagcaaaaccataagcaaacaaacaccaaaccactaaaagaataccgcacacaacttctttctatcacatgaatctccttttaacaaataaaataataataaagtaaggattatgcatatcttattgcacgtggccggtgccctttgagacgtatcaccctctacatgcaatataaaaagcattgcaaatgaaccaaagtttgatcacatccatcacttataactaaaaacacaaatcaagataaaatggcggaagagcaagcagcgacggcaatggaaacatcggcggtggagaagcagccagagacgacgacagaggctgaagcaccaagtttgacgacgaagaggatggtggttgcgattgatgagagcgactcgagcttctacgctctccaatgggtcattgaccatttctctaatcttttattgaccacagcggcagctgaggcggaaagtggaatgctcacggtgattcatgtgcagtcccctttcaatcactttgctgcctttccggctggaccgggcggcgccacaggtctcgtccattaacctctcttttttcttttcttttttaagtatcgaattttaattgaaataacatcttaatataatcatagtagatattttcttccttcatacaccctactccctagtagcatcttttatatctaatttatagtattagtcggaaagaataagtagatttaaagaataaaaaaagttttgtttactttataggtatagaaatgttattgtgtatgacttggttttgtgaacggttgtagcagcagtgtacgcatcttcatcaatgatagagtcagtgaaaaaggcacaacaagagacctctgctgcccttctctctcgcgctctccaaatgtgccgagccaagcaggtccgattctataacacatgtcctaaagacattacactaattattggacatgaaacgcgattaaaacatattgtgtgatggatgtgcagatacgtactgaaactctagtgctagaaggcgaggcgaaggagatgatttgtgaggcggtggagaaaatgcacgttgatcttctcgttgtgggtagtcgtggccttggcaagatcaaaaggtattgtatcattaataacttcttcttatatataaatttgagcgcttattattttgtttgctttgtgcgtttcggaagagcgtttcttgggagcgttagcgattactgcgctcatcacgccaactgccccatccttattgtcaagccacctaaggagatgactaagtaatatggagctgtttacatgtttgggttattagtacgaattttataatgagtgtgccataatttacctaaaaaagaaaaaaaagaaaaaaagagtgttgtatgtacgtgtgtttgacttggataattagtgacattttaagcaaatgtgtatttggaaaagtgatgtcaatgaaatatgaatatgggtcgaataaagaagcgaagatctgtagactgttgcttctctgcatctgttgttgtattcccgatcatattgttgtatgtttataatttattaaaagcaaattgtcttcctaattttgaatctttgttaatcgaatcccaactttcgaacgaataaaggaactgattaattgcgattgataacatggaacacataaagaagtcgtgtcttaaactataaacaagagataagaaagacatactgtatatgacatcagaaataaaagcttcgtcaatcatttaccatattgagaacaatgcaaatggtctaagacaatttcagaaaacgagcttgattaccagataatagaaacttagaactaatagcgaactctttaaatttctagcttcaggtggcctagataagttcaaaaattgacaataaactgatgcgaaacagcttaaagcatcaaaaatttatctattcaaagtagttcagacgaaataaacttcataaaacaaaagagcaaacatctgagatacatatttcaatctaaatgaagataaaacattaaactcattgatacgagattgtaacgcacagggcaaagggaaaatccttaacgattagccttggcaactctttcaatctcatccttcttcttgatggcatagctgcaagacataacagttcaatcattagcttcactttaagttatatgaacaatagtgaagtcatttggaagtgtatttacctgttggaagagcccttggctgcgttgatcaattcatcagcaaggcactcagctatagtcttgatgtttctgaaagcagcttcacgagcaccagtggtaatcaagaagatagcctggttaacacgtcttagaggagagatatcaacagcttgtctcctaacaacaccagcagatccaattctggtagcatcttcacgtggaccactggctcaagcaacaaacaaaacattaataagaataaaatgttccttgttccaatgatactatttcagcatacttcacaaggttagtacctgttgacaatggcgtcaatgatgacctgaattgggttcaagtcagacaagaggtggataatctccatggcgtgcttgacgatcctgacagccatcaatttcttaccgttgttcctcccgtgcatcatgagagagttggtgagcctctcaacaatggggcactgagccttcctgaatctcttcacagagtatcttccagcggtgtggggaacaaaggtagcatgtttagctgcctgaactccaatgtagtcaacaagactgatgtctgtgacctacaagatgaaaaaaaacaattgtcactaacaacactaagaatctgacatactaacgccaaaacggagatccaatcattcagggagcaaaatgaaaaacaaatcgcaaaacagtgaaatttagcagaagctaaatgttccataaattaagctgtagaactataacaaataaatctaactaccaccaaaacaagcgtataaggttatgccaagcaatgtaagatatgtatcccaatgacaaacgctaaagtaaaacaatacatctaaagagaaagctaccaaatcttctacactaatctaagatggaaaatgattctcacagatgaaacataagctagaggatcaaagcgagaccaaaattaagagagtgaaagcttaataatttaccgtaacgtcgtcataggtccagcggttgaagagcttgacttcgttagtgagcgcctgctgaatctcagcgtcaacatctgcggcggtggccatggctgtggtgagagaaacagagcgtgagctcaaatacacaagtacgaaatcagagttatgagagaggatttggagaaagaagatcacctgaagatcgtttgcgtcgcgcgaatgagagagacggcagagaaaacgagaagctttaagaggacgaacaaaaaccctaatgtcactccttttatatagatgagaaatttagggtttgggctctaatggagctgtctacatgggctttcatttctttatccagtaaagaaccggtttaacaggttccctggtttatacgtggttttagccggttaacttacggaatattatttttatcttaagttacacaaattacatcattaatagtaaaacaaaattttatggtgcaatttaagtttttatgatgagtgaaattcgaataatatacaaatattttactgtttaggtttccctaaacctacttttagatatgtaaattaaacatttttttttttttggttagaaccaagtcagtgatcatagaactcaaaaagctggtgtttcaattggtacaagcatttttattgcaagatataaaaattcagaaggacatatccttgatgtatgtacatgaaggaaccgattttgactccaagctacaaagaagaagaagaatgatatacaaagaaaactgcatatcctcaccatgaaattgaaagctagaggaaggggaataacagatactctgcgtagaagagattccatataaaccgataatatcctgagatagcttcctgcaataatcaaatgtttctacactccgttagatatacactccattgatgttccgtgataacgagtttatgtttgtacaaaagtattttaccttggtgtagtttgctttttctagtacccatgtctaccaaagatcaacaacaaagatattagagattaatgaatttggcagtgtcaaatgcagaaactaaagcatatagttatgaagttcttgtgcattatctcaaaagtatgtaagagatataagagtatctcataatgctttacctggaaaattaagcctgaagccaagatcacatgtgcaggaatcatcaagctacctctaaaaacctgttcattgttaaaggataagagggttggtcttttcaaagctgcatactgaggaaagtaacaatatcgcaacaaaaataaattggtggcgatagtttatcaagcttctacatgcagtaatggtgttcgtgctttaattaaccgaaatagttaagacggaaatagatgaattcacctgaggcatgtagaaagctagtgatatggctgaaacataatttactagcagaagtccagaaccgaggaatgcaatgtttctcactccaagttttgttgccagggttgatatttggaacctattcaagatcaatcaaaggcatgattaactaaacatgcttgaacaaacacataaagacaatatatcaaacggagctggttaaacattgtctttgactgtcaaatggattgagccaaagagcggaaagaaaatggttatgcgtgcagttacttactttcgatctccttcaacatcaggaaggtcctttgtaatagcaatgaccagtgcaaacagtgtcacaaaagatgtgatgaacgccacaggtgcactgcaaatagcgaatcaaaagttgagtaatatatctactcacgattatggggagctcctacagttcctctctcattgtgagtacaaagtttgactaatttgctgaaatcaaacaacaattggtccctcacatatattaaaactctatccatacaagtatgcaaagtccatcctattattacgacctgtttattaagttttgtgcatttgactaccaacctccactgaaatggaagtccaagagcagctcttgtagcatggtacacaccaaagttaagaaggaaacctcgtacctgataagaaatgtcaatacagaattatgttattaaaagttcccaagccacgaaaaatatcacataaggtgatagttgtatattgattaagaagcataaaacagcatttaccgtggcaataataagaaatgctgcaactgggaatcttttcattctgaggggtggaacagaatagatggttcccagaaaaaggccaagagagtataggcttgtaatgaatggaccaaagttaaatccgacaactaaaagccctgctatcgcaaaaaatatcactaacaaccaagcagactgcactgatagatctcctgctgctattggcaagtatggtttgttcactctgcaaaacaaataattcaaattcaaaccaaaataacacatcaagatgctccaaaagcttgaacttaagaaatgaataatatatgagtagaccggtaatattttcaagaagcaaacaataaagaatctaataacagttccaagataacaaaattttgtagatgcacatcagtgaagagttttgacaattagcttaagatcatttaacatgttaggaacatgctacttcatagtgatgttagattaaataataatagtgaccaatgtacatctgcatctaatagtgctgcatacttgtcgattccaatgtcgtagatctgattgatgccgactatataaccattcccacaaataagagcaagaagacctgaaagtgcctttagtacaagactccatttgatcaaatgagtgttctctatcaaagctcttgtcaccaaggcactgccattaaaattacagtcaagataaatgagagcagaaactatcaagttcttcataaataaatatgcaacaaaaatactgacgtggatcctaaagctgttccgcggattgtatggggtctaagaaatctccagcaagcattttggaaccgggcaattctatccagcactggatcatcagactcagcagcaccaacctgagaacatgcctggtagtatctacttttgtgagtgccattacaaaacgcacaaacactctaaataaaactgaataatagaattacatgagaactgagcaaatcttagagaagtaagataagatgttgtttaagagaataaaaatttccagattctataacaaacattcaccatttccaatcctagtaatcttattggacctcaataatcccttaaagaaaacattttcctaattggagcaaatcgatggccaaaagatttgaactttatgagctgcccagtttcagataaagtattaagtataccaagatttgatctttaggaatctcatagttcacataaacacatcttgacttaaaagtcaaagcaacggctaatatgctttgtcaacgaaagagaaacctagaatgaaaccatacccggattgagatttttctataattggttgaaacaaatttggaccgcattcttgaagttgataagctcgtgaagcgaacatctcgagggaggcttataaacttcccagctaaatgcacagaaggacgatgatgatgagaagctgctaagaaacgaggcgccagagacgagaaccgaacacgcggtgattgtgagatcgagagctccattgatgccactagccacacaaaaactctttgctctgcttactttcgtttgcacaacgaaatttgtttgacttgtgtttgtgtccaatcctctttccggttcggaagaagaatatacatagaccaaacccggttaattaataaattaatttttttttgggtgagatcttgattccggtttgaaaagcttaatcagaattggacacataggacaatcataatgaattgatgaattacggcaaaaaaccaatcaattgattaagcaatacaaaattggatacatttgatgactcaaatattttcagacagacaaaagaaacaatctttggttaaatgaaaagaaaacatacactccatgctagcttcaagagtttgaactgtctcaacaaaagatgttaagacatatggggtacggtttcagcttgcaccgtagaaaaaccttgagagctctttgacagtgcttcagcttcatccgaagcacgagccctagagttcatagtctcttcatccttctctgtctccatgactattctcgatggagcttcggtttctgtttcagttgatttctttgtctcttcatccccctctttgtccatgactattcttgatggagcttcggttttggtttcagtcgatttctttgtctcttcatcaatcatttcattggcttcaatctctaaacctctgattgtttcatatgttcttgtgtcttttgtctctacactatcctcctcctctctagcctcatccatgaccacaacttctggagctttggtttcggttctctctgataaatcatctgcagagttgttgtctccttctttgatgaactcgcctatttctaaaagcttctgcgcttttaattcgccttcttcattaacattgtctgctatctcagcttctgaaactttctttgcagcttctttcaccattgcagcatctacttcttttgaaaccaatttatcttccggagcttctctcgcggtttgctccaatgtaacagcttttaagttactcgtctctggtttttctttaatctcagcttcttctaaggctttcttttctgtattttcaggtttatcggattccgagtcagtaacaatctttggtttgatttctaaaggccccagctttccatcaatttccttgaccagatttgttagtgatcttgcattacgagcttcagataacctagtagacaactgcaacataccacaaaaagttttaagcaaaaagtcatgttttgcgctcaaagcagtttagctcagaaaggttgaaatggagaaaaatgtatttgctgatatttcacctgctgtatctgttcagctcggggtttgagatcatccagagatgcttccttgtaaatactccgaagaatgtacatcaaatgagagctaacattatccaaatgatgttgttggacctcacattgatgtacatcagagagacaaccaacagaatgaaatggacagttgacaagtttcataggacatacggttatacaatgcctatccatatcacgtctcatgatactctctgagcagttctgctcacacggaatgatcttgaacgggcaaacagaatcgtgattctccatctgattcgcacaaaacaccgcagtacaaccctcattctcacagttcattgttctatacccacaattcatggcgtgctcggcgagttctccttcggtttggaatttcatctcacaatgtgcactgcttttaaaatcaacgtttttaagcaaagtctgagcgataccttctctatgatcagtcaaccaaaacccgcttatctccatctcttgcgcgaaatcatcgatattatcttctctcctttcgctaagcatccaacccgaaacccggctgaacaaattccgcttagaagtggcgaaatcatcgatgaaatcagatataatgtcaaaaggatcatgagaagcttcaatctcagaacctccttgaagaacaatgtgttcagccacaaaggtttcgcttctacgagtcaagtactctatcatttcttttcgaatgtcagcagcaacagaaccaggactcctgaagatatctccggtagtgttatcgacacaagcagtggctaaaccagggagaaaaacctgagcaatcttgtgaactacttgtgtatcgtaaagatcacagtgaaaggaaggtcctccttctttctgatcttcaatactctcaagatccgacacaggaggatccattgcctgtatatcaaaaatcgtctgcagaaacacacacaaattgaatagccaaatatcatcactagatcagattaaaaaaaatgcaaagcattgaaataagacacaaactccataaacaccattaatcaaaatctctactttttttttcttctggaatcgctagatcagtagaatcctaaaatccgatcaacagccaatgatcacgatccgtaaattgacaaattattaacgaaagtttcagaattgagtcaaattacaagcaaaaagttcaactgttggattgataaagaaatgtcaaaacaaaaaaacgagaattaccctagaaagaaatcgtgtcctaaacagacaatgacaaatcggagaaaggaactaacgaaagcctgtaaggaaatctgacggtgagatcaaaatggaacaagaatggaatgagagaaagagagagagagagaagcacctctctggttttggcgcaataaacgggtctctttttctcttttaccacaacttcgtcgcctcttctattaaaaacggactctctcctcctttatttttatttttttataactggtttctttcctacaacatttttgtagttagtactgtacagtgattattagtgattttacaagcccaataaactatttagaactaaacaaatctaatggaattttaataacattttttttcttatctaatcaccaacccaatgaagaaacaaatttaccctttaaattttttcatgtcacaaagacacttcattattaattatccacaattatactactacacatcaaatacaatcaagaataacaaacataattaccaattaaaaaaaaacaattttctcttgcgcattttccaaattagcaaatcctttatgttgtttttttgaaacatttttaactagcaaatcggtcttatgactagtgactaaaaaagttaaattccaatagatctttgaaactgtttaatatatcatcgaacaatactaacaatagaatagatgatgaatatattattaaattatcaaacttagatataaatctaaattataacacgttacaatactaatacaaaccactatatgatagtatattttttggaacatacaaatcatcgtatattttcaccaatttttttgtagggtttatgttaataagtaataactgattttttaacgattgttatatggatttaactgtttttttttttcttatgataaaaaatgaaacagtgtcactgtaagatttgggtcccttttttaatttcacaagacggagaggaaattaaagaaggaaaagcacgacctttgccgacttccttctgttaatcatggcggctccggaggatgaatcttccgctcagtctcaatcatcacctgccacggcggctcctacgcctcctccttcctcttccccttcctctgctggggatcactacctagctaagtgcatcctccgccccagcgtcgttctccaggttgcttatggctacttccgctccccttcctcccgcgacatagttttcggcaaggtctcagttccttcttcttcctctgatctctacttttcgattctggattctgatttgtcttgtgggaactgcttttttttttgttaaatatctctcctttagggattgggattttgtggagttgatatgctatctgcacttgtttcacttgcttgctgttttttatgttgagggcattgttgaaagagtaaaaagttgtatacttttttttgtgggtatggtagttgcatcaggatgttgttataaaagcttatttcaaatggatttagagtctgtagagcagaaatacagtgagaaatgcttaggtctgtagtgtgtgcttttgttgttttagcagtaactagaaatggaatttcttttgtcttaccaggagacctgcatagaattggtggttattggtgaagacgggattgttgaatcggtgtgtgaacagtatgtatttggaacaattaaggatttggctgtcatacctcagagtagcaagctttattcgaatagtttgcaggtaagcattttccatttaagcacggtatactgtatttgattgatcaggtattttactccggcaaagattttttttaaattggtgacaaccaagctttttgttttgttagtaacaggaatgcagatctatatgatttgatatgtcaaccatctgttatcttttgcagatgggaaaagaccttctggctgttctttctgattctggaaagctctcatttctctcatttagcaatgaaatgcacaggtttagatcccatgtactcttatttatcccggaaacctaatgtcaccgttgctcatttcactgctgtttggtgtaggttctcgccaatacaacatgttcaactttctactccaggtaactcaaggattcaactcggaagaatgctcacaatagattccaggcaagttttcaaaaaccatgattttgttacttcattatcctattgatgacttagatactacttttaaaataaccataattgctagctgtttcttttttcttttgtatgttttggcctttgcccaagtactcactattcgattgttgagagaattgaattggagcgttcatgtttctaagccacaccttaatgttaaagcttacattttttgtatcttgaatagcaaccagtaattttgactcctgtaatgcattttgcagtggtctctttcttgctgtcagtgcgtatcatgaccgttttgctctgttttccctctcaacatcgtctatgggtgatattattcatcaggtattgatttctgccaccaacttcggatcatcttgtaacttcagtagacgggaggtttaccttttgttgtggcatgattgatattgataaagtggctaacattatatttaatttcttttattttagaggatttcttatccttctgaagacggagggaatggtagctctattcaagcaatatctggtactatttggagcatgtgcttcatttctaaagattttaatgaatccaaggagtatgctcctattcttgccattgttataaataggtattgaatcctttcaatttgagaagctctgttttcagttattgtgcctgcttacctcagtatttttctgatcgtataggaaagggtccctcatgaatgagctggctttgtttagatggaatgtcaaagaggaatccatatgtttaatatcagagtatgttgaaactggggctctggcacatagtattgtcgaagttcctcactcctctggatttgcctttctgtttaggattggtgatgttctcttaatggatctaagagatcctcaaaacccttgctgtctgtttaggacatccttagattttgttcctgcttcattaatggaagagcattttgttgaagagtcgtgtagagtacaagatggagacgatgagggctgtaatgttgttgtatgtgctttgttagagctcagggatcatgaggtcagggatcatgatcccatgttcatagatactgaaagtgacattggaaagttgagttctaagaacgtctcttcatggacttgggagccggaaaataatcataatcctcggatgattatttgcttagataatggtgattttttcatgtttgaactcatatatgaagatgatggggttaaagtaaatctatcagagtgtttatacaaaggtttaccatgcaaggatattttatggatcgaaggtggattccttgctacatttgcagaaatggcagatggaacggttttcaaattgggaactgagaagctacattggatgagttccatacaaaatattgctccgatcttggatttttcggttatggatgaccagaatgaaaaacgagaccaaatatttgcttgttgtggtgtaacccctgaaggctctctgagaattattcgtagtggcattaatgtagaaaaacttctgaaaaccgcgcctgtttatcaaggaataactggtacttggactgttaaaatgaagcttactgatgtataccattcatttcttgttttgtcatttgttgaggagaccagggttttatcagttggattaagttttaaagatgtcactgattcagttggtttccagtctgatgtttgcaccttcgcatgtgggcttgttgctgatggtttgttggttcagattcatcaagatgcaattaggctgtgcatgcctacaatggatgctcattctgatggtattcctgtttcttcaccatttttctcatcgtggtttccagaaaatgtcagtatcagcttgggggcagttggtcaaaatttgatagttgtctctacgtctaacccttgtttcttgtctattcttggggtcaaatcagtatcatctcaatgctgtgaaatctatgaaattcaacgagtaacattgcagtatgaagtttcctgcatctcagttcctcaaaaacatattggaaaaaagagatcccgtgattcttccccggataatttttgcaaagctgcgattccttctgctatggagcaaggctatacatttttgattggcacacataagccttctgttgaggtcctttccttcacagaagatggtgttggtgttcgagtccttgcttctgggttggtatcgctaacaaatacaatgggaactgttattagtgggtgcattcctcaagatgtaagactcgtgttagttgatcaactttatgtcctttctgggttgagaaatgggatgcttctccgttttgagtgggcccctttttcaaattcatccgggttgaattgtccagattattttagtcactgtaaagaggagatggacactgttgtgggcaaaaaagacaatttaccagtcaaccttctgttaattgctacccgacgcattggcatcacacctgttttcttggttccgttcagtgattcactggattcagacatcatagctcttagtgacaggccatggttgttacaaacagctcgacaaagcctttcctatacttccatctcattccaaccttctactcatgcaactcctgtatgctcgtttgaatgcccccaaggaattctttttgtttcagagaactgtttacatctggtaattatttaatttcagattttcactgaccattttgttgctctttggacaaagatgcaaattccatcgatcaatcgttaatgttttgatatggtttacttgaaaaatagttaccaacaaacaactgaatttgctaattgctttcatttgtgttttcgtagtcgtatacattatagacagttgtgggaatgcgttggagctattatttgggtccggctatgatagcctgatgtatatgcttattttgtaggtggagatggtgcacagcaaacggcgtaatgcgcaaaagtttcagcttggaggcaccccgcgaaaggttatctaccacagtgaaagcaaattattgattgtgatgagaactgatctgtatgatacatgtacgtctgatatatgctgtgtagacccgctcagtgggtcagtgttatcatcctacaagctcaaacctggagagactggaaagtcaatggagcttgtacgtgtgggaaatgaacatgtccttgtggttgggacgagtttgtcttctggtcctgctatactacccagtggtgaagctgaaaggtttgaaatctgtttttttgccactttttaatttgaccatggagtgaaagtggagactgatgtaagacgaactttatgctgacctttgaatgcctttgaatgccttgttacagtacaaaaggacgagtaatcatcctctgcttagaacacactcaaaactcggatagtggttcaatgacaatttgttcaaaggcttgttcgtcttcccaacgtacatcacctttccatgatgttgtgggatacacaacagaaaacctatcaagcagtagcctctgcagcagtccagatgattacagctatgatggaatcaaacttgatgaagctgaaacatggcagttaagattggcctcttcaaccacttggccgggtatggtacttgcaatctgtccataccttgatcattacttcctggcatctgccggcaatgctgtaagcctcactttgatgatctatagttttgttgccaattctttagcatgttaatctactaacaaatatcctggtcttcaatagttctatgtctgtggttttccgaacgatagtcctgagagaatgaagaggtttgcggtaggaaggacccgtttcatgataacatctctgcgcacatacttcactagaattgttgttggggattgccgtgatggtgttctattttattcttatcacgaggtttgttctgttgctgaatattaccttctgttgttcctttgttatatatatgtcttctctttgtttgcctacttaattttggctgaaaatattagagattttttgtttatgttattgaaggaatcaaagaaacttcaccaaatatattgtgatccagcgcagaggttagttgctgactgttttctaatggatgctaattccgttgctgtatctgatcgcaaggggagtatagcaatcctgtcttgcaaagatcattcagactttggtatgaagcaccttggtacgaagcacctaccttttctcttttgtctcgtccttaattcaaatatagcttttatcaaacaattttcacttcagttagaaaagtgtgatcttgtgatcttccttgttcttacgattcttctaggtgctataaaccctgggattcgaaaatactcttatagaggctgattgttatgattcagtagaatttgctaagtgaaaatacctcatgataatccagaatattcaagtccggagtccaacctgaatctaaactgtgcttattacatgggagagattgccatgtctataaaaaaggtaaatcctagacttgcagcgatcatttcacttaattgctttctgttcagtggtgtgcttatactgtaagaaacttgatcttatgttattaccttctataagaaagtatagtcttaggccatagaaaaagactaattggcgcattggtctaacatttctcaagcttaacgtagcttaccttgaatgaaattattgcaattccaatttctattctaggaattttcatggataatttttgtcaagtttcttgttacaacattgcagttacctcattaaccaataaaatatacatatatagtcaattcatttctgcttgcacccaccttcttaatagggttgcaacatctacaaacttccagctgatgatgtactgcgaagttatggtcttagtaaaagtattgacacagctgatgacactatcatagcaggcacgctattgggaagtatatttgtgtttgctcctatttcaaggtatgatttgaatatctgactgatgacatagctagtttttgaaaatatattggcgtgaccttcttttccatcaaataaaggcctttttttttgtcttgtgttatacatagttacccttaattaaacttgcaccagaaattctgtttgtgcttattttccttagttagttcaatgaccggtcaccaatttctgtagcgaggaatatgagctcttagaaggtgtccaagcaaagcttgggatccatcccctgactgctcctgtacttggtaatgatcataatgagttccgaggtcgagagaatccggtaagtgaaccaaaaaacagttcaaagtttctagatgtgagatgaatatcatttctaagagtccagttcacacttcaatgtttgcattcggtgggtcattaaatcttggtgtctggggacatataaatagcttgctaaataattacctcttatccattattgctagtatgatacataagttttcaattgttgcagtcccaagcgagaaagatattggatggtgacatgcttgctcagttcttggagcttacaaatagacagcaggagtcagttttatcgacacctcagccatcaccaagcacatcaaaagcaagttcaaagcaacgttctttcccgcctctcatgctacaccaagttgtacagttgcttgagcgtgtccattacgctttgcactaggtcatcctcttccgagcccgctttcttaccaaggcttgcaacttaaaggacggcagtttcatggttaacgaattcactaatttgatctggtgcgtaactgagtccaaagtagttttagttggaaaatgtatatggaatttattaaataactggtagtgaatattggatgtttacaagcttattgacactattgcgtataggatgcaaagagttggaaatacccagtctcagcagctgccttgtgtacttaagggcgacgagtcttaacaaccaaatcctctctctccctgcaacagtttgtagaggatacttcccgcaagtacagaagttggtgagtgaagtgggttttaaattaatcataggactcggtattgttgtgtacatagagacgaataacccaagtaatttgaaattaaaacaaagggatactggacacaaaactgtagtgataaatcataaactcgtccttagtttgaatagtttctttttacctcagtaatttagattacacaaacatgagacaaatattggttactcttgtgcaaaggaacaaattttgaaactggtaaaggcgttgcaagttcttttatcaggaaaaaaatgatccaagtacaagagaagaacaatatttttagagttttcagtagccttgtcatttaaaaaagcttaacaagagctcacaaaattgcggtttacacgagtgtcaaatttaacaggaagtggctactgattgcaatggttgcttctcaaaattttagtaattttacaaaaattggtgctttgttacaacaaaatctcaggccaaggtactgtttgcatactccatcgccctctgtttcacgtattcgactctctcctcgtcaccaacagatttctcatattccaagaacttcttgaacaaaaactgagaacacaagagaacaaaatggttaaaaatccgtagtaatcaaatacacttaataaagcagatttagagaccaggactatttggcaccttcatcttcttggggggcaagctcaagctaatggctctctcgaataaagatctaattacatcatcttctccaagccggatctcctgtacaagataaacatcaagttataaattaaaaaagatgacaatgaaatataaattttggagaagcagaatataacgaacttggtcaagataaacgctccacaagtctgttctttttgggtattccctaagaacaccttcaaacagtgatctccctctatccgcaactccacatttgaactcaaggatggcagtctgtgatatgaactttatgtgcttatggcggggaagacatagcaaggcacgattcacaacggattgtatggcttcctcgttttgtttcagagaactttgtattttccttaaccaaatctaaaaaggatacatcagataaagttgttaacagagtgagtgacgagccaaatttctctgctttgagaagataaagatcaaacagcatgtaccttgcaagattgcttgaactttttaatcatctcatcaagcagcttatcagccaatttatattgctctgttctctcgtacacgcccaagagtgcgaggtaaactttctttgggtcacagtattgacgggccctttcaaacactttcttaacagattcctggagatgagaaatcaaacacgagtaaaattgcaatatataagcctattattggtaatatctaaaaagctttcgttggagtcttctatctacctctggtggatttccatgttcattttccaaattgaagtaagcaacccatatgtttagcttctcttcttcctcacgaatatttatagtcctcaaggcccttcagtagagatagttttagacaggataaacaaaccgaatatagcgactatcacataaaacttcaatgctttatcaagcagatattagatccagacggttatctaattatataatatttataggtcccaaaaactgtttccgctctcaacctgtatcagtatgtatccctttgaatgatacagaggggttaggaacaagtacctctcagcaatagacctggctttctcaatatcagccaagctgagcatgaacgccatatattttatccagacaaagctgctgtttggagagcttctaaccaatttctcaaattcatcagcattctcaggtgcatgatgctccagcaatcttccttcagcagcttgtattttcttctctctacacaagtataatttttcagtatgagttgaaaccaaatataaagcatctttgtttctaaagaaataaccaacctttcctctttgtctttttgcttttcccttctcttgctcttttcatctttattggctcccagtagtttctcctgattctggctgctgtcaaagtccgtctcctcaatgtcatcaaggtcaacctcaagcggagggatagaagcccttgattctacttgggcaagaaccagagaagttccaccgcttgtttcctggaacccaaaatcatcgactgctgcaagaacttccgacttcggatcattgattggatcacattccatgcttgtgttgtcttcggaaagtggttgtgccttgtcatcatcaccattcataagataggaactcttcattccgagtgatatacgcttcttttcctcgtccagctagagcaaacaccaaaatgaaaaagaacagcattaacattccagagtaacatagatcatagaaaagctatgttcaagttaattttccagatactagttactgggctcttagcataaggctaataggaacagtggtagtcaagaaaaatactacacagaactttattattcctgacaaaagaccacctaccttcaaaatctttgcgcggacgctctccccagccttatatctggcttgtacattctccatacgatcatcagaaagctgtgatatgtgacataatccaacctaccacaaaaagaaaggtagatagtaatgaagtaaattattgccagtctagttactctattaggataatttggcaaagtagcatacagtttggatttaacagattttaaggaattcacaaaagtagatcattaccatgccagtttgatcaatgtcaatgaataagccaaagggctccacacgtctgattctcccagaaatcatatctccaacatggagtttcttcaagtcataagattcagattttggccgcccaccagcatttactgtcttcaaagtgacttctatccgcttggataaaggctccacatttaaaaccctacaatgtatattggttagagcagaaaataaagtatattataaaatatctatttgacaggaagcttgcattacctgccagtcacaagttttcctactggaaattccttttcgggttccttaacaaacgtatcacataaatttgacagtcgaacttttgcctccactgtccttgaaagtataataaaacaacctttcgacatcgtatttttgacataaccctgtaaaagtttgaaattaacataagttttaccataaggaaagtaggttgcaaagtcatggttattaggccaaaaatacctggacgcccatatcaggcgaaagatcttcaatcctctcaaaacgcttacaaacattatcactgaaaagtgaaaacaatcatcaggtgaataagtaaattagaaacattttgggaaaatatttcacaaacatacgaatttcaagttcaaatagagttaatgcataagaaaatcccaataatagttatcgtctagtggtgatgagctgtttaccagcattgatttaacgcaaacagatttaatccatattaaaagcaacacagacagtaatgaagagtataggcaaaataaaaacttacttattcttcaaatcttctgagagatggtcagcagaactcatgccatctagtgaggtccgtaatgacagttcaatttgccaagtccctttactagaactgctgatttctaagaccttacatttgacaaactggccttcacgaaaaccatctaatggatcagggacccatgaatcattgatttcagtaaaatgaactctcccgaatacataaggacctaattgcacacgaagtccaccaacaccaggaagtatcttagaaattcttccacccagaatgtctccttcatgaataaatagagtatcatcatcaccaggaatgctactgtctggtttatccgttttgctgcctccaccattggcaatgcttttgtggataaacagtagtggacgctgaaccaaccgtaatgtttttttctctttattgtacgtcaaaacatagcctgaaacagctttaccgatgggaaaacgcctttcaaactcttcaagttcatgagctttgcatgatgtgtctaatatgaatatgcgtgctgtcacgttgcgagatactgctaaccaaacccattccttatccactttgtagacatatccaatgacacattgtccagcagcaaactcaagttgttcactctcttgtgtgtcattaaactcactggaatctaattaaattgcaacaacaagaaagaaagacacggagactatatcatgatcttgtgtgagcaaatatttcttatgtaagatatatatacaagcatacatgtggcatacattggttaatgattttttttttttttgaaaaacataatagctagaggaaatcctaaataagataattcacgtagaataaaattattacaccattcatatatcaccatcccacaagttgctagaatagactgactaaaaccgttttaaaccctaagggtatgtgactgttctgcaatgtatattctaatgggagtcaatggtctatatgattggtagaatttttcaattctcttggattacctttaagcattgcaggctttacagaaagctcccaaagttgagtctttttaatatcagtatgacacggctttgcaacaacccttgcagaaattgattgcccaactctgaatttggcaaaaggttcatcacttgtactcgcatcatttacctattcaatccatagttgagatatataagaaaatcttcgttcaccaagtattgaagaacgagtattacaatctaaaatgatgatggtaagcaacacaagaacctcagttatgtggattctccctcggaaactgttgccaaagtttactctaagttcaaaaggctttatttcagtaatctgataagtataagctgttagtatgaggcagcagaagttatggtggcatagacacaactaaaaaaaaaaaaaagacttaagaaggaagggcgatagtaacctcggcgtggacaacagaaccaacttcacagctggatttcttctttgccctcttagaacgggaagtctcagaagtgccggaaacagagtcaagaagtaaaagcaacctcccagacgttaaagggttttgcacagccttaacagaagcaacaacactgcccatagaaaataatcaaaaaatacttagctcccatcaagtaactacaacagtaaggacagctatgtctattgccaataaaaggtacaatgagctgccagtggatgtatatacaaattcaaattttattagtttagttgggcagggcaaagagtatatgggaaattaggaaccatgacaaagggaagcaaattaaataagtaaaagattggccaaaaatggacgactagcaagctcacctttgtccagtggaaaattgtttcactggcaacttctgagtgttatagtctgatactgatgcatatcctatagtgtaaccatgctctggaatcgacaaaacctggaaaaaagggcagctctgagtaacaatgtaacatgcactaattatcaacttaatgcaattatatacttaccaagtgttgctccttcacaatctctacaacagcactgaccctctggtggacttcaagttccttggagattcctcttttacgtttctggagcaagataaaacacaacatgatataagccgtagcccaatttagacttatgcgaaccacgatgagcatgggagaaaacttgaataaaacaaaactttgcgagaatatatcttcttagagtgaaaccttttttgaactgttggacacctctttggttaagttgttcaagagctcaggcctcaaagacaaatcaactagtctctctgccctagatatatcaagaacaactgcattgacaacagaaccgggtaccaaagtagctccacccactacaagaagaaaacataatgtatcagacaaagactatgtagagatgtctaaatcagatgcaatccatacgaaactgtaccgagaaacagattctccaaaatgacttactatgatgctgaggtataaaaccaaggacgttattaatattgtcaaaattcaccaccacaccaagatcattttgttcctgtatggttcccttgatcaaactcccaattgagaatttctcaacccagctacagtcacttttagtaatatcagatgattgcaggtccgatatctggacaaataaacagtaactgttagaaatcaatccttcttaaaaatcacatgaagtacagtgctagccagtgttatgcagacccattcgaaatatcctgacacaagctcaataaaaatgcagtacataacagattacattgagttctttagcccaataaaaagaaaaagatatgtctcaagaacaccaccttctcatccatgaggaagtactcttggacaaaagaagcatctacagatgcgcaagatgactgtttcaatgaaagagttatcctacttttttcttgattgacctgaaaaatattacaactgatcaagaccttataacatcttcaacaaacttaatctaaggcctttagtccagtgttcacatacatcaactatattagcccgaactgattgtccaacaaagaaggattctgacacatctgccttggggtcgtcaattgccttgaaaagaaaaagaaacaaacttcaagaaacaaaatatacaaacaaacatttgacaaagaaaattcatagtaaaaaacaatccaccttgcttcttggggcgaaaccagtcaaccgaccaagaaaacggacaaaacagccattttcaatcaagttacaaacataaccctgtatacgaattcatcaaaagtaaatgtgagtttatgaacgaattcatccactaagaagttactaaatttaaaaggcgcaactactcacatgaaccactgagtttggctggagctgattaaaatccgaaggaagctcttcagctaacttaatgagagaatattttgaagagagagccatattgttgccttcaatgtctaagataaactaaaattattactccacatgtaactataaggtatcatcaaccactaaaatagttaacttattactccgccttccttgaactagatgttttgattagtttttgatactacataaccagagatatgaagccgaactaaataatcacttggagaaagaactactctcataaaaatgtttctctctctacaatccatcagcaaccactgagaggtaaataaaattctagaactgtgaacgtttagacagtctcctttaaatgcgttaaggatatgtacataaagaaaacaaagttctgaaaagtagctagtaaataacatacctagtaccagcagcttatcaagctcatatccaggtcttaaaagtgacattattaattttgcttgctctacatcacaaaaagtaactcagaaacagatgaataaaagcaaaaccaaaatgaacgcttgtgtgggtcaaaacacataccatgatgatcagctaaatgttcagcagaaattgtacccttgacaacacttttggatttaacacggacaatgactgcctgactagttatagtatcaattatccctgatacaatgctacctaacttgatcgaatcgtcttcagaaacactgtcacaaatgatttacacaaatttgagctacagaatttaaggatatcaagacagcctttatgcgagatgaatatcagattaaaatagggaaaaccttgatggctttatcatgaaactaagggtgatcctttgggtaccatgaactgcactagttactctacatttgacaacctccccaacatgaaacactgaatctggatcacttccaggctctaaaccaagttcaaatctgtttaatcaaagtcagtatagcattattaatttacgaccatcaaaacagaaaaacttaaccaaagcctttatgagggggaaaaacatctgtgtagaatatcagtataaggaaaccagaactgaaagaaaacggcagttcaaatacaacaaaagggtgcagcaatgacctgggaacaaatccttgcactccattatagaagcgaacaaagcatccatgcttttcgatctttgttatccagccatgcgtcactagcccttcagttgcatcagtgtaagaactcaaaattggaagtttagacttcacctgaaaaagaataaacatttcatatttactgcatgagaacagaattgaaacggtagcaatagatgactgaaagtaaatagcaatagagcttctccactcctaagtcctaacctccaaaagagatacaaattgagacaaaagtccctccaaatatttttcgtccatagttaagtgaaatggtttaataaagaagaaacttattttccatttttaaccagaaagaaatggacacaagtgtaaaaagtaaaaccttgaatcagcagaagaaaataaaagaaggaacgataataaaaacgagatgcattttattacatagattataagagggaaatgatttgaacaattataagcctccataaaccaacaaaactagacatatcaaggaatatgtaaacaatttaacaaaatcagattcactatcataagaaaacttacaagtgtttttttgtaggtaacagttattctctttgatttgcagccaagcacacggaatactaattcagctccaacctgaaatagaacatcattcaaaacttaggcatgccgcaacaatgttgcaaattaatcatgtacgatcaatgtaaccaaccttgaactttttcctaggcttcgtaacttcaaactcagacatatgccgaagtgggcacattgctttgagaccacccgaaaattggacaatggcaccaaatgtatcaacagatatgacttttgcctttgtcaccataccaggcttgacatcagagtgggtgaaaactggaccttcaaaggcgctttcctgctcaatataaaaacaacatgaaaagaaagaaacaaaccaatgtaaaacaggagcaaaaaaacatacatgtcccaatagagggtataaacgtatgattccgcaccaaactactgcctatttgcttttagattgcaatacagaggttgaaatgaataatcgaaactaaaagaacaatcttttagcatatctggcagtaggatacctttaaagtccctacggccaacccctccatctgcttaaggccgagtactcgaacacggatgtgatttccttccttaaacttcttttccagtttcgttacttcatctccggcggcatcatatgtctgcagcaacgttaaacctcaagttaacaaaggacatcaaaaagctcaatcttttcaaaaataaggataggtaattggacattacgctaacgtatgctggagttggtgtgggcttagagggaagttccagaagaaggcctgatttatcaatacgaactacttttgcttcgtcgaatatgtctccgctaaagacatgctgtaaagagccaatacaaattttacaaaaatatttttagaaaagagcaaagacaggtagacacgaccactaaacccatagatccatgctgtctcaggtatcaaaggcttaagtatgctaggcagtggtaaaaatcgtggatgtaagaaattctgatgttacaatcactgaccagtcattaaaccataaagtagctgtcaaatcaaattcctttagtcattatatatcagtggaagcgcatggaattagtaacttaccaatggaggagccttgttacaaacaacatgagggctcaatgtcaaaccaacagctcgagatgatggatcgataaacaatattctagcattaacctgaaaaacaggagcattttatacaagttaaaaaaaaattacaaagcatataaaacaaactttcagcagtagagagaaagaatttattgcagaacaaggactatttcagccttttaccaaacctatggtaatcaaagaaaacaagttgtgttaaacatccaaatagaaggaaatgtatgcataaccaacactcattaggaaggagatgtaagtttgaagtaacattgtacctattaggttttttgtaacaactgctctggacaagcaattcaacttaggaaatatagaatttgaatcttattcagattggtttgattagatttacgatacggttcaaagttggttttttagccatagtacccttagttatggttttttagatatagaagaagtgaaaccaatcagttttggatgatttctattctgtttttgtttgatttgatttaccaaaattgaacaccccttaactatactccttgcaaataagcatggaaattctaactacagagataacaagaaaacgccaaggcataaacaaacatggatgtgggactagaagatctgcaaactatgatgacaatcatgacatatataatagaaacacagcaaatagaagaatcagaaaagcgtgacaccaaaatgcataccgtcttattctgattatactcatctttccagcttttgttagataatggattttttaggtggaagagatcaacctgcacatcaatgagaaacgtaactcaaaagtatcaacaagatttagggttgaacatgaacgagaccattccagttcaagcaataatatacaagatcaaaatcattagtaactcaccgttccattaaagtacgtaagaaaatcaaacagtatcccattctcgaggactgattgcacgcgagcattaaccatcattcctgggatgagaagatcaaacgacatgccactaagatccttggtctgcaaaatggtattcatgtggttaagtttgtgtaaattaaggaaccttcactcggtaatttgcaacagaatgttcaaggttcaggacataccagacactttgccactgaatctgggtcagaactaagatgaacaattttacggtctctatcgatctttgtaaccacaccctgaataagctgcccagtcttcattcctgactcctggtttcctagaaatttcagaaaaaggaagatgaaatttttcaaagatggtcagaagcagaagcagaaagccaagaaacttgcattaggatcctctaaagtatttccctaagttggacatatacagcccatttttatcatgatgtacattaagaggtaaactgaatatcattcccctgatgaaatcatatttaaaagttcaaagtgagacaaagagctaagaggccagtagtaggtcaaccaggttacttaccatcgtcgcttatttcgataaatcctgtgatagaaggtaatccaaaatgaaggatagaaccatggtcttcgatgcttttcacgtttgcagagaacacctgaacaagcatatggaatgaaatataagataattattttcaaacaacacatcataacctatatagaagagctacaaggttaacaactatcagcaataaaaaactgagttgcaaagtatgaccccagttcagaatagcaaatatatagcttaatttcattaaaaactgctagcatatgcaaaaaataaagcctaagctcagtcagccatgaaatctccctactcgtttaggatttttaaatcgcttaggtatgcaaataaacttgcatacccgtacgcagaaatacatatgaaaatattaactaaggcagagctcccaagtagtacataattacaaaattaaaggaaagtgaaccaaactttgacataccatccctagttgaaaggaatcaaaactgaatcccttgtgcaacaaagaaagtcgcaatgaaagccatattttccttttgcccgcctccttcttatcatcatctaactccaatacaatgcagggaacaagctgacccacagaaaaaatgtctccaaggagttcattttcatcgtcctggtttacaaagagaggaccaactctaatcagattgcagaaacaataatggaaaagggccaagatgaccatcgtacagggagcttaaacagccaattatagcctacagcagttacctcaatcccacgatctgtaaaatctgatacctcgcttgcacgaactaatccgcgtaagccccctggaagactaattacaatatccttctggtttacttcagtaacaactcccaaaagtttcattcctggggaaatattctgaacatttattcacataaaagtcagcacatgaaaagtacaggtataatatgattaagaaatcttctaggacagtaaaaccacgcaaccatggttatgagtatagatggatgtcaatagaaagctaaaatggcataggttatggcatcatctgaagaatgcacaagtgtttaaaaattgtaaagcaggcatcagcaactgatgtaagaactatctatgtagataaagcgtcagaggacattcattcagaaatctagtcaatgtaatctatggaccttgatcaatctaggttaaggttgttttccaataacgttgatcaagctataaattctgaagtttagtagaatgtacacaaataatttgttccaggatgaagaaaagaaatgaatctgatttaaatcactaaaacccaatgaaagtaacaaaagtgaacgatgtggaatgtaaaatgttacaaggataagtctcttaaccaattctgactaagacggttgcgagtaatataccttagtggtaatcttattggcatatcttggccgttttccatgaaggccgccgccaaaaagcaaacccaagtcgtctaaatcgctagggattctctttttagacttaccccctttactcttcttagaaacacgctcatcagcgtcaaactcagcatcgacttcttcataaagtttctcacgctcttttttactcagagaagtacctccacctgaaaatcaattaaatcatattaacgataagtaactgaaggagagaaaatgaagctagcaacttcatttttagctacctaatcaaatgtttgggattcgtgacaccgagtaataacaaaaggaagcagaattgaatagtttattgtataacaatagaaattatgagggggaaaatcaaacctcgaggaaagtcgggaacatcttcgagctgaagagccatggcttcagacctagcagctacatcgtccttggtcttcttaaacggtttcttcattggtttaaaggactttgtagaatcattacgttttccattagcaaatttcttctgcggtacaaccatatcttcaatggcggacgcgagagagttgggagctcgtttttgcgtttgtttgtttttgtagggtttaacactgacgaagaagacgaactttagggttttttctgggaaccgcctgatttgtaattttaaccagaaattaaaaattgcgaaccggtcggtttggattttacccaaaaaaaaatcgtaatgggcctttattgtaaatacaatctatgagaggcccactgtaggacattcgcgaccttcttgttgtagagaaagagagagcaccggcgacggaattgcatttctcttgtgggatttgattttcacgatcgtatagtttttgcatgtgtgtttctgtgattttcataaacttgctcgttttagctatgaacttgtgtttctgattcaatgtcaaagaatctcttcattcgtctgttttggtaatctgatcaaaaatgttaatcagagcttctgccaactacatctggtttcatttccttagcgcttaatggtagcttgtatcttaatgcatgacatctatgctagtgtatcttaaatagtgtatcttggcttgcggttcaggatagattattaacgggggaacgtatgctgcaatggaacagaggcgtctcaagttattgtgcgttctgcacaaacactatagagtctcccaaccatcttttcttctcttgtgtgttacagggaaacctgcgattcacaagaacaatccaaatctccaattatcattcgaaaccaacaatcaatcgatgttcataaaacaccaaatgattcagctagctctcgatgtgagagaaatctagcacttacaaaggttctagagaattctgaagattacagattattcgataatgaaagcatgagcataacatgttgctcttatataaaaaggtaaagaaagtaaacgttaaccacgttaataacgatcgccgttaacgtccattgcattgccagctcgccagctcgccagctcacaagtactttgcctaacatccgacttcacattgccagctcgccagctcgtcagctcaccagctcaccacacgttaatcctgtatcaaatctcccccctttcacaaaaccttgacctcaaggttctatgcttcaaactcaggaaatgttttctgcaaatcgaagaggaactcccatgtagcttcttccaaaggttcattgctccatttcaccaacactttagtgacagcttttccctgacgattgaccattttcctttccaccactttctcaggtactttctcaaagacatcttgcatcactgaaggcaaatgaactgttgtagagacattgcccactagcacctttagctgcgaaacatggaacacaggatgcacttgagagtaagaaggaagagccaacttataagccacttcaccacaacgatcaatgatcttatatgggccaaaatacttcggtgacagcttctgattagcacgcatcaccacagattgttggcggtaaggttgcagcttcacatagacataatccccaatctcaaattcacgttcagttcgatgctggtctgcaaattgtttcattcggtgttgagcgcgcatcaaatgaaacttcaagaacagcaacatatcttccctctcctgcaaagacctagccacaaccgccacttttgattccccaggcagataaggtaaatggactggaggtacctgcccatacactatctcaaatggcgtcatcctgctagaagagtggtaattggtgttgtaccaatactctgccaatgcaagccatttactccacaactgaggtctgtcatggcacatacaacgcaagtaggtctccaaacatctgttcacaacttcagtttgtccgtcactctggggatggtaagcactcgtcaacttcaatgcaactccctgtaacgtgaagaactctctccaaaattcacttgtaaacacaacatctctgtcactgacaatcgaagtggggcagccatgtaacttaaaaacgttgtccaagtaagcatgtgctactgtcaatgcactataaggatgtgataatgcaatgaagtgagcagccttactcaagcgatccacaacaaccatgatgactgttttgcctcctgaaactggtagcccctcaataaaatccattgacacttcactccaaatggtatcagggattggtaatggctggagtaaccccggtgaagctgcaggatcagacttacattgttgacatgtaccacagctgcgaatataagcttggatgtccttaatcatgcctttccagtaaaacagtcctttaacacgctgatgagtcacgtccctgcctgaatgtcctcctacacccgacccatgtaaccaaagcaatattgtattcttaatgttgtcatttgctggaactacaatcttacttttccttctcagtatattctgactccaagagaaatatttttttgaatctggatcacgttgaagtgcagtaataatatcttgtaactgagagtcattggcatagcctgcttgaatatccttcaacaaatcacactccaccactgtcatagccatgtgcaacacctcagatccttctacccgagacaaagcatctgccactacattttcttttccttgtctatactggatctcgtagtcaaactcgagcaatttaggaagccactgctgctgaattggtgtgttcaaacgctgctccaatagatacttcaaacttctttgatcagtcttgattatgaagtgactctgcagcaaatagtgtcgccattttcggactgcaaagataactgccagcaattctttctcatagatagataggtgtagttgcttcccttttaattggcgactaatgtaagccaaaggatgtccctcttgcatcaaaaccgcccctatgccctgaccacacgcatcagtttctaccacgaattgtttatcaaacagaggcaaagataagacaggcgcttgacacaaggccgctttaagatcctcaaacgcttgttgtgctactgctgtccattcaaatgcatcagttttagtcaaagcatgtaatggtcccgcaataaccccaaaactccgcacaaaacgtcgatagtaaccagcaagacccaagaaccccctcaactgcttgagtgttgttggttgaggccactccttcacagccttgattttcgcaggatcagtttcaatgccttgtgcactaatgaagtgtcctagatattcgactttaggaaccgcaaaagcacatttgctgagtttggcaaacaacttattagctcgcatgacttcaaacacttgcttaaggtgctgtctatgctcttccaaggaagaactataaaccagaatgtcatcaaagaagaccaagacgaacttacgtaagaagggcttgaatatgaaattcatgagaccttgaaacgtagccggtgcattagtgagtccgaagggcatgaccaagtactcaaaatggccactatgcgttttaaatgctgtcttttgtatatcatcaggatccatccgcacctgatggtaaccagcccgaagatctatcttggaaaagataactgcacctcccaactcatccatgagatcctcaatcaatggaataggaaaactatcttttacagtcatgccattcaactcacgatagtcaacacaaagtctccaagttccatccttctttttgaccaaaacaacaggtgaagcataaggactagaactagcttgcactgttccattagtaagtaaatcctcaaccagtttatcaatttcattcttctggtgtattgaatagcgatagggtcgctgattcaccggattagacccctccaacaatttaatcttatgattatgcttctcacgaaatggaggtaaagcagtcggttcaatgaatatatcaggatactcattgagtacttcttccactacagactcctcaccaagctcactggttaaagcattaatagtacaaagttccccttctgtactctccgaaacttcttgtacacataacatggccagctgaacttgatcttcctgtagtttctgcagtttctgcgccttcacttccctgacagaacctgatgtaagtccatgtaaaagtactttctgattattgaatttaaatcgcatttccagtttcttgaattcccaagagatacgacccaaagtctccaaccattgcacccctagtaccatatcaatcccttgtaagggaatcaataagatatcagactgaaaagttgtagtctgcaacttccaagagaaatcagtaactttaccctcaacacgcaatttcctgccatcagctacagatacacgagttaacccagctgtgtccaccttacacccaagtttagctgctgtatttggatccagaaagttgtgtgtcgaccctgagtctatcaggatgaagataatctttttgtcatatgttcccttaactctcatagtcttgtaaccagctattcctgaaaccgcattgacagagatttgtggcatatgttcatcatcgtcatttaccaactcttctctagcatcttcaaactcttcatcaacatccattcgaaacagttgtgttttcttgtgaaccaaataatgttctggagtgtacttctcatcacaaaaatagcatagccctttagacctcctatcactcatttcttgttgagacattttcttaggttgctgactaaccggtttaaaatttcccttgtttccataatgatctgtcttagactcgccttccttctgatatttgttataaccgccagtaggtgcagaacgatttgtggaccaagtagtattagctggtttcttagggtgtgctttctcatatgtcttgcccaagaacaagcaatgtctcacagtttgaggctgaaacatccggacgtgcatttgagtgtctgtcctgagtcctgccaagtacacactcaccaaatattcttcagagagattaactcttgttttaatcagctcaaatttctgatgataatcaatgatgccatcagtttcctgcaaatgttttagctccgccatagggtcatcacaatcatcctcaaatcgttccttcaacagcttcacatatcccttccaatcatacaacacctcaagaccaacacccgactgaataaaggactgatgccaagtagaggcatggctatcaaagtggatcgctgccattttaaccttcatatcttctggagttgaatccacaccaaaaaactcctcgactttaaacaaccactctttcaaccgtgtaccatcaaaccgaggaaaatcaattttccctaaccgtgtaagattattataagcattaaaatggtctgatcgcacctgctgatgacgagcatcacgatatggatcagggtaaccggatctgttctccatcgactgagacgacctcggcgcactccgatctaacgtcgattgctcatccaccatcttaccagctgtagatcggctaagcactgcatacaaatcagcaaactgcttcatcatctccttatgttgctcagcgaccgtcgtttctaaccgcgtaactcgggaatccagcggaacctccaactccacctctttcccctttccgtcaccctcctgcgaccttgtagtcaccatgttttccgaggaactacagagctctgatacctttgttacagggaaacctgcgattcacaagaacaatccaaatctccaattatcattcgaaaccaacaatcaatcgatgttcataaaacaccaaatgattcagctagctctcgatgtgagagaaatctagcacttacaaaggttctagagaattctgaagattacagattattcgataatgaaagcatgagcataacatgttgctcttatataaaaaagtaaagaaagtaaacgttaaccacgttaataacgatcgccgttaacgtccattgcattgccagctcgccagctcgccagctcacaagtactttgcctaacatccgacttcacattgccagctcgccagctcgtcagctcaccagctcaccacacgttaatcctgtatcattgtgattccatctcggtaatctgtactgcggtagctaaaaagctatggaagtctagtttcacgacgagatggccacagattctagaccacatatccgacaagtccttcaatcgagtagaaggcttcttaatcaggtacgttttccaagtcacggttcatacaatttggagggagaggaacagacgacgccacgaagaagcagcgaacacttcgacacagttaatcagctggattgataagcaggtcagaaatcaactcaccatcatccaaagagcgggagatcgacggtacgacaaaggcatgcaagcttggttcaaagtgagatcatgacagcataaattttttttaaaatactcttaaacacatcaaattctttctattttttctgccgcacaagttgtaaaaacgttattttttctttcgagtttaatttaacattacattcaaaaaacaaatagtgctttattggtttcgagtagccatttcattatgaaatctggaacagtggaatgtatctgagccaaaaacaaaattaagtagagaattttgttatcatttgaaagcagaattttttgtttatagattttatttttgaaattagacaataccctatgggctatgacacatttaataagatttaagacaaaaacgtggccatttgctaattgttgtttttgttgtagcaataaccttagtcaaaggattttgtttattgcggacccaagttggttggtcggctcttgcttaaaccacatttggaatttgttgttctggagtctggagatcattaaaacacaaccaagaagatagcgcactggttttaaagtcgtatgtgtagttctttgttcaccacgagtttaaggttctctttcatgtctcattgttctaaatattcatcttcggttgcatgtttaacttcatagtccagtttatattttccatctagatgattgggaacattttgcttacttttatgatcttaaacagatgaacggtctcatgttaacaacatagtactcttgacttcatgataatttcatatcatctaatgactaaattctttgcagagtttaatggtgttgattgttgaaacaagagcagattggtcaatcactgcagaaaaaaaaaaagttggtaacatgtaagtttaacgttatttaataaaggaggatctaagttttctacaaaagctataatttttatgatgaccatataatcctcaaacccttcaagatgtgatgtgaattatctaaatcccaacacgaagaaatgagattttttaaagttagctatttatccttagttgatttcttaattataggttaatggcaatattttttgaaactgataatgcgtttcttttttttttctgaattctagatgatcacgtgtaggaaactgataaaatgttggaaagaattcgtaaggcaatcttttatttcacttgatttttaaaatatttatttgcctataaaacagaggaagtttttcatcatcttttgtccttagaactaaccaatctttcattcctcttataaaaacaaaacctactttacttgtctcttaacgataacaaaataacaaataattaattctgttcttggtttacttaatcttctttctagttaagtatattcttgttgctcatcaccaaaggtatgctttctaggttaagtatattacaagtcaccaatttcttaaccaacaagcttctgtttcctcaaaagataatataatgaaatatagtatttgttttagaattgtacaatgtccacagatattttgatagtcttatttagaaatgacccttcctctatttcttatttcttatagcttgtgatggaggctctcttcttgagttcttcttcttcctccattgtagcgtcaaacaagcttactaggttacacaaccattgtgtctggtctacagtgattagagataagaaaaggttcggtcccacttggtgccgtgtaggtggtggtggtgatggtgggagaaacagtaacgcagagaggcctattcgggtttcttcgcttttgaaagacagaggtcaggtactgattagggaacagagttcgccggctatggatgctgagacattggttctgtctccaaacgggaatgggagaaccattgagatcaatggagtaaagactttgatgccttttagtggcgcttctatggtggggatgaaagaaggacttggcataatcagtttcctccaagggaagaagtttctaatcactggctcgaccggtttcttagctaaaggtaaaaaaaaaaaaactccatgtatatatattcattatattccacaattatccgtctctaaatcatttctttcgatatatctagtactgattgagaaagtcttgagaatggctcctgatgtcagcaagatatatctcttgattaaagccaaaagcaaagaagctgcgatcgagcggctaaagaacgaggtaagtccctttcatttggattctttgttagtcaagttctttacttgttatgtgcataactctggcctcctttacaggtgttagatgcagagctttttaatactctaaaagagactcatggagcatcttacatgtctttcatgttaactaaactcatccctgtgaccggaaacatttgcgattcaaacattgggttgcaagcagattcagctgaagagattgcgaaagaagttgatgttataatcaattctgctgctaatacaaccttcaatgaaaggttggcaactgtcagattatgtgttttgagttctcttgtttagttatctagatatttactaatcttgttatcattttggcggagattgaagatacgatgttgctctggacatcaacacaagagggcccggtaatctcatgggattcgccaagaagtgcaagaaactcaaactgttcttgcaagtatccacaggtacgtgaatgtgacaaaacataaacagagctaaacagtcttttctgaatgttccggtttcttgtgcagcttatgtgaatggacaaagacaaggaaggatcatggagaagccattttctatgggagattgtatagcaacagagaacttcctcgaaggaaacagaaaagcattagatgttgatagagagatgaagttagctcttgaagctgctagaaaagggactcaaaatcaagatgaggcacagaagatgaaggatctcggtctagagcggtactaatctctaaatattcagcttaactatcaaatatttgcaacaaccttaaatacacaaattattgaaacagggcaagatcatatggatggcaagacacttatgttttcaccaaagcaatgggtgagatgatgatcaatagcactcgaggagacgtacctgttgttattataaggcctagcgtcatcgaaagcacttacaaagatcctttccctggatggatggaaggaaacaggtgaagctatattctaatgctgcttatatgtatataggtgtgggagaatttgtacgtaacaaaactgattcttctacaattgtgttacatgatacctaaaaatcaggatgatggatcctatagttttatgttacgggaaggggcaactcacggggtttttggttgatccaaaaggagttcttgatgtagttcctgctgatatggttgttaatgcaacgttagctgctatagcaaagcatggaatggcaatgtcagatccggaacctgaaataaacgtgtatcagatcgcttcttcggcgataaacccgctggttttcgaagacttagcggagcttctttataaccactacaaaacatccccatgcatggactctaaaggtgatcctattatggtgcgtttgatgaaacttttcaattccgttgatgatttctcggatcatttgtggagagatgctcaagaacggagtgggttgatgagtggtatgagttcagtggatagtaagatgatgcagaagctaaagtttatatgcaagaaatctgttgaacaagccaaacaccttgctactatttatgagccatacactttctatggtggaaggtaagacagaactcattaacattctaattcttagagcagacaaaaccggtacccgcaaagttttcatcttttttttttggtttcttttacagatttgataacagcaatacacagagattaatggagaatatgtcagaggacgagaagagagaatttggatttgatgttggaagcattaactggacggactacattacaaacgttcacattcccggtttaagaaggcatgtcttgaaaggaagagcttaactttgaatctcactaaaccagaccaaacagaatcgatcccttcttttatctttttatctttttcttttttcattacgtgtaatcgtgttgtgtctaatatatcagtttgatttgtaataatttgaaaaaaaccggaaatgttgttatctttaagtttgcccaaaatctatagtcatgttcgattcaagacaaagtttaaagttacaacctgtaaaaatattaatagtctttgatgtaaacgtatcttaaacaaaattattaaatgttgaagttagtaacatacaattattaatgaataaatgtttaatcaattaaatgtcatttagtgattgtcctataaaatctcttgttttcttgttttatattatcaatcttacatccaaaacttaaagtattcttacatccaaaaacaaaaaaaatatggcaaagtctcttctcatagtaatgctcatgtctatagtaatgttttacatggctcgtccaattttctcccaaaaaattaatccatatttagaggtgatgccaaaagatgtgaccatatctccatcttcaaattttgattacgtcgaagctcccgatgaagctccattcgaagaagctgattcaccagcaatggaatatgacatggagcttgctcaccattattcggacaaacagctcaagtttcttgaggcttgctctgaaaagccgagttcaaaatgcggaaatgaggttttcaagaacatgttaaatgagacgatgctaattacagaggaatgttgtcgtgatatattgaagatgggcaaagattgccatctaggattggttaaactcatatttgccacatatgagtataaaaatattgcatctaagggcattccaaagagcaaacaaacatggaacgaatgtgtccatagagtggggagcaagattggtgctccggtctcttttgaacaatgaactaatatttccgtgtattgatgtgtctatgcgtttttgtaatttgattattactaatataaagcaactgctactattttatttttgataatcaagaagtcaaagccttacaatattttacgtttttattcatcatttgaattaatccatccagcataaactaaaaacgcatatgtaaactgaaaactttcaaatataaattgatttctcaagggtggtaaaatgttccaaattcaacattcattttcgatctaatcggatatgaaatttaaattagatatttagactttcaaagttggatttcaaaatataatttttaattttgtattattattcttaaatattttttagtggatatagatatctataaagcacggatcatatgaatttccaatattctaaaatatatcaagatatccaattttcatgtctaattatagaggcctattttgacatatagatcttgacctccgacgacgtaattcctcatatccatgagctcctccggtccaaatcacacaacccgacccaccattttggatatccttattcgcaaacccggtacaattacaatccttagaacacctctccttacattcattcaacccaattgtcttgtccacaattgctgtgcttgtaccaggcagcttcatcctcttcatcaaaagaaaaaacccatctctgtggcagttcagtcgtgacttcctcacacatccctcaaatgtatctcccaaagcccaagccgtcacattctttggaacaaagcctttgatacagttacacgtcggtgatgttttcgtgtcacaataactatcacgaccacatatttggtacaaatcgcatttctcggtcggtaaaacgccaaacaagttccattccgatgatgtcgtatcccatctggatatctgtaataatctttcggtagtcagtgtaaatctcacgtagtgcatgctatggtcggtgactttgaaactataagcaacttcccctctgttctctatgaagttgttaacaacgtcaaagtagctccagttttgcatcgtcggtatgccactaaacccgactccattccacggaccggatcggtacaatagaaactctttcttgaaaagataaaactcaggtagcccttgagttccgagtttgaacgagaagtctccgcttgagggatcataagggcttctccaagaactgaggaaagtctcgtgtcctgttttgagatcccgaccaattttcatctccgggagtaatgtgtccaccggataatcaaagctttgccacaagaatcggttttgatagttgcctttggagtctctaagcacgaagttgccgttatcgagcagctctgccaccactggagatttcaccgttctcgttagattcgttgaccaaacaagagtaccagaatgatcaagaaggacgaggttagcgtaagagatctttaatgttccgatagacttggaaagagggttatctctgttggcaacccatacataagttctctcagagattgacttgtaccaaatcccaagataccaatgatcaccatttcgagagcttgttgtagttttgaagaaacctagctcgaagatgttaccgggagacacaatggttcggttgcttgagattgttagagtttctgtagatgacaaagtgtttatcgagaaaacatgaagaaacagagctaataagacaacgaagaagaagaagaagaaagtgtaagaatggtaatagtttggtgttacgcctctcatcttcacgactttctttcttatgctcttctttgtttcttaaaacctatatttatagatttcttcacatgttggttttcaaatttgcaaaactcattacaattatttctagcagacaagacaaatgtaattttccacgttctatgacttttcagtacctcattgattcacttcaacaaactactgtcattagtcgataacgtcaccatgtgaaattaatttgctcgtgcaacataacatatgttgttgaacaagtatatttattcatccatgatcctcgtccccaagaaagtcatgctatggcactcgtaaatgcatttatcgttacgttcgatgtattttaatcttctcgatgtatttcgaattctacttccatgacatctatgctcgcaataagtcgcaatctaacaagcagcgaaagttgccgaagcagcccaaacaaacacatccttaacatattgttgatgattctccatttagtgttcacggagggaaaacataacggaagcatgattagcattctaggattaacatgtcttattagagcaattttaatttttaatttagattcccggttcattgggttagatccaattctatccggttttcatgtgagactggatttacaattgcaattaacgtaccggatgttatgggccataatgggtctacaggcccaattgtaatgacatattcacacacgtgtcgatcccttttcattagtttcttcacacggtgatcgtttgttcgttgaagaagaacaacaaccatcaatttccggacgagcaagccgaggaggtctgtttgtacaaaaactcgaaactactactcttctgtctgattgtagcaactccatcactgtatttatattcatctccatctgggttttcgaaggtaacacttctctgttcgtcatcttccattttcctgtgtgtttaatgtgtaatctccgatttccttttttgtttattttgtaattccctctaataggtataagagatgaaaattttggtcgatcttgactttgtgtcgtatttttttttgtaaattgatttttgtaggtgtttttttttcacagtacttggacatagatttggtaaatctactgtttctataatgttttgaactaaaacacttccacttttccttttagctttagcaatgcaggcatgaaagaaaagaattccactaccgcctctacacttggacggattttagctacttgttctaaacaggttggtttgacagctccaattacttttttttttttttaggtttcgtaatgaatttgtgatagttttgctagttgttatattacgacatcaattttaaagaatgtgtgaaattatattatgtcaattgtgaagcgataattcttttacgtgtgcattgtgtcttgaagatccagtccttgttattgactagaaagtaaacttgttacaggccaaagactacgggagctgtgttgcatctaaagttcatgaggttgaaagagatatatgtttgaaagagtttcttgcgctgaagagttgtatgcagcatacggtatattgaactatattgttagagtcttgtcttgatcattttatcctcatctttgtagactaatctgttctattatcatgtttttttttcttatagatccgaggaaaggcttgaatcacaattatattctccttttcgttagaggcatttatcagcactgcttgaagttttaacatgtacgcctttcttttttattttcaaatctttgtgaaacatttctgagttagtctgtggttttttataaaaactttaattgactcagtcccatcataaagtgggacatccatttcataacatttcattttggactaaagtttggttcctttgaaatttgggaaactgaaatgtatgaatatgtctagcaggaattcaagtgcacaggcaggtgttggttctggtgctttatcacatgtctatatacatcatccatccctacgttgcaatattcctgaatccaatgggttattctatgatgatgccaacagattgctaatatgtaccacatctagtcaggtgttttattcttttcctttgaaatgtttgatttgattttgttttacccataactgatatcttccattagcctgatgattcatatcctttgattatttcccaattttttcatttaggtcttttcatgggaaacatccccctttaatccagacgtacctccttcagttgattctataagtgaagggcctattctatcaatcagattttctcttgataaaaaagcgatagctgtccaaagatctgactgtgaaatacagttgtttaatcgagagaccaagcagatacttaaccacaaatgcaaggcaggatcagagagcattctcggattcttttggagtgactctccattatgtgatcttgcaattgtaaagaccaggtaaacttgctttgttttctgcatagtttgacaacagagaaatatttccaattctgagattgtttgcaaccttttcagttgaattttaaagactgattggttgtagttgagaattctaataacttgtttaaacgggaatttattggcttgtaagctttgattttagaatagttgtaccatttgacttggtatttctaaggcaaataaccctttcagtatcgggtaattgggtctggacattcctttcacaatagagcaacctatacatagttgtttctgtcttcagctcgtctattttactataactttcaacatttcgcttatcatttgtctttctcttattcttttcccctctaatgaaatctttttttttggtctcagtggtatggacttgttcgcttgtgattctatgttgaattcactacgtttggtggaaaccaaaaaggcgaatgtgaattggtacatctatacacatgaaactcgattggttcttcttgcatcaggactgcaatgcaagacatttaatggatttcaggtgaactcctagaaaagtacaaaaagatgaattttgctatgtgaaagagcttttccaactttgttacgtataggttgcatccagttaatttgatgttcatggccttaagatatatatgctacagttttcattcagcttttatggtcgagttaacaattaaataacttaaaatatgatccacttttccagctttccactgcaggagttgttcgtttaccgagatttgagatgacaatggctagatctgaatcaaacagtaaacctattctctctgctggagatctccacttagtcactgtgtatgattcttctatgtgttcctcttttcctcctattttttgtcattatcgcactacgtaccttgagagtaaatctgtatcattctctttcagctatggccgaatatattgcttacaagtggacagggaggcaatgctactgcatctatacaggttctaccgtgatgcagtcgtccaacaagttagtttacttttccttagttcctgatatctggttattcagatgccatttaggcaagtctactatatgttcaataaagatcatgtgtgcatttagatcagcaaacttctaaaatttaaaagttgcaagttcataggaaaatcattacacatgaattactctaattgcaactgcaagaggagggtaacctatacgaagttgatgctaatattactttttctttagttatgttactaatttggcattgcaaaacaacttatcttgtgttctggacatgagatcattttccaaagttctgctctttatttgttcattggattggctcttatttacagggttctttaccaatatactcaagcaagttgtcggtgaatgtggtcgacaatttattgcttgtgcaccaaatcgatgcaaaggttgtcatcatctacgacttatttgtggattctcgagctcctgtatctgcgcctcttcctttactgtggaggggttaccaagtctctgagacatcgtctcaagctgttaacaaagaaattgagagctcagaatcatctacaagcaatgaaaacatagtcatgtatgaagatggctggacctttctggttccagaccttattctggatcagacaaacaaggttttatggaagatacatttggatcttgaggcaagttggctttcattagtttatccagatgacagttaattcttagatatgtcgtaaatgttcagtatttaatactatgtgctgcaggcaatttccgctagcagctcagacaggacgtctcttctagaattcctgcagcgaaggaagttggaagcaaataaggtccaaactttctgttaatctgtgttttagataggagtttaaaattttgcccaaaaaacaagatatgagtctaaaataaacatgatgaagcacctgtttgtagcagcaaaccgtttgaggaataaatcatagacaattgataaagaatcttggaactttagttatggtttttgcgcagttagtgaagttatatgcaagtctaacttaggaaataactagtgctcgtttccatatttaatggtttgtagcggttgatgactctttttctatgattacgtgaatttatagtgtctccaggaaaagtggttcacgaaaagtgttcggtgtttgtagtaatcttggttggatcttttgatggtgttgattacgttattgcaggccaaacaattgtgcttggggatagcaagggctattattttggaacgtcgaccagcaacccaggtaactcaggcaatcgatgtactagtcacagcatattcctactcggttaaagccggtacatacaaggaaataaagaacgaaaacgccactgcatctactccaacccctggtgcatctcctggtaaaacctttgaacctgaaaatgttattttatgcatgaatatgctaaatgagtgacaatctcttaacacatcttctcaacttatcaacctttggattctgaagatagcgaaagacataggcagtctggaagcaatattgatgaagaagttgagatgaacctatcatctggttctcaggagaacatgttttgtgctgatgaacagcaagaatctcaactctcttcaccggcaatttcacccgatgagctctacaagtttgtatttacttctgtggaggaaatgatggttgaggaatcagagtacctagttgctatcatcaccgagttccttcgcaggtaaactaactttttcttccgtctgtttgtgtttccagagactaaagaaacttggtttttgctttagatctagtctcagtttaccaattctgcagtttcttactttgatcctttgttgcagtataagtgcagaaaaactcaaagtggatttgaacatctatgtgatgaccatcaaacttttagcttacagtaagcgatttgcagaactgtcgctattcaccacaaacaaggtttgttattcttctttatctgtgaagacaaaacctcctctaaggtttcttgttcttagagtttaggctacatttatgtgcagataatcgaaccatcaaaggaagtcgcgttccaacttctggatagtggtcgtcaaaatatccgggtaagaaaacttgggcttgatatgttgagacagctctccttgcaccatgattacatctcctcccttgtgcaagatggatactatcttgaagctctgcgatatgctcagaagcataaggtataatatcttaacagatgaaagtacactatatctggttttggttttgattaattccgtgtatgcaaatttgcaggtgacgagtgtgcgatcgtcgatgttcctagaagcagcattcgcgtcgaatgatatgcagcatttggctgcaattttgagggtcttgtcggaattgattcccgggtttaaagaaacttctgaatattacaccttttatggtcttctcaatgacaccagttcctcagttgctgtctgaagagaatctcataccacattttatgttcaagaaagtaaaatgatctctggttcttcgactggatcttgataaataaatgctgttgaacattttctggttcctatataagaataactataagaattggttttaagacatctctaatgacgagaaaggtaaattaaattaaggaccaaaattagatacagttttgctaagtagaataaatatctctttttgtttggtttgatttgatatattcaacataatttgtctaaacactgtcatcttcaaattgtttgttaaactttcatttttttagtaggtccaagctgtgactaagacacttcaatgtactactaattatctctgtaaactccaattttttttttcttcaccaagtagtctcgtgaatctcaattggatggcaataaataaaaaacaaaatcctttgccatcaactgccaaagtcaaagtcacaaattaaaaaactataaaattattcttctcaagattttcgagacttcttttattcgatggaaaaaactaaaatcgtcactctctctcctaactgtatccgtgaaggcaaaaaatacgtataaacagatacgtacagagaaacgtaagtatgtaagtatactcgtctagctttctctctcagctgtacctttttattatggtgtttttggtaacgagaaaaccaaacccacacaacattcaattgaaattgcgactttcgatttaaaactctctttaactacaatcgctatccacgaacaatctgattgattctctctctgagatctctctatctatctatctatctctcttctcttaccttttcaatacgatttcggattctgagctgcgatgcttctttgattcacttgagaggtactctctttctctgtcttcttatggaattttatcaaatgccgttaggtttctgagaaatccggtgataattcgatgatttcttacatagtagcgattattggtttttttttgaattgtccatttcgtgcttctctgcgattatgattctctgatttcatttcacgtcatcgcttgctctttagctgttttcatcgcttttttgccccaaattttttaattgcaactttttctgtttgtgcggcttcggcatgaactgtgaggaaagcgagggtcctactgcgtaagtttaggcttttagcttagtgtttattggtcaaattcacttttttggcaattttaatttcatggaaagctagaaacaaccttaatataaactgcttacttttcatggtttttagtgttgttgttagagctgacgtaacaaaggtttctataattggtttgattagtaaattttggtcatttccttcatttttcagttagtcatttcttcagatgtttagaaatgggaaatgctttatgcttgaggtttatcactatttattgattgttgttttttcgtgtctgtattcagtgttttggagttttgactacgacttgtgatggcatctagacaaggatcaaaatcgagaaaagcagggttaaagggtgctgattctactgcatcttcgacaacctcgtcttcgaagctttatcaagagacttctatagatggccatagctcccctgcttcttcatctgctcaaagcaagcagcagttcttctcaccagatcccttaccacaaactgctcagcggtctaaagaaaacgtcacagtgacagttcgctttcgcccactcaggttcttggtgatatgtttacatacgcttgcaaaaattaggttgatgtttgttctgcgaatttgacataccttatcctcgatgtagtccaagggaaattcgccaaggggaggaggttgcatggtatgcagatggggaaactatcgtgcgaaatgagcataatccgacaatagcttatgcctatggttagtcttgacagtttgattagtgtcatggatttttcagaatcatcataaataattgcatgtgggcattacttcactcaagaataacaaatgaacaattatagtattattcgtatgtggtatatatttcaacttcttattatgtcttacagaatgaagacagtgatttaattggatattcttccttatttgatgtttggatcttgcatgttgttttctgtcagttaatgatttattctccttcctgcagaccgtgtctttggacctacaaccacaacacgcaatgtctatgatattgctgcacaccatgttgttaatggggctatggaggggataaatggtatgaactgaacagatttaagggccaatctagtttgtaataagatcaatttctattttgactcatttatggaaaagcatgatttttttccatattcttatgttgaaagacttagttctgtgatattgatcatttaggctatatcaacaaggtttatcctaattcaaaagaatcatgaaaaaaatactcatgagtgagatttttgacgtagctgacctaataaatgttaaaatcttcacactaatttgacttcaatgtgcgtaccacttgattttaatatagtaacaatgaatgttgattatacttcagggaccattttcgcatatggagtgacaagcagtggaaagacacacacaatgcatgtaagagtccttcatctggatactttttgttcttcagcttgttacataaaagaaagtatttttggtatatcttcctacaatgtagtttaatgtgtcattattgtataatgctttatcagaaagtctcatatttatatctttcccctctgactagattactgagctgatagatttggttgatgtttttggtccaaatgtcagggtgaccagagatctcctggtattataccgttagcagtgaaagatgctttcagcatcatccaagaggtacttgttaggatattgtttttttcatattccttggcccaagtactagcgacctcacatatttattttcttacagactcctaatcgagaatttcttctgcgtatttcctacatggaaatatataatgaggtgctattatttacctacttttcttctctgctccgttgtctatagtcaattttcaacagtagtggagtgataagaatacgctgctttttaattttccttaaagattactatccttaaggttcaccttatttcaggttgtcaatgatttgttgaatccagcaggacacaatttgaggatcagagaagacaagcaggtgcgtttcagcttcaggttctctttgttgcttttctgttgaaaacatgcgtagtgctactctcactgacttgtaatatctttgttatgattacagtggtcatagaatcccaaaaccttcgcatcatatttttatatattaggaaaccatttttgagctgcctgaaaaaaatacctactccatttttcttgcgaaattttatctctatggggactctgatattacaatgttaatatgtgatccttcgtttagttgatccttttaataatcatttgaactgagtattttataatgagcttgtcatgacttctattgctacaagtgtctttctccaagttaatcacttgaacttatcttttttattgactctagggaacctttgtcgaagggattaaagaagaagttgttttatcccctgctcatgcgctttctcttattgcagctggagaaggtatgtggtgcttccactttcccttttattcaaaggaaaaggtttactttacaaccatacaactccagcaaagactgtttcagtcgttgtatatttattacaaaattgtttatcagaaagtgtactcctccacatgcttgaggctatactgaacgttgaaaagtgtgtttttgtttttctttattgtgatagagtaattctctctcttttttttccagtaaatccctttcattcttaaaccttgtcatgatctagttaattctcgtcatcgtttgcttatcagttaatgcatattgatagagatcttgtcctcatgacagagcaacgacatgttggatccacaaattttaatttgctcagcagccggagccatacaatatttacgttggtatgttaatattctctttgaaatattaaaaactggtatctttgtgcagttgctatatcatttcatcacgtgattacatttatgatattgatggatatacaaaaaatctgagtttattttgtattactattaggttaaaaggtaaaagtcagtagttcttttattcatacaatcgccttattgcttaaaaatggaatactgaagaattatacgtcttttttcagcacaagttgtgtatcatgttcttcttccatatgatttcttctgtttaaggaattactgttctcctttactctaatcgtagttgtttagtcacattaactcatgtagctgtattgtttctgaaaaatgatcaactaatttggatgcagacgatagaaagtagtcccttaggtgacaagagtaaaggtgaagctgtacacctctcacaactggtaagttcatcttgtatccagtgatgatcaatccttttaatatgtttattagttgcattttctgaaaatttaaaaggtgaacatctgatattaactactacccataatttctctcatatctgcagaacctcgttgatctggcaggttccgagagttcaaaggttgaaaccagtggtgtaagacgcaaagaaggatcatatataaataaaagtttgctgacgttagggactgtaagttttttcgtaccacagttttcacttagttaacaataagttttggggtgcagttaaaatccaaggacttctttgacatgtccttttaaagcaggtctgataagaaaattgctttcttttatgttgtatacatattagagcctaaatattaagcacactttctacccctctatattttgagacttgcagattaaacatatagttacatacattactttaggtcttttacattttagatttttagtacttagccagttcaactgtagaatcacctttccgcatttgcatcattttgcttgctactcttatttccaatttgttcttgtccaaaccttacagttaaaccttacaagtattctcctttgggctgaattttattagttctattgtgaggttataggtgatatcaaagcttacggatgtgagggcttcacatgtaccatacagagactctaagttaaccaggatccttcagtcctcattgagtggtcatgaccgagtatctgtaagtcttgtttaagctgttctcaatcctcgtggtacaataaatataaaatgcacaacatgatctttatagtagtatactttactgattagtttttctctctggatatggtagctcatttgtaccgtcactcctgcatcaagcagttcggaagaaacacacaatacactgaaatttgctcatcgtgcaaagcatattgagattcaagctgaacaaaacaaggttttccacgcatatcttctttcagctcttatcttttgtactgaaggtcttttttggtttctaactctagaaaactgtagataattgatgagaaatcattaatcaagaagtaccaacgcgagattcgtcaactgaaggaagagttggaacagcttaaacaggaaattgtaccagttcctcagctgaaggatattggtgcagatgatattgttcttctgaagcagaaggtatgcttgaaatttttgttcggcactgatgttttctgagaacaatttgtcagaaagagattatggcagatagaggtcaaatttgatagaggtcattctggacacaaaatgcgacagtttttcaatactaccactgtttccgtccattttatttatattctattagacaagtgtgaggacgttttatgtcattgccttttggtttacaatcaagcatttgagagaagctgaagtaacctggttttgttgtttttggctatataacgtgatgataaaagctagaagatggtcaagtcaagctgcaatctagactcgaagaagaggaagaagctaaagcagctctcctgagtcgaatccaaagattgacgaaattaattttggtgtcgactaaaaatccacaagcatctcgattacctcatcgttttaatccgcggaggagacattcatttggggaagaagaggtagaaccactgatttatgctggataatatacaaattctttccatcttttcttctgatgatggttcactttgatctgaaagactttagatctattatagcacacaaatttactagcttctttggctgatcttggttgatgatgtatattcagcttgcttacctaccatacaagaggcgggacatgatggacgatgagcaacttgacctgtatgtttctgtggagggaaatcatgagattagagataatgcgtatagagaagaaaaaaagacccgcaagcacggattgttaaattggttaaagcctaaggtatacaaatgattgaattttcatttatagcattgacaattatgttgtgggctattcttgttcgtttcaaaactgcatctggcagctataggtttttactgtcgtaaatgtttcatgcactcactatagatttctggactcaacgtgtgaggcttatgtcctcttagatgcagtttcttctttgatttgttggtgcctctcttgtctccccttttttaaaccatgcttacttattcctatcagaaaagagatcacagttcaagtgccagcgaccagtcaagtgtggtcaaatctaacagcacaccatcaactcctcaagggggaggcagtcatctgcacacagaatcaagactttcagaaggctcgcctttgatggaacaactctcagagcctagggaagacagagaagctttagaagacagttcccatgaaatggagattccggaggtacataagagatattttcattatcgaatccaattcctactctctgttttacaatacctttttgcatttgttcccagactagcaataaaatgagcgatgagttggatcttttgagggaacagaaaaagatattatctgaagaggcggcactgcaattaagttctttaaaacggatgtcagatgaagctgcaaagtcccctcaaaatgaggagattaatgtaatataatcaccctgttcatgatatctatatctagttgttttactctagcaaaatattgaccttctcggttctcgttgttgcttaggaggaaattaaagtactcaatgacgacatcaaagcaaagaatgaccagattgctacgttggagagacagataatggattttgttatgacatctcatgaggcattggataaatctgatatcatgcaggtaggttccaattgtcaagtattatgcactgactttttttgtctgccattcatctctcaagtgattcctatattatcttcaggcagttgctgagctgagggatcaacttaatgagaaatcttttgaactcgaggtgatcgaattgtttctgtttatgcaatttttcttcatctatgcagaagttagagatggttttgctattgcctggataagattattcattttagctcaatattatctctcctcatacctgaataaagtttcttctgtgtatattataaaataccagtattcaaaacgccagactatattaacaatgaagctaatggtatgctctacgcttttttctcattcttcatcttgtttacaggttaaagctgcagataatcgcatcattcagcaaacactcaatgaaaaggttagtagacttttgacattgactatatccccgatttcatttgtctttggaaaagctttgaggctaggtttataatgtttaaaagaattcaataaccgatgaaatacattttctgcagacatgtgaatgtgaagtgttgcaagaagaagttgcaaatctaaagcagcagctctctgaggccctggaactagcacaggtctctctttttacatttcgtaaaaattgttgtttgcaaaaaccatgcttttcaccgatcttcgtcttataagccacatgatgtttaaacaaactctatttgctttctgacatgatagggaactaagattaaagagctgaaacaagacgccaaggaactaagtgaatcaaaggagcagttagaactcagaaacaggaaacttgcagaagagagttcatatgcaaaaggtcttgcatcagcagctgcagttgagctcaaggcattatccgaagaagttgcaaagcttatgaatcagaacgagagactagcagctgagctggcaacacagaagagcccaatcgcacaacgaaataagacaggaacaacaacaaatgtaaggaacaatggaagaagagagagtcttgcaaagaggcaagaacatgacagcccatcaatggagctgaagagagaactgaggatgagtaaggaacgtgagctatcgtatgaagctgcacttggtgaaaaagaacaaagagaagctgagcttgaaaggatattagaagaaacaaaacagagagaagcatatctggagaatgagcttgctaatatgtgggttcttgtttctaagctgagaagatctcaaggagcagattcagaaatctctgattctatatcagagacgcgacaaacggaacaaacggaaggttcattttgagatttgagagaaaagaagacaacataagtaggatatgtttgtgcagtgattccagagagtttgtgtttggtactttgccttgtaagtctcgatttcttcggttattgggactttcttttataactttgttgataattttgtaaagaaagattcaattaagagagaagaactattatgtctcttttaatttaacttgcttagatcgaatcagaataccaaaatcatcagatgattgcaaaaacttgtaactgtgtgtttatatgaaaattgttccaaaaatctcaacaaaaacaaaaaaaaaaaacctcaaaggagtgatcagttggtcttaggatcaggcatggggaacaaaccaccagcaccagcagctcctcgcggcggagaaaaccctagaaatttctgtagattggttctgatactaattgaacacagcagatagagaaaagccatggaacaatccgtcggatcatcacctttcagtcccctgtgactcatcttcttcactatcgtgatcggatggaaaggaagcttcgcgacgactttaccttcgaatagtgaattgagcaatccgaagacgacgaagagaaccagtgccacaacggcgccggatttgaacttgaagagtgacagatctcggctcgattcctttaagctggtttcaacgcgatcgatcttcttcgtctttgatttctttatggatagctttgacgatggattctctgtcttcattgtctcgagtttcttcgtggccttgtcaatggagtatttcaaggatttgtatgagctggtacggtagattaagatccatgagatggcttcgcagaccaacgcggtgcagaaggagattcctacgaccgttaagctatcggcgtatttgaaagaggcgaagagtggaatcgtagtcgccattgttgcgcaaacttgcagagattggatttgactgttcgggtctcactttgattaggaatcgtagaaagtcaaaggagggcaaaagaataaataaagaaagtttcggggagcttaaatatacctccagtttccaatctttacaacattgccccaattgttttttctttataaaccaaaaaacccaaatcacaatctttggcaaaatagtttatacaacacacacaccaaagagttaatatgacatgcagatgtctatttacaaagaagaggtacaaaggagttttgagttgaagttagagaggtttaagagtgttcttaggagcacttatccatggagtgtctgcaacagcaaatctccacaaggcattcacatgttcaggcaatgcgtaatctatcccaacgcgaggaccaaccattactttctccacatcttctcctccatccagaagctccagtcctcctgtgtccatatatttttagtacaaaagcttaaacactgtttgagagagacatggtcttacttcattaactattttggtctgtgacctactaaccaggagaataaagtggatgatgagaccactctgttgagagtccaagcgcttgaccaacctgcgagaggcacagataaaaagctgataatgcaagaggattgaccaagaatactcattgtttatttcaagatctaaccatcggagatactttcaacttttttccttaactattaaagaacatatgaaatgcattgtgaagctctaacctttcctggtccatttaaaagaacaggtttgtcggttttcaggccacgacgctcctgtatagtctccattcctgcaatgccattgatgaataaataaagtaaaaacatgcaaaagatatgaaaattcaacacttgcgataggccaacaacccaaacaactttgagcctcaaacaagacagagtataatgagcagagttccggtgccgatgtgagcagattatttaccggaaacaggagaacaagaccgtatcaaaacagcagctccgactccttctttatcagcaacaatattgagcatcatatgaagaccataacatagataaacataagcatgtcctcctggtccaaactaaaaaaagaaaccacatttcagaggaagtcacaacttgtatgtatgtaactaaatgctaacaagtaaaaagaagaaactcacaactggtgcggtccgtggggtaacaccaaatcgtccatggcaagctgaatcatttggtctataagcttctacctaccaaaggaggaacaaggttaaatcgttgcatattacaatcatagtatttcaagatgcaccaataccattaattttgcattagcttagtaagcaccaatgatctaatcagagtatcaaacagtcccaaattaaaaccctaaatcctttctctggaaaaaaacagaaacgtgtgtctgagtctgacctctgtaattcgaagcacaacattgtctctcctcatgaacttgccaagcaaacgtggcgcaagatcaagtgcgtcgatctgaaagaactccggaggcattaacttcatctcggactcggaggtggtgcgggtcagtgggtaatcgggtctgacccgagccgctcgtgtcttggaacagttggtctttcgtgtccgtaggactactcgggttgtaacatttgtctccgattcctcctgattaacccgcttcgatcgacgagccggcgttttcattatacaacccgaaacgaaaagatttgacttttcaaaagtatgcgacgttgaccttctttgttgttaatatttggcgggtgatggttatttacttatttatgttgtccaaaggtggtgccaactttgtcatagacataaaaaaaaatcatggttgttccaataaaacaatcgttcatagtttttttttttttcacaccaaggttatttggcactaatgtcaaattgttgcaatatcttggcagaattgcatcaatgtataaatagattcattgttgatgtcgaatctcgcaatccggataatccgaaattgtgggcagatctcaatcacaagataatagaagtaggccaacgctgtttgaccaagattgaaaaagagtctcaatagggttaaagtccattaagagagtttggtttcaacttctgttaaaggatatatctgaatccgcgtattaaaagaaaggagatgatcgcgaaaagatttaaaacgaaataccgaaaacagaaagaaataaataagggcgagatgtgatgcgcgaagaaatctacatattaatgatcgtcggttcgagttcaaaactataaatagataatgtattaccccgacaaaaatttcttatgtaacacaactaaaaacagatcaatacaaacactttttactaaactcgatctttgtttgattatccagactagaaactccgaaaaaaccacaaattcttaattgcggatttcaacatccatatttactacttggcatttagtttactcgtgcttaaatttacgtatcaaatatttttcaactgagatgtcaaactaatccgctatgtttaaataatatctaactgatatatgaacttcaaatctgcattgacacccttaattgcgcttttagggaagaaaagtaaaattgaatacacccctctatgtttttgtttacaaaatttcaattaatatttaggaaaaagtgaaaaaaaaaacaaaatgttaaaaaagcgcgaacttttaaatttgggacgaaaaaagcatgaactttcgaaatgtcatttaaatcacaaagtttcgtttgactttttaaaaaaattgtcaagtttcgttgacttggccattttgggcacgtcgttaaatttctgttaacgacattaactttctgttacagatttctgttaaatcgaaacgacgtcgtttttagatctccaaaacgacgtcgtttcattagaaaataatgatgcaaaatccgcgtccacaatggctcgaacatatgacctattggactcatatggggcaatataccgctgagctacgacaataatttacaataataacaaacattgcatacatatactaaccaatataatatactattaattaaaaatatatgcaataaattaaaaataacaaaattaaaaaaaaaaactaaaaatattaaataaacttaccataatatattttaaatttcaaatatttaattatatatataaagacatcttctatattcaaattatagatctctctagaattcacataagtctttgcaattgtatttttggaatagataaaaactgaaaattgaaaataatttgcataagtcttttctattgtattttctatatttggaatacataaaaattgaaaactaaaaataatttctcaaatataaaaaacatctatatagaaatttaatatttcaaatttcaaaatatatatgtatggtaggtatatttaaaaactttgtatatatttgtttttttgtagttttgtaatttataatttattgtatatattttcaattaattgtgtagttttatttgttagtatatatgctatgtttttttttttaacaaactgttctcgtagctcagcggtagattgtcctttagaagtccaataggtcagatgttcgattccatgtgaatgcggatttagcatcattattttctaacgaaacgacgtcgttttggaagctccaaaacgtccaaaacgatgtttcaaaacgacgtcgtttcgatttaacagaaatttctaacagaaggttaaccccggaaatttaacaacgtgcccaaaatgaccaagtcaacgaaacttgacaatttttttaaaaagtcaaacgaaactttgtgattaaaatgacaattcgaaagttcatgtttttttcgtttcaaatttgaaagttcgcgtattttttgacatttttcccaaaagaattctcccaataacaggaaggattatgtaagcccaagaagcaattttcctacattctagacacttctaataaaagcccgtttcaaaattaatttgttaaatatactttaagaaaaaaaaaggcaaattgtccccaaaaaaaaaaaaaaaaagtttctagaggcttcgttagcctaattcattaactaggttctcctagtttctgctgctaattcccaaatctcagcgaaatcaaacttctctgctctgcttagctctcagctagctgaaatctctctcaatccgtgtagcttagcttccctaatccaaccatggcaaagttcggtgaaggtgacaagagatggatcgtagaagacagacctgacggcaccaacgtccataactggcactggtccgaaaccaattgccttgaatggtctcgcaacttcttcaccaaacaattctccggcgttgatatcctctccggcgaaggtaatcttttcatcaaggtcagtaagatcgagaaagtcgaaggcgaggcttatgtgaatgtgaggaaggggaagattatccctggctacgagcttaacgtctctttatcttgggaaggtgaggctaaagattccgatgggaagacgcttttgaaagctgatggattggtcgatatgccttatatctccgatgagaatgctgatgaagatccggagattaggttttcggtgaaggatgagggaccgattgggaggactttgaaggaagcgatggtgaagaaggggaaggagattattctggagaaggttagggtttatgtggaggctatggcgagaggaggcccgtgtagggatgaattggaatcgaagaaggttgcgccgaaatcggtagcggctggatcagctacggtggcggtggagaagtctggtgctgccccggtggtgtctgctgctgcggtggagagtaaggtagttaaggagaagaagaaggcgaagactaaggaagggtttaagacaattactatgaccgagaagtttaattgcagagctagggatttgtatgagattttaatggatgagaatcgttggaaaggttttacgcagagtaatgctaagattagtaaagatgtgaatggtccgattagtgtctttgatgggtctgttactggaatgaatcttgagcttgaagaaggcaaattgattgttcagaagtggagatttgggagctggcctgatggtcttgattcaacggttagtttagtgaatttggaatggctaaacgtattaccctgattatagatttgattgtggttgatatattggctgttgctttgacatttcaggtgaagatcgttttcgaggagcctcaaccaggagtcaccattgtcaatcttactcacactgacgttcctgaagaggacaggttagttttactcatggcatgtctatcttatagtcttacttataatgagttgctcttgattctgagtctgaactttgggattaggaaacaaaaaaggagcttttaagtttttacctattaacacgttgttggtcattcatgaagtagaaagactattgagtgactatgttttgtgtttggttgaatgcaatgaattctgctggaatctggactgctttatagcttggttttaaaatagaattttgctaccgatgtacaaagctagaaccaagggtctatttgctcaactctccctaaccacctatagctagttaaatttcccagtgaccgacactacttttaactctattatctatgcttatccttggcactaatttgatttgttgtatgtagttgatggactcttctagtcttcccctttagtgacttgcttgtgattctgaattagaactttggtttctggtaaaccaagacagaaagtttgaacttctttcatccttaaagtggaaagaagtgatgactgacatgtttaataatcgaatggattcttttggaatttgggtttactgttttggttggtatatgatagattgctcctgtttcccaatgtcccacgtctcttcgatctactatctatgtcaatctttgctactaactcactcttagcttatgctgacaatataactcttctttgttccttgtgaacacttgataactgatgatttttttttctttggtatatggcctgtgtcttaagatgagtgagtgattcaatgttgctaaatgtgaggacattgatgtaactactgttatctgatgtttatccaatggttgatgcagatacgggaatgcgactgtggtggaaaacactgagagaggatggagagatcttatattccataggatccgtgcagttttcggatttggaatatgaacttatgattttgattatcaaataagttgattatgatttggaccgataaccaatgcaaaatgtatgattttaaagtttttcagttttagttaatgcatttcccttgaacttatatataatctctttctttaggccataggcccttgatcagcatccgtttggtaatctttttgtcgattacacgattacacatacataaatcacttaaggaatgctgtttttaggaaacttgtatgagaaaaaaagaactaaccaatatgaagttacattgctatgttatgtgaaacatatgaggtcgaaaaatgtgtcattgtagataaatgcttttgttgattatggttaacaattaatggacacatcgtcagggaatagcatgtgggaattgccatgtggatgtggtaatgaattatctactccaacaaaaaaaaagatcatttcactttcagcttttcagtaagtaaatgggaaacttcaaaattattgcgcatgcagcaacacaatatcaatcaacatgtatagattcaaattcacaatatagatagaatagtctatgacttgcgtaagcctaatgcttgatgtttcctatgtgacggaattgtgttcgttagctctatatggcttacgtattttcagatttcctagtactaggaatttgtacctttgccatactttacgttactggaaaatatgagaatggcaaaagatcgggtttaggaatagtagcgtgtgtatttaacttttcaagctaaatagaaaacagacaaaaatcatacgaaaatggcaaaagattaaagtacaagatctcatttccatattaatgtattgatatacagatacactaagcagttgaattttacctacccgattgtaataaacatgtaacaaaaacatttttaattggaatttattaaatctaacgaacggctgatttattaaaatttagttttaaatatggttgaccaaaactttaattttgttacatcagatccaagattcaaatctcgaacactaattgcagtttgtaaatctaaaatttgtggatttctaaaacaccatctcaggtagttcatgttcatgtgatagatacttgtattaatctatgtgtttgacactttgactacaaaactgataactctatataaaatattcaacaatagatagttataatcttacctgtggtgtgcttctgagtaactttgatggttaagccaataaaaaaaagtacgacaagtgtgggacaaggagtcagaacatcgaaacaaataaagtaagtttgttttacgtaaaatcaattagcaagtcttagcttaataagcagttgttgaaatatgttgaatgaaaagtatagcagatatagtttgcttatgcttttactatacatttgtcacttaaagataccaaacagtaatcataaaaagcgaattaaaatagtctctcttgtttgttttcatatgaaccacgcaagtgcgttttaaaaaacaaaatctcaacattccaaatgtaccaacaaaacaaaatctcaacattccaaattattccgcgtcacaaaacagtggcattctcgtagttgtttcgaaagacaaggggcataatataaagagaaatacctcaaactttagcgacgattcctaagcaaatgtcactttaccgaagaaacacatctctctctctcaagtttctagaaaaagagatttgttgacggagacaagactcttttctttttcacactctcgctaaaagacccattttttaatctctctgaactcttaaaaaaaaaaaaaaacgcaaaaccaagagtcagagaaaaagattctcacgcgccaaaaaactccctcgccatggcgttggactccgttaagcatttgcctattcacggcgtctccgccttctcctccgtcaccgtcgaaatcaaaagctttttctccaccgtgaaaccaagaaaaacttcaactttcgtctacgctttcgtagtaactttcgttgccttgactgttttcttagcctttagtccttctcccatcacagtcgcactcgctccttccatttcttcctatgttctccctaatatcactgtctcgaattcatccaactcttcaccgtcgagtctcgattctaatttcaccacattgcgtacaccggcgccggaaaatctcactgcagttactaaaaacttaacctttgagtcccccgtcgcaaatgggacaacggacacaaatgctaaaaccatcactattcagttccagaccggtcatgcaaaggaaaacatatcgtgtcctgacaacaaaactgctcgagatttggacacacatggagcaaggaaagcacctctgtcggaagttctagctgtcaattcgactgcttctccgaagcgaaaacagagaaggaagtcgtcgctgagaaaggtgatcgagtctctgaagagttgtgagtttttcgagggagattgggtcaaagacgattcgtatccgctctacaaacccggttcgtgtaatctgatcgatgaacagtttaattgtatctcaaacggaagacctgacgtggatttccagaaattgaaatggaaaccaaagcaatgttctttaccaaggtaattataacacttggtttcttttttttacatggtggtgagtgactggtacgtgagtctaataatccaatgatataagtgtgtgtatgaatatatgaaaggttaaatggaggtaaattgcttgagatgattagaggaagaaggctagtgtttgttggagattcgctgaatagaaacatgtgggagtctttggtttgcattcttaaaggatcagtgaaagacgagagtcaagtctttgaggctcatggaaggcatcaattccgttgggaggctgagtactctttcgtctttaaagtaagttgtcaaaaattcgatttcattacttcttcttgtgtgttttcgagttttaatcgaatgatttactgtcgacaggattataattgcactgtggagttctttgcatcgcctttcttggttcaagaatgggaagttacagagaagaacgggacgaagaaggagactttgcggttagatttggtcgggaagtcatcggagcagtacaaaggagcggatattcttgtattcaataccggacattggtggactcatgagaaaacttccaaagggtattagattttccccaactagtctgatccctgatttgggatgattgtctcattgttttttgctggattctttcattagggaggattattatcaagaagggagcactgttcacccgaaactcgatgtggatgaagctttccgaaaagcattgacaacttggggtcgatgggttgataagaatgtgaatccaaagaagtcccttgttttcttccgtggttattccccgtcacatttcaggtaaaagatcgagatcttgtgttggtagttttactagtcataaacactggttttgtaaaattggtttgatttgtttgcagcggcgggcaatggaatgcgggaggagcatgcgatgatgaaacagaaccgatcaagaacgagacttacctaactccttacatgttgaagatggagatacttgaaagagttctcaggggaatgaaaacaccagtcacgtatctcaacatcacgaggttaactgattacaggaaggacgctcacccatcgatataccggaaacaaaaactatccgcagaagaaagtaaatcaccattgttgtaccaagactgtagccactggtgtctccctggggtgcctgattcttggaacgaaattttctatgccgagttacttgtaaagcttgaccagcttggtggcaaaagacggcggaaagccctaaaagatcataggagttgaatctgcatcattttagatcaacacagaactttaaagggataaaaagaaaagaaacactgatgtagatgagaatcagagtagtgccatgttagttttcttggttgtaaacctaattcatgggagaggttagagattgtaaatggttttgtgactacaagtaatagtaaacatatgcttaacccgaacagaaccagactattagaatcgaagacctaaccagaatttgtctaactccaacgcctaacctaaatctgagttctgatgaagaatcatttggtgaagagaatccggttgatgacatggacaggcaaagcgtaggcaggatcaattgttttgactccaggatactcgagaagagagagccctgcaccaattttgtattaaattgacacataattctttgcttcacatcaacaagataagctaaagaaagacatttttagttacccgcaactccaaagtaggtgtggaagatatcaacagtatagctgggtctatctgagatgcctccgttatccatgtcctattcaaagtttcacttgaacctcagggaaggctctaaaagatgagacctttaaaaccaatagcaacaatattggagacaaacctgagagtccaagataaacttgacaagctttgctttctcgatccagtgaactctatcgatcatgattaagctggataagacccaccaagaatagcaaacctgataataggaataatcaaaagcacgctaagaacaatcagaatcatgttacgatttggaagagtttaacgcttacatcagggagtttctcaggtcgtccatttaaacctccagactcgtagtcttgtctttcacataaccaccatccaagtaagtccttatcaacacgatggagattcccggtgatagcaagagcacccacacaacagaaaactgcagcaacataaagaatcaatgccctttaattaccatatgatgctgcaatgatattcagtaaagtcatctagacacatattgaatgatgatc

SEQ ID NO: 1288 - DNA, 41856 bp, Arabidopsis thaliana
ccggaaacaaaaactatccgcagaagaaagtaaatcaccattgttgtaccaagactgtagccactggtgtctccctggggtgcctgattcttggaacgaaattttctatgccgagttacttgtaaagcttgaccagcttggtggcaaaagacggcggaaagccctaaaagatcataggagttgaatctgcatcattttagatcaacacagaactttaaagggataaaaagaaaagaaacactgatgtagatgagaatcagagtagtgccatgttagttttcttggttgtaaacctaattcatgggagaggttagagattgtaaatggttttgtgactacaagtaatagtaaacatatgcttaacccgaacagaaccagactattagaatcgaagacctaaccagaatttgtctaactccaacgcctaacctaaatctgagttctgatgaagaatcatttggtgaagagaatccggttgatgacatggacaggcaaagcgtaggcaggatcaattgttttgactccaggatactcgagaagagagagccctgcaccaattttgtattaaattgacacataattctttgcttcacatcaacaagataagctaaagaaagacatttttagttacccgcaactccaaagtaggtgtggaagatatcaacagtatagctgggtctatctgagatgcctccgttatccatgtcctattcaaagtttcacttgaacctcagggaaggctctaaaagatgagacctttaaaaccaatagcaacaatattggagacaaacctgagagtccaagataaacttgacaagctttgctttctcgatccagtgaactctatcgatcatgattaagctggataagacccaccaagaatagcaaacctgataataggaataatcaaaagcacgctaagaacaatcagaatcatgttacgatttggaagagtttaacgcttacatcagggagtttctcaggtcgtccatttaaacctccagactcgtagtcttgtctttcacataaccaccatccaagtaagtccttatcaacacgatggagattcccggtgatagcaagagcacccacacaacagaaaactgcagcaacataaagaatcaatgccctttaattaccatatgatgctgcaatgatattcagtaaagtcatctagacacatattgaatgatgatcccagggttaaaaagttaaattagcatgaacatactctgtcctgcatgagactccgctccaggtgagcacccaaaaccaccatccaggtttttgcagctcacaatgtaatcaacagccttcttcacattgattttatcaagacattttaatattgagaggcagcatatagctatgtaagaaaacctacattaaacaagcttgcagataaacataatgaaactcacaaatcggaataaacaaaaagctatgaagaaagaataccttgtatctacttcgccccatatatctcctgagaaggatccatcttcattctgtaacccagcaatatctagtttttgcatttagaaaaagcataattgtatctacaacaaacgaattaccgagtttatttattttcacagtgacaagaagctgaatgcgtaaaggatacaatttgaaactttttcaacatcaagaatgttgagtttgtcgaagagggccaagatttgtacagcactgagtgtatacaaaacatgcggatcatggccagtattaccggcaaagccacctgctcacaaaaaaagaatgactttttaaaaaactacaaaagcagtaacatcgtacgattaaggttgaaaataatatactgaataacacacaccagactcatgctggcaggtcatgacccatgacacaacttcatcttcggaaacagaaccaagcttgtcgagtaaagccagtgtggttagtccccaatatgcaccattcattctcagatgatccataaccacagactcaaaactctcttttttctagcaagttaatatgaaaaccaattaaaaaagtgagaaaggggaaatttttaagttgttaattatagtgacataaacaatgagcatgaggaaaatggatgatatagctttatatactagtaccttttctgccatcaaattcagaatgtaacgaagatgcttgccagctacgagcttgtctgccatcgggattcaataaacttggcacgaacagaagaaacaacaccaacgatttttaaagttagcttgattcaactttagtttttccttcaatgggttaaaaatccctagctggtataatttttattaacacttaaatcacccatccatggttgagcatctagtgaatatcactctaagcgatcagctacagagactcttaagggtcatatcttcgaggttaaatttgtttaagttatgattagtagatacgaaattacgagtaagagaacagaacatgaacttacggaaaagataaaactttactacgaaattagtaacagaacataaacatgaaattaaagaacgaagctttattacgacttctttgataaatggaactaacctagagaagagaagccaaaatctaagaaattcttttgggcgatacgacgaagaagacagtcaaacattaatttggtcactaataccagacttttttgggtaacccagactaaaccgaaatcaatctggctctcttaattgaaccgattcaaatccttcatgtccaatccgattttaatcaaaaccagaagaatcgagttttgcgaattaaaccggttcatccggttccggatccatcaaacgataaaagagttaaaaacccagaagataagtgtgataaacctctctggcaatttcttcttcttcttctctttttctttgctctgccaaaaatggcgagtctactcgattcgttgacaaccagagggttcttcaccatgccctcaatttctaggatttattctcctctagcttcttcaacttcattgacttcttcaccatcttcctcttcttcgattatcccatccttgtcagttctctcttacactcaccaacacccgcattcctctcgcttccctttccttgttgcagcaactctggatggttcctctgctgaggaagagctagatttcgaggaattcgaccaatatgctgaagataacttcgcagatgattattcggatgacgaagacgactccatcgatatctccgttcttgagaaagaagcgagagatatcgtgagagattatgctaccactctgtctcgcgagctcaaaatcggtaatttcttccctgtttttattgtgcatatgtgtggaatacactgtcagtgtgtgatcatagtttgatgtttccagaggatgagaccattgaggggaaggaaactcgtagaaaagggaaaaggctagccaaaaatgttagtcaattgaatttttgaattttttctttgttagtttatctacgaggcttcagattactgacatgactataaaataaaataaaaaccagacacagcagataccagagcatcttctccaaagagttgctatagttggaaggcctaatgtcggaaaatcagcattgttcaaccgccttgttggggtaagttttgctaacatttgaattttttttttcttttttttttcctaccattttatgtaagttgtctttacaatgcatttcaggagaatagagctattgtagtggatgaacctggagttactagggatcgattgtatggtagatcatattggggtgatcaagagtttgtggtggtagacaccggaggagttatgactgtttcaaagtcaccatctggtgtcatggaagagctgaatgtgtcaaccaccattggcatggaaggtattccactaagctctagggaagcagctattgcaaggatgccttccatgattgagaaacaagctacagcagctgtcgacgaatcagctgttattattttcgttgtcgatggccaggttctgtgcttatcttctatctccttaacttttctgtctttgcctttcttcctgttaggcttttcgattcctgccataaaaacaaagtccaacaacaaaaaataatttggttgatgtgttattttcttagacttatactatgaataggtgggagttggttatcgacgaaatattcaatagatttcatgtttagtggaagatattaccaaatactcaagaaagctgtgacttatatctggaacatatcaagttggttttgtgaattcttttactgtaaagtacaatggagtgtttcctggttatcatgccatgtcattgatatatggtattgattttggtactcgatatgcaggcagggccatcaggtgctgatgtggaaattgcagactggttgcggaagtactactcacataagtatatcattctcgcggtgaacaagtgtgaatcgccacgtaaaggactcatgcaggcttcggaattttggtctctagggtaaattgactttcatcctacttcagaatcatgtttgcgcacaaagtaggcttgttttggggaaatgtggtttaaggataaaaacgtgctgaaaataagagagcttctctttagaagatagcttttcatttagtgttttaactttctacaaatatagaattcatggacaaacgtcatttggtacttttatatgatttgaatatttgttactctcttattcaacacagtcttgtcctaatttatgaatctagttctgttattttgatgagtttatggacctggcgaaatttgtaagcatcagaatgactttttcccattatagtgtctattttgatgttcacctttctttttgaatgcgagtgagtagtttatccaacaaatttatgagattttgctggaggttggtagctgtggtttagccggagagaaaatgatttacatgcaatgctaaacattttagttactttgcttctgtgcatttgttttgtgttttcattgatttcatggtggaatttccaggttcacacctatccctatctctgcattgtcgggaactggaacaggagagctgcttgatcttgtttgttctggcctaattaaactcgaggtttgtaatggcctttctttctttcagaaacaaatttgtgcaggaatatgagatattggcaaatagtcctttatgaagagagttctgtatcgaagtatagtgtttctggaaaaaaaattcaaggtctgaatctacattatatacaccctcaaaatttcatctcttaattatcaaataccttaaggcatttttgaatatgttcaattggcacccattgtttattcagctgcaataactggccatagccttgacatgtacgtctccttcaaataattattgttgatgagtagcattgacaactatgttcaataggcatcactttacaaaccaaatattaaaacattttcttacatctgttgcacccatacgattcaatgacttttctagatcatggagaacattgaagaggaggaagaagaaaactacattcctgccattgcaattattggtcggccaaatgttggcaaaagtagcattttaaatgcacttgtccgagaggatagaacaattgttagccctgttagtggcactacccgtgatgctatagatgcagaatttaccggaccagatggggaggttcgttcagttttgtctgttgtgttttttgtggcctagttttctttcggtgaatacctgttcatttaaccctgaatatgatcatgaactgtgttgcagaagtttcggcttatagatacagctgggatcaggaaaaagtcatctgtggcttcatcaggcagcactacagaggccatgtcagtgaatcgtgcatttcgagcaattcgtcgttctgatgttgttgcccttgtcattgaagctatggcatgcataacagagcaggtatctcactagtaactgacactgatgactgtttctcattagcaattgtagagcatgcagactgttttggtatagacagagttgaaccatacagtataattatttccctgtccaacaacaaacaattttactgacatagttttagaatgtcacaaaggatttgataacacaaaagtaccttgctattgtaacaaaggaaaaatgatgaactttcttatcatgtgaaatttttctaatggtatgtattggaaacacaggatctgaagattgcagaaagaatagaaagagaagggaaaggatgtctggttgttgtaaacaaatgggatacaataccgaacaaaaaccaagagactgcagcacattacgaggacgatgttcgggagaagctccgttccctcaaatgggcacctattgtttattcaaccgcaataactggccatagcgttgacaagtgagtctccttcaaatgattcaaaaactattttcaaccttacagtccggttttacttagtctgtttgataatatataattcaaatgtagtattgtggttgctgctgctacggttcaaaaggagagatcaagaagacttagtacggctatattgaaccaagtgataagagaagcagttgcatttaaatcccctccaaggacccgtggaggcaagcgaggtcgcgtttactattgcacccaggtaataaaaacatctcccaatgttttctagtagcagtaaaggaaaatgcattagaggcttttcgggtttgtttgtctgtatataaaatggttgtataatgcaggcagcaataaggccaccgacgtttgttttctttgtaaacgacgcaaagctgttttcggatacgtacagaaggtatatggagaaacagctacgcactgatgcaggctttgctgggactccaattcggcttctttggcgtagccgtaaaagatctgacaaaaatggaggaggtacgagttttttgcatgaagttgtaattctttttgaaaatagtgacagtatctgtataacttttggaaaattctgcaggtggaggaacaatgagaatggcaggccttacacgtcagagaaatcttgcaaccaaaagaacataataaccgacgatgtaattttgttgtattgaaaaataattactatcaatatatatatacaattcaatcctagctagtctccattgcaacctactctgtttgtttttcgttttgagctttgaagtgaaattgcaggaatagtaaactctaataagtcttccatagagtatatttcacaagtgagacgaaaaatatatgcatatactcatgcactcgtagcaaatcttactaatctcttgatgatttataggaacaggactacatcaacatttttaaactatctttgtgttttcttaatctaagtttgctaaaaagaaaatgattaagaacaaaaaaacgatgcggcttttagtaaagctgctctttcttttcgtgccaccatctccacctgtaataagaacatgcttttgtcaaaaaataaaaaaatccaagatctcaattcggatcaagtataattttgaaacaaaactttcattttacgatcatgcatttggtaagtgatatatatatatatatatagagagagagagagagagagataaggttaccagtaatagtcccaacgaggacggactctggtcatgcggttatcatcagatggatggtaaggatgagctgcgtggcgagtgttgtggaaggcgcagcaaccagcggcgtagaccgcgatgaggaggacgaggacgagaatgttgacaaccgataactttctccagtcgagacggatctcttcgagaacaccagccttgcaagcatcgcactcgtagcataacatctccactccattgttccatctgaagcaatctcctcctccgtccactactccagcttcgtacgtacacgccgtcggtggcttacaacatcccgactgcattgtcttttattagtcacgtcttaactcttaacaagccttttcttccccaataatactatatttttgtctaaatgcaaacgccaaacacaaactaagtaaaaagagaaaactatatgtttacagcaaaaaactggtaaggtcacactatcattttgtttgcaagtaagaatacaaatacgattcaacaaaacacacacggaaagaaaaaattcgtttgcctttttcatttctagtcacatgcttgctttacacgcgattagaaacgaagaaacaaataaaatcaaaggcttaaattatcatatgataagatatatattagattactatagcaatttgttaagcaagcatgaatcatgtcataaagtagattgtacctgaacagaagtcatgtctctttggaaataatcaagtgtagtccaagactcaatcttagtacaagtcttggaactcaagatacagcttctaatggagttccaatactcaggatccctaactctctctctcaaccatggatgatagtctccaagcctatactctttataaatcctccctggcacttccactccacctccttggctcgtcaccaccagaccaaatagcgttagacccattagggtagcgatgaggaagatcatgaccactaagtacacccaaagagcccatgccacgttgaagcaggctcctatgaatcccgcaagggaaactatgagtatgatgaatcctataacaagtagcggcgtctggaggaagttttcacatgtcgtgctgcttcttgccttgtataaagcggttccgatgattggaatcgaggctagtaaggtgagaaggtttaagaccccaataactgtgttgctgaatctgtacatagtagtaatgttatcaagaagaaatcagagacttaacactgccttctttcttttgtaagcagattctcttcttgcaatgtgaatttcatcagctttatcttacaatcttctttttctagatataatattggttaactctacttttggcttttgattctctcttatcaattgggaattttttaaggggaaaggttaagagttaatggtttgatgattcatgatcatattcttttggtcctctctctcttgagttgaatcaattaaacaataacattaaaaccgtataattttcaaataaaagtgtctttttgaacaattgtttcttgtttattattctatattatacgtttttgtcgttggagttggtacagagcagaccacaaccaagagaaatcaagtagtgccttcattaaaatatgttcttaagacattacaccataaagaatacaactttttctagcttttagtccaaaaactgcaatcatggtttatataatggatgatcacaagtggaataaaataaatgtgctatgttcaatgaagcataggagtaagcaaagaataatatatagacatggacgggagatgatttcgtaatcgatgaattttctttctaagatgcttttagtggcccattcctcggaatattaggtttttaagatatagcttgatgtgatctccgattcccccacttccttttttatcgtataaataaacgagaaggaatgctaaaatcttgtctcagctcatattgaatttttgtgtgtttactttcacatttagcaaatgatatatgttttaattcgccaatcattatgagccaaaatatccacaagcttgaagatacaaaggtttgtggtctttgtgtggttgaaaattcacataaatgaaaaacaaacaaaacaatatcacaaagtcacaacttgaaaattcacaatatttatattcctaaagaaccatgatctctagtatacatccaaaaatcttcaaatcagcatttaaaaacaaagaagaggcagatgcagcttaggtgtaatcagtttgcagggtcaagtcttgtacacccaaatcatggtatacatcatatacatattgcagtaatggtctttcatctattccgctcttcacctaacgccgataaacaaaataacaaacccagtcatttccatttctagtgtgagctcatgttttaaccgatataaaaaaaaggagaaaagtgagtacctggagtctgagtgagccaacagtgtgaccaggcacaacctcccagaaacgtgcctgtaaaacctccgttacatcttctcgagaagtaatctgtacagagagagagagctgaagagaagcctggtttgatcaacaatgggaaatatgtacacattcgaggaacgatttatgagcgaacctgtcgcaagcatttgcttaaagcagaagaaggaatgtttgggggtgccatctgaagcaagacaccaccagtggctttgaagagtggcataacaagcataaacactgtgaccgataccaatcctaaacataggacctctgcattttcaaccctgaaaaagccaaggcataaggagcaaaaggaaaatgtagtcaagcaagaagacacttttattcatttagctccttcaaagaaagcgagtattacccgagcgagaggagccaagatgccagtatcaaacctgcactgaaaagacagcagcaaagaaaacttcatgttgactgtatataagtttgatgcaaaaggaagcattttcttttctatatagctttctccgattctgcttgaaatttataaaggcagagaggattaacacctgcggatggaatctgatatgacgtgcaagcaaacggagtgataattcatatcttctgcttttctgtaggctgcagcatattgcatattatgaatataagaaaaaaattcaagataacatgtggtttttagatatgtaaagaagggacagataatttcaagaagcaacgaatagtcgtttgacagatcagttacaattatgctgactctctctttcaactaatcttcgtactgattctatcttaaccaaacacccttacttctttggctttaaagcgaaaactgacaagggtggccaatttctacaaatgaataccaaagccaccaacaaaggctatatcaaaatataaagcagcgtatgagcatcaattcatacaagtctaaacagaacttaaaatgcagagaaaaacataccaatattgacacgagcataattccggaaaaaccaaacacctagtaggttcaccagcagatttgttaccgctgatacaatcaaataatgcctacataaaggaaatctcagtaaatcacactactgaaaggaacaagagggaacaagtactgtaaacttagtaagtgctagagatatatatagaaactcctaggcatgtcatttgtgaaaatatcaacttacttatgctctgattcatcttgtataaatgcatgaagagcttccacagctaaggagaatgacatgaacataaggaacagctgtctacacatatgtcaaatattaaacaaatcaaagtattaaccaaaaagataaactacagagacaatgaaaggcaaaacgaaaagatagattgtatggaagtccaaatctttttaacgagctgtaaaatactctattctatcagcaacagtaaaggaaagagttttaacactgagtcaagccatctacactaaagctggaaatgacatccaaaacacgttaagaacatacttacagcattagtgaaagcagataaaacttcaagtcttttgtacctgggaacccaaaaaaaagagaagacaaggatgcctaaattacaaccacttgagcataatcacattacagtctcgggagaaaaatagatcataaaatggattaaccaactgagccaatcaaattacttgtaactcacccgtatgagtaagcatgatcaggcttcttccttgaagttgccattgcaaataaagaaaatgtcaagagaccacaaccaaatgtcaaatggaatgcatcagagaccaaacctgtaagagtccacaaaacaattcaaagaaagaatatcaacaattcagagattcaatcctaaaacaaaaagagaactgaaaccaaatcgtacctacacgaccagtgaagataccaatagagagctctgttgtagaatacaacacattaagcgcaattagcagaaacagtctcttcatctgccgatttccacttgtcactactccaaaaacctcccaaaccatttccaaaacagacacttttgccatgtctacatctttcccttccccgaaaaacacatcacttccatcaacggagtaaatatccggcggcatatcgatgctcgagaccgtcctatcgagaaaaggcttagccgcttccgtgaccgccggcgttcgtggaccgtgagattgctgaaacgagcgagaataagcaagcctccgatcattagcagcatatccgacatcgctgctccgatcatcagggagctcgttatcgcctcgaggattaaaggaaatggatctctccattttcttctttgatcttaaagttccaacttcggcaaatactaaaatcaacagtcagtcgtacaaagaaactctgcttatacagtaaagtcaatgggccactgttctaagcccatatataattttagaagcccatagaatacaaaagagtcaagaagcattgaccgcacaagaaaaaaacaattgttaaaaagggttggttagtgtgtatgtatatatgaaatgcaacaaacattatacagcccattaaatatggttgttataggtagatgtccccattaaggaactttatccagcccattaaattactttacagagtaaaagagagagagaagatttacagttacgttaccaaattttcgaaatgatttaattagtaataaataaataattaaatgtcagttactctctttagaaagctaaataagacagctgtttccaccaacaacgtgactggtcgtggggtcctccttcgttcaaagtgatattcagaaatcaacggctgagatcttctccatcaatatttattacgggcctattccttccttttttaaacttcaattctccggctcacattctcttcttcattcgctccgtttctctctcaaaaactacacacccgtaccacaccaccaccctcctcgtttcctcagagatcccctctctaacttctaaggtaatcacatttccataacgttccatcgtcattgattcttcattagtatgcgtttatgaagctttttcaatttaattctctttggtagatcttaagattcctctgtttcttgcaaaataaagggttcaattatgctaatattttttatatcaattttgacaggatatagaaaatggcagatggtgaagacattcagcctctcgtctgtgacaatggaaccggaatggttaaggtacatctttacatgacctttgtggatataaatctgataactttttcttttattatttttggatacaatgctgttttgtctggttcattcatatgtgtttccaattccttaggctggatttgctggagatgatgcaccaagagctgtattccctagcatcgttggtcgtcctcgacacactggtgtcatggttggtatgggacaaaaagatgcttacgttggtgatgaggctcagtctaagagaggtattttgacattgaaatatcctattgagcatggtattgttagcaactgggatgatatggagaagatttggcatcacactttctacaatgagctccgtgttgcacctgaagaacaccctgttcttctcactgaggctcctctcaaccccaaggccaatcgtgagaaaatgactcagattatgtttgaaactttcaacactcctgccatgtatgtcgctatccaagctgttctttccctctacgctagtggtcgtactactggtaataagatcttcaacacctacaccatttttttaatcactactacccattgcattgaacaaacttccaagttcttcttagcttcagattaagaaagtaccctttcttggctttgttgatgtggtaccattgtccattgtcttgtgtgtttccaggtattgtgttggactctggagatggtgtgagtcacactgttccaatttatgaaggatatgctcttccacatgctattctgcgtttggaccttgcaggccgtgaccttactgattacctcatgaagatcttaaccgagcgtggttactcattcactacctcagcagagcgtgaaatcgtaagggatgtgaaagagaaacttgcttacatagcacttgactacgagcaagagatggaaacagcaaacacaagctcatccgttgagaagagctatgagttgcctgatggacaggtgatcaccattggaggagagagattccgctgcccggaggttctgttccaaccgtctttggtgggaatggaagctgctggtattcacgagaccacttacaattccatcatgaagtgtgatgtggatatcaggaaggatctgtatggaaacattgtgctcagtggtggaaccaccatgttccctggaattgctgataggatgagcaaagagatcactgctttggctccaagcagcatgaagattaaggtggttgctccaccagagaggaagtacagtgtctggattggaggctccattctagcatcactcagtaccttccaacaggtaaaatcatcattcggttttatatggaattttgtgtcctttttttttgttgcccattgttaatgtgatacacaaaatgttgttggtgtgcagatgtggatagcaaaggccgagtatgatgagtcagggccatcaatagtccacaggaagtgcttctaagattaagctcaaatcaaagtgatgaatgattgttctgtattggtaaagccttttgttcatcgactttgttgcaaaatattcttttgttttctatgtttcttcaccactacattacatttctttcttgttgttatcctcttttggtgtttctgctattaatcgaaaaagaaattttcttttcttagtttcttttttctcctcttcttaattctgtgaagataaaaaagaaggatgaaaccagtggccagtgggcattggatttggctttttattttaggcaaaagacaggagttctttacaaaaagctaattctaaaaaagaggaatctaaagccgaaccacatgattggagttatagaaagaatagtgacctgccaacaaaaacagtacgattaactcggcatttttaattcatcgacatggtcaacatggtcaacattgtcacgcttcacttcattatcacagtatggaatacagcgccagtaatcataataatattttttttaaacaatgtgctcagtttgataactactctgacgaagcatcaaacgaacagacaaaaaacattggaacccccgaaactatgatccaaattccaaaacctaaaacttagagagagcaattgttaaaagagttttgtccctcttatacacttggcaggtcttaaacaagaagttgactcaagtcaagattcactacgagcacgtaactattaaaagtttaagaaatgccaatagggagatagttttagtacaagagttttactgtccgaaggtcacatttctacgatcccaacaaaacagcgatgagaagaacaataccgacacaaaacatttgaacactaacttcccacataacataatgagcagccaaaatgtcataacacaacaaaatggacaataagattattaaaacgaagcatagcttctttaacaaaagacaaacagacaagagaaaggtcgacaatttcttcaccatcatcctcataacttattgttgtaccagtacacacctttcttgtcaccttccctgtccggttctacatagatacactcctttgcctccctatacatcgctacataccacggtgttccatcgaactggtaatagtctcccagaattggctttatcgcctttgtagcttccattgcgttataatgcggcattgtcgagaacaggtgatgagccacgtgtgtgtctgtaatgttgtggaacaccttgttcaagattccgtagtctctgtctacggtagccaaagctcccctgagccagtcccactctgatgaatcgtagtgaggcaacgagggatgagtgtgctgcaagtaagtgatcaagacgaggaacgcattcactatcagaagcggtactccgtagaggcagatcatcgaggccatcccttgtgcagcagcgtaacggtaaagaccaaaacagacggctagaatacccgcatcagagaggtatatctggaggcgttctcggtcattgtagatgggagcgttggggaagaaatggcaagcgaacccgtcatacggtctgccagagacgttaaaggctaagtacaagggccacccgaggacaaactggacggttaacatcatgatgcgtccaagagggttgttgaggtatttcccgtaccacttgattgctgatttctgctttgggacaaatacttcatctctttcgagggatccagtgttggaatggtgacggcgatgactatacttccaggagaagtaagggacgaggaggaaggaatggaagataagaccaactgtgtcatccagccattggtagtcgctgaatgcgtggtgaccgcattcgtgggctatgacccagataccagttaggacacagccttgacaggcccaatagagtggccaagccaagtaagagagaggctgagggaggagagagaagtaattggtggcgacgtagtagaagcatgaggctataatgatgtcactgataaggtaggagaaagagcgagggattgagcgtttgaaacaatgcggcgggattgctttcttcagatctcccaccgagaaaggcggtttctcgcacggcacacgctttgtggtgtcggtttccgatttcttggaagaagtaggaaccggcattcttccacctgcacccatgtttctgcagaaaaccaaaagcaaaagaatcaacaagctgaaaactcaagactatggaatagttttatcattaattctaaaaaacagagcatgcacaagaaacaagtggtaacgattcaagagagtcttcagacaaatgatccaaagtgggaaatcaggttgtgaaagggattgccacaaatagaaaatgcgtggaccaaaaggaataaagagtagagaagcggcataatgtgagaaatacaaaaacgattgcgttgagaatacgactagtagtaagtaatacgatgttaataaggcaggtcacatctcttgcttgtggttaacatcagtttgcttgtattaaaaattcagcgatcgaaatcacaaatcgtattgaaaaccaagttgacaaacaaagccaaaagaaaacagttgaagtgatgtataagccaccagaatttgtcgacatcatatatcagatttagatatttaaacagaaaataaaatgtgacgacggatctagaaaatttgccatgcaactgtaatcgcatctgaatcaatcaaagagcatctgatcctgaattattttgattccaacttttatcgtaaggggtttaagagaatctataaaacttttgttttccttttattatgtatttttactataaaaacccaataggagtaaaaaatccaggaaagattcaatagtagaagcagatttttacccagaacaaatagccaaaaaatgaatacattaacaaataacaatttatgctgttttttttttttttcaatttccaccaacccaccagaaaataaaataaaataaagatctaaacaaattggtcaaagcaaatcatcttagaaaaaaagaagaaaagtgaaaatgcaacatatcgttttgtagacgagagaaactaatcattgtatgaatgagagagttcattattattaatggtgacagaacataaacaaacatcagattctcgaccaaaagaaaaaaacagagaaacagagaatcgagaccagatctaaggttgaatgtaaggagtataagcagatctatcgtgagcggagaaattcacagagcaggagctactggaaagaaataagaatcaaaatcgaaaatgagaagaaatggaagagaagcgacggacctggagatggagctgacgtaggggcgataacgttaataacgatgaacaccctacgaagaagaagctcctccgcagaatctctctctctctctgtctctctctctctctctctctttttaatttgtgagtgtgtggctcttcttctggtggtcagatggggaatggcaagagacagggctttaaatggacacggcccgtgggtcgaaggtagagagagagagagagagatgatttgatgacacctttccctttcatactgggcccccaccttcttttctttcccctcctctcttatttcaacctttttaatcaattcaaaatatctggtatttttatttaccgcaaataacccattttttacttgtgaaaaaaatataacagtgaacattaactttttaatatcacgttctaatttacttagtttcactttatagtcgaaaagtacgtatattaatttataatcactagtaaagtatggattgaaactcaaactaatctctaaaatatgtagaaattaccgaatattgtgtagtaaattaagatgtttataataactaactttagaatcatatgaaaagaaagaatcgtaagtgatgggaaccaaaccttggtcttaactcttaatacaatacacatggcaaatctttcaccattataacttaaccatttgattaacaccaacttggttggattcaacttttttatatttaagtttcgtctctattattactagtttgccacttacacaagtcgtaagcagtggtaggcggggaaagggctaaaagtggaaaagagagttcttacgtttggcttcttctatcatgtgaaacattaaaatatctacagacattgtgttgtggtggactggtggtcacgtgtatggatacccaaacgtgatgcactttggtagattcgtgcggattttctcttgtttatgttttcaattgtaatctttattatattattaatcaaattaggtggcggacggaaaatacaagtacaagttaatgcaatcaattaattgggatgattaagttaagtctcttgcattggacttctatttttctatctatctatttaccgcgtataacgacgacacaccttaatttcaacatttttaagatcacccgtcaccaaccatttattttgatctttttcttctatcaatcacggatttttattaaaccatttttctcacaagaaaccacatttttgttcttaataagtgttaactgatctcgattcaaacagttagcaaagactccaacatattcagaaaatcttacgaaaattatataagtgattcacacacatgacataacggagataacaagaatatgaataaaaggcgtcatacaatcctaaccactgtttctgagttttgtcaatcattctcttcaagcttcctcccatctcaattcatactcagaattaaccaaaaactaaactattaaaaaaaacaccaaatagacttacaatgataatgaaactaaaattgtattctctcataacaaacaaaaacaaagtaggtgaagatgatatcagatatcaccaccactaaataagaaactagttttaccagcaaattctctatctgcaagcaacaactagacgattcctgacttgcgtagctctgcttccccatgagcaaagtgacatctatcaccaaatgtacagtttccttttgagaatctctcacatatcttagtcttgaagttgctccctggatgtggtttcccttcagaacccatgccaccaccaccaccaagaccaccaccaggtggtttcttagctgctgaattaagcctcccaatcaaatcttttaccattgcactcgcttcgcttatctgctcaagtgttccttcaagcacaatgttcttcaagtttgggtctctctcgtgatcttgaattgataattttactcccgtctgacgacatatctgctttgaactgactccgcctttcccaatgattgcaccggctaaagaggcatcaacactgaatctggcagtggctgagtcaccaaagttagagacatggccaggcccagactctcccctccctgagaatcggcctccattaccagaaccttgcatgtttctggaaacttgaggaatgggtggtcccatatttgtcatctgcgatacagcattgtatcctccgggaacataatgcaagaaatggcaattctctccgaaaggacagccagaagtactgcaatagaagcataatacatcagagatttaaacacaatgggaatagaatagcacaagaacaaaccaaatagagacagaagaaatagcatattgatacagcaatgatcattgtgctataagagaataaaaatagtaatccggttctgcttatagatgcgcggcaattccactagtaatgcgacaactttacctgaccataaacaactatattataaacccaaaatcactaataccctaccaccaaatagaagaacaactatcacagctcaaacaaaatacatgttttggttgattttgttatgttataacaaccagttgaactaaatgattctcaaactagatacgcttatctattcagattgaaacatgtttacatacctgtataacaactaaccacttcattagcatctagtattacttggtaatttcgggatcaaacttgcaggtagataacaattcgaatattaattcattaagtaaaaggattataacctgaaaaattttgtgcatggcttcgatttgcttcctaaaccagttgaatatgattccatctctgttccaaacattaagtgttttcctttagttaaaaacttatctgaagttcaatatattgcttttagaatccaacatatcattcatacattcatcttatcatctatatgaaactttcaaatcaaaagatgcataatgttttttaatgttttcaggataactaaccaactggacacaaaaacactttgcagaggaaaaaggcttattcaatcaacaaaactaaatccttggtatggttataaactgttattagctttatatttgagaagagggattaaagtaaagaaatactaaaactcaaggacagtggaagatataagcttgagaccaacaaaacccagtaattaacatttaacaatagtaacaacttagctaaagctgatctatcatcactcaatttagatttacatcagataaaaaaggccagtactttttgcagtaatctagctaattaacaagataagtaagcaaacagaacacgaaatcaccaaaacaaagcaccgagaacgaaagaagaaaattttgcctcctagtaaatctcataactagcaaaaaaaagtcttaattttacccacaacttaagatctcgaatttaaaccttaatcagagacagtgaaacataaggaactaaaaaagatcggtacaacagaattccagtagataaagagtaaaagaactaaccttgcttagacttcttgtatccgccgccattggagttgaatgagccagcttcaggccgtcctctcttacgagtatccatgattaagtatagatccgatacgagagtagaaatcaaattgactctagagtctagagagcgaaaggaaaagcgaatcggagaagacaaatcgaaatcggaatagggaaaaagagttagagagaataagcgagaaaataaacctaaccctaaggtggttgtcgtcgagggaaaaagatgagattttcctcttttttgtttactcttgccggttttttttattggaacttaaaccggcgtggcccagtgcacaaaataagatgtaaaccgaaatttctctgtaaaggacaataaaccggaaagatttagcttaacgtgggccgtgaagtaagcggtgcgcctgtttacgataagctaaaatgtcaaatggatgacgtcatgttttccttatttgatctctttgtaacattaacaaaatggaacttttaccggcccattaacggcccacaacttcttttaatggcacaaaatttcagttcgaagttactgaaatcttgggataatgactatgaaacttgcaatcaataaaaatgtcagctataactattcgggatttgtggaagcatttgattggtttctgttttaccaatcacagttgtaaacagaaaaaatgttaaatattgaaagaaaaaatgtggaagaaacaaaaataaaactcaataagccaaagagactcaaaagcttaaagacactcttgaatgacttgataagtattccctacagctacaagagccaaaaatgctaaggctattaaaatcagcaagggttgaatattcttgcgaaatgcaacaagttggtccttgtgatcctccctaatatgtaccttggccatcacaaaatcatcttcttgtttctcatgatgagccttcttgattccttcttcatgtgccaattcctcaagcctaaacaaaacgtctgaatcaaccaacaagtctgaagcattatgatcattattaagatcagtttgagggatcagtttaaggatcggatatttggagtctgacgatgaacgcgggaaagactgagatcgacaaactcgtttccgattgggacgacacttatattcttgaaatcatattgcaccattgtattttttttcttaagagaggaataccaaagaagctttgcttaggctttgggagaacaaacgaatgcattacatgtttgttctttaggaatagacgatagaaagggaataggcaaaatataactacttagagggattaggccaaatctaaaagaacacggattagttgggaaaaaaatggtgaatattttcattgtcatctacctagtttccttttttttataaaaaaaatccttttaatattatcaaataaaaaataatacctaatgaatttaattttattagaacaaattccattattctaaaaaaatagagtaaaaattgggaaaaaaagaagatatgcgtggcaaaaaaagaaagaggaagaaggtaaacgggtcaaagaatatctacgttgcttctacaattctctattattgacagcttcttctttcccctttctctctcgacttctaacaatcgcataatctccgatcatcttcttcttcttctctcttctccgttattcctcccgattctgcgatttctcagcttacatgatgactggaaacccgatcccagtcaatctctctaaggagggttcttcgtctccaggtatttataaaattccttcttgagctaggattttgtttgattcatcgctttctgtgtttgattttttacatatttcctgctctctatagctttatttcatcatcggtctctggtgtcgaatttgtttccggctcttgtcaagtagtttgggaccttaataccttcaaatccgttatctcgtagggattacaaagaaatcgcaacgagctgatttagaagaattcgattgaataaatcaaacatgctagatcgaagatgaatgaaatccgctgcaaattgcaagggggttagtgttttctctaccttctcttatgtcttctgctatgaatgcatcatctgattagctcctcgttagcatgttgatgatcaccttaagcctgctatgaccgcattgaaggatttgtggaacttatttctacgagaaaccaggtgcttcttttgctaaacgcagtgtttttgttatgcaaattcagattttattgtgcaatgtaatatgcatgttatggtcaaggatactttgagcatgcatctcaacaaggctacatacacgttaaccttacagtatgcattgtcatggcaggtctagttatctcttggaggtaaactcagcaacatttacatggtcaatcatagtcacaggttacactctctaaaacaaatacttgtgcttacaaccaaaatcctactttccattccctaacaaatttaattttcatacattttcctgacaccaatttagaagaaactcactattccatcttctgagcaacctctttgtcagccgagcacattgtttcttcttaaatccagagtcctttgggtttcatgaccacagaatcctgagtaacatacagcttttctctcatccctgtggcattggatgatcatgcgaatatggtggatctccatctgatgagttacaagcagataaatcaattatagattcaacatgaggaagaagtatgcaatcgaggttcaagaagctgggcaactattcagctgtttacgaagttacactgaagtgggcaagtgtgcgttaagaagaagacctatatttcaagctattcaactgtttacaagttacgctgaaatcacaagctgagcaagtgtgtattaactctcttattatttttcctaggattaagtttgtaattatgcttgatattatcatcataacacaaaaattcaatggtaaataatatattattctgaggttgcaaactaaacgtagcgtgcttttgttattattacccatttcgccatccgaagtatcagcaagccttgcaatggcagcaatgagtgcctgttcatgttcctgcatcacaaactagtgttattgttctctgatcacaacattataccacatacaaaaggtattaatctcaaaccttgagcattttcttggccttgtcgagctcgagtggatcaggatgcgtagaatcgaaaactctctccacctaaaacaaaaatttcatgttagagcaggcattgagcttaatgggtatacagcagataaaaaaacacgtacctccttcacaagcgagtctgtgttgaacaactcaatatcatcagaggaagttctccgcccaccactaccattctgttgtgttggtggcggtacaagttcccttcttggttgatgaattcttggtcctctccctctaccaccatggatttggcctcttctgttgccacggaaggatgcacttccatgtccaatgtttaaagctaccccactctcctccccatcccatcttatgtcttccggtggtatctaaacaataataatgtcagctcttatcaagatcatcagtatgtacagacaccagatcgcttacgaaaacatatgcaaccacaggcaaagaatattaagataatgttcatgtaacgattacctccttgagatcaacccattcccacgtttcattagctgcgtgtatatcatacaccaaagcatgccgaccctgtgagaataaaacaagtgcgtaaattgcaaatccaatagataatcagagacttctataaaaattggcagggacaacaaaccatctatctacccaattagcaatctacactcaatgaacaaaaatagtacctcatctgcattgtactgggttataattgcttcatagaagtggttatcttcaggccattttgtccacacttttcttccgatcagagcttcagcagattcatttcctgatatgccactggataccagacgattattgaatgacctatttccagtcgcaccaattgatggattatactgcatctcacagataattggttaagaaataacataaaacaacacaatgtggctaaccagaagaaagtattaaagaaccatcattggtgcaaatacggctagaatataagacttacagatggaaatgttttctgtttctttcgggcagctgagaaagtgggactaggaagaacatcaaaaggctgaatagttgcatgtctagtaatttggcttgcgcctccctgtctccaatctctggtacagttccatgatacaacatatattaaaataaacgagattcatgataaattttgtttatgctggtgcaaataaacaatctaaccttatcctctggatagtatcatccttattgaccctactgagaagctctcgatgttcatcatcagatactctcaattctttacgcaattcggttatcaagctttctttttcctaaattgcggaaatggtacaacaaaatatattccagagattaagtcgtgagactgacagaacacaatcaatgcaaaggaggaagagagtacccaagaaatcgcatcagactgcgctttaaaagcccttaaaacagcggtatatgcttcctgctcaagttgatgaatttgtgtctccatatcactatgtagtttagtttcagagaatttccatccaaacgaaagctatcccttttagagatttacagtcatgtggaaaacagttgctatcagtaattagaaagctgatgataacaaatttatcagccaactactgaagaactttagaattgaacaaaatccaaaggaaacataaaataaaggctgcagaagcataaacaagacaagacaattccccctaattcacgaaaccacggaagctgaacacttttttcgaaaccctaaatcctaacctcggttaaccattccctaaaccctatttaagacttccgtgcctaaaactaacagtaagggtgttgaattaggtaagaaccagaacggcctaactcaagctcaattcgcagattagctatcacaaggttcatcatcgaacgcctaactcaataattgctcgaacgagattcaaaaggggcagaaacgtttaacatacctctgttttcgaaatctagaggaaacccccacaaaagggtttatcttgtcgaccgattcagatacgaaaccctaaaacgctcgaatcgaaacttgacccgcaaaaagcaattaagggttcgaagtgcgttcggtgaaacggagaattgaggggattggaacgagaagttgaaagaattggacaaaaagaaatgaactttccttcccctctcgagagaagcgatatttttttaagcgaagggcacagagagctacgatcgatttctccgggactcagatgggatggcgtcggaatcgccgaacagtcgttttaaagacgaaacgattcgttttggtattaagatctctaaggcccaccaataatagcaacttcggcccatatagcctaatatcttttgactttttttttttttggtcacacaaagtcatattgttttgtatatcgttcctgattatatatggtttgttgtgtatggatggtttctctgaaactttgtaaagtctaaatcatgtttgtgatatatttcaatgattaaaattatgcttgtgatatatttcaccaactaatcaattttgtaaaacaaaaattattaaattaaaaattttagtatcgatttttaatccttactttgtcaaatctattgctagatataacaactaagaaactaataaacttttatcagtgtacgttgttgatcactagctagctactacataacgaaacacttgtatatatgtgatcactagatgcccccttgcgagacaaggggttaagttagttgaattgagacatatgatgatatactaatcctaacctgcaatacgagaacgagacttacgtagaaccatgcacactgagattatagagatacactttgaatatctcaacatcattcttacccttttcttgatattaaattctcttaataaggaacctctgacttggcaggcggtaatgattattaacacaaacatcatatggttaaaacgttaattattttttaattcgccaacattagaccaattcaacaagccttaagcagagtcccacaaagacagaggttgtgagagtaggcatatggttcaaaggtctgaaggcgaccgccacttgggattttcccgcagagactattgtagctcacgttgaaacgctcgagacttcgtagggtagtcaacacccgaggaatcttaccaaagattcggttttggctcagatccaacgtaagtatgctcctagcgaactcaatcttggagatatcgaactgaaacatgtttctcgacagatccagttgtcttgttgttttgttccgtccgaaaaacatggaaccatctccggttaaactgtttcccgacagaaacacagcgttgaagtcgtgttttgacaatgactccggtattttccctgaaatggagtgtcataaaacccgggatttataactttattaataataaagaatgttaaaaatgatggttacctgagagctgattgttagacaagtcgagttcagggacgttgccaacaaaagaaccgaaagagtttggtatagaaccggttagcttattgtcgtggatctcaatggcttcaagcttgggcatctgagatagcgaaccgggaattggaccgggaaattggttaaaggaaaggtccaagaacgtgaggttcttgaggtcgctgatgttatcaggaatcggaccggagaaattggtgtgttttataaagaggaggttgagactcttgagcatggtgatcgcgggtgggatatttccggagattgtactggcggaaaggtagaggtaggtgacgcggccgtcagtgcattccactccgatccagccagtacaacagccggttcgggggttccaggaggagaggtagggagggttgttaagggacttcttgatttgaaggagggcattattgtcatttgggttgcaactgtaggaagatgggagagataaagatgatggagaagaagatagagagatgaagaaggagattcattgtgatcatgggtgtggttactttgagcagttaaacaacttgtgatctatataacagagacttcaatggaacacagctgtgtaatgttactgattttgtacagtttgggttctacactactcctaaaagttctaacgtacaataacctttttataacataaattcaattcatctcataactcataaagcatggtgcatatatatatttttatttagttgttttaactatttgatacgatattcaataatttaaccatacgttcgtcactgcaccactcaattctaacacttctgtctttgttctgttcttagtttatcggttgctcaaatataaaatagctagaagtgacttaaaaaaatcgagtaatggaatcgcatatattttgttatgtaaagtatggttttgaaaattactaactcataggattatgccatgtgtcaagtctatcgatcagatgttgacacgtgtaagaacataattaatttttttcttcttaaagaaatagaaatactaaaaaaaaaatcaattaaattttttcttcttaaagaaatagaaaacaaaaaaataaatcattattaacatatactaattcatatatatatatctaaaaaatattacattttatttttcttaaccaaaaggaaaattaaccaaaaatatttatatatgttattggtcaaatttttaatatgtatggtattaacaaaatttttattattattaattatgttttgttaattgttaataatttttaatattaactaagatatagatttgatctcatatatattattttgacatgaaatcattatcaagtaagatgaagtgtatataattaaaatcgagttttttatgaaatagatagttaaattgtattacaaaattgaatatgtaagataaaaatttgttcttttcttctaaatactaaattataataaagaaaaagtgtgtaagttactatttagacttcaaatatcatcaataagattgaatgggtattataaaataaaatgcataagactactattttactattcaaaattatatatcaagaacaatgtatagattattattttactattcaaaatttaaatattatcgataaaaaattacagttacattttacacccatctatttaggcggacttatctagtgttataaagattagacttgtgaatatacctcacaacattcttacgtaaccaattcttgccattaaattaaattcataacaaagaaacaataaacttggtttggcggtgataatgaacacatcatcataacatattcaacattatttttattcttccgccaagattaaaccaaattaacaagccttaaggggagttccacaaagacagatgttgtgagcgaaggcagatggttcaaaggtctgaagtagaccgccacttgggatttttccgcagagatggttgtcgctcacgttgaaatgctcgaggtgtagtttagtcagtgctggtggtatcttcccgtagatatggttctggctcagatccaacgaaactatgcttctagcgaacttaaccttgacgagatcgaaattaaacatgtttctcgacaaatccactcgtactgttgttttgttccgtccgaagaacataaaggcatctccttcgaaaccatttcccgacaaatccactgcgttgaagtcgtatttagacaacgattccggtatttttcctgcaatgcaaaaatttcattaaaccgggattagaaatttatcaacaaaatcttatttggtgcgagatcttaactataaaagtttctttgtgttttgttggggaccaattaccaaatataagtaagtaactagtttagttaagggtaatcccactataaaatcttcattggttagtggttacattaacactttaaggcacgaggctagttctacgattccgacataaataaacatttgactttgaacacaagccaagccaaaaactaataaataaacatttgaccaaaagcatagtattaactattaaagaaatggaaaatgatggctaattacctgacagcttattgttagacaagtagagattagggacgttgccaacaaaagaaccgaaagagtttggtatagaaccggttagcttattatcgttgatttgaatggcttcaagcttcggcatctgagatagcgaaccgggaattggaccggtaaattggttaaaagaaaggtccaagaacgtgaggctcttgagctcgctgatgtaatcaggaatcggaccggagagactagtgtgcttcaagtagagagtgttgaggttcttgagtttggtgatggtgcgtgggatgtttccggtgaggtgtggcaggtagctgaaatctagtgtacggaggtcaacgaggtcgccgatctggtacgagatctgaccggagacttcgccggaggtaacgctgagaccggtaacgcgacggttagtgcattcgacgccggtccagccggtacaacagtcggttcgggggttccaggaggatagaaggggaggattgccaagtgctttcttgatttgaaggagggcattcttgtcattttcggtgcagctgtaagaagatgggagagtgatgaagaggatggagaagaagatagagagatgaacaaagagcttcatcgtgattatgtgtggatgctttgaggaatgagcaagttcttgtatataagcagagacttcaatggaacacagctgtgtaatgttactgattttgtacagttagggttctacactactcccaacgtacaatattcttttcacaacataaatttaattcacaagcatggtacatatatctctactattcaataatttgaccgtatgatagtcactggcacactgcaccaaatagttaggtatacaaatgttttagcatgtgtttttcattgtgtataagatatatacgctagttaccgcatcattcatagtgagtacaatcatttcatttcatataaaacacatgctagaaaagagcgcaaagaaaaacaatgttaaagatccaatgtatatgacatattaatggaatgtaatgagcgaaaacccctaaaatggttgctatgtgttgggacaaaaacaacacaagacaaataaatatcagagcccaccacttttgaaagcgcaaagaatcttattcctaacatacacaaatgatacaacaagaggagattaagacatttacataatgacccctccctttgtgttaaaaaggggctgtgttacgcatgttatacctcaccatgactccttccagtctaatctatcgagaccgtccacgattgctctgcgaaactcatcattgtgaagtataaaggaagacacgtgtccacctgtgacccatctcacttctgaaccaggccacgccttttgaagctccaacactgagtgttttggtatgtatccatcatcctacacaaatcatataatcagcaaccagtaatgtgtctccaaacatattgtttgatgtttcgagtttcggaataacttttctacttacagttgcagcaacaaagataacagcatcagggtttttgggaatagggaagcgagtgacgtctgtgagggagagaacattccgcatccgctctctcacttcatcaagagtcattgtgatcttctgtgctgcaagttcctccctcagtgcctcccaagcagtcccatactttaatattccttcgcagaatgcaacaacagcagagtgcggagataggaatggaagtgttgcaactggtgttggatgaagcgatccaaccatcgaagcatgtactcctcctaatatattcatccacctttatcagtttgaagtttcaagtgaaaggaaaaggataagcaactcaatcaatgcatgaagctgtagccgcatagatccctagatggaacacttgaacctaaatctatgggtgcatatgcatttgagaagcttattgaggagttggattgttatcttatgaagcacgataactaggagcggctactttactttactatagatatatgtagaaagccaattaccatccccacaactactgcaggaaacctataccagaccatccaactagcgacatccacaacacagtttaaactttggataaccttggtgaaaacgcagatctaacacttattcatccaatttaactcaatgcattagctcacaagttgttcatagaagaagataaatgtaacttacccatacttagcccacaaacacccatctttccaaagccttcctcagtgtctagccagtgaataagactgcgggactcttcgattgttgccctccctagcaaaagtagatcactaacacagaggagtctcgcaccgcattgaagaaagggacgcctttggccatagaaagggctgcagtggcattatctatgtttgatcaaaaacatggcaaaaagcttcaaaagcggtcaaagcaaaatgatttgctcttaagctttcatcaagggggagaaacaagtctcttttattacctttccaacaccattgttgcaatgttttgtttcaccaacggtccacccaaacgcaatcttcggtcatatgtatgatcacctgtgcctacaacaatgccacacatcatcagaaagatatgatatttacaaatcaagagcaattgtaaaaagacaataacctggaagggctatgaacaaattaagatcacatagacaagcccttctaacaactaggcttcaaaacaccaaatttaaggtctccttgtggtcactttagtgtatatacctataatctattctaaacagagaagaatcaataatggtacctgcaagatgaaccacacaagccatcttttggggaggaacgtttttggggacaagccaagcaaccctggctgtgcgagactccggaggcaaagcagcggtaagctcatcggcacaaggagtctggaaaacaccttctctcaaagtagcggtctttgtctcccaaacagttctccagactggacgaaccagaggcggtggccaattctgaccttgaacctcaagagggaagaggcgttgaaccatacgctcgagcaattcgagattgggaccaccccaacctcgagagaagaagggtggggtcatcttggtgcggtgcataaacgctccatatatatggtcaattacataatggagcattcccaatttggtcgtcaccattgttctcataaataaatctcagaaatctgaccgatttgagaaatacctagccgccggtgaatcgaatatgaatttggaacttgggtgcttcagatctggtgagaaagacgaaagcaagcatccattccccaatttgtttatcgaatcggaggtttgactttgaagtcaagataaagaatatgaatgcaaaggtgaatcctttgttcgagatcgatggagaaatctaagaagaataagaagataggtaagagggtatgggagaagcgtgaagaaaattgggaaaccggagcaaaacgattgaaacggtgggctgatgatgatattatgtgatgccacgctggcatttcgtggggtccattttttgggtttggtctttttgtagagaatcgttatccatacatttgacattgacagaatttgaagcccattggtctgaattatagttggaatcggctgaaaagaaaaagaaaaaaaagttggaatatgtattttcctgataatgaaggttggaatatgatgggaccactatttatttggttgtcctgtaaataagtaatgaatactctacacataaaaaaaagtgtatgttcatatttttttgattgataataatacacatatcagcagaattatcatctttttcttgtgaaatcaacacaagacacacgatctcataaaaggttatttttttctataaaatgtgatgtaaaaaatgggggcttcttgtttcaccctcatactctttctctagtaaaccttggcatattgtttcgtttcaagaacaaatggcctaacacgaataacaaaatatataaagcgggacaaagaaaaaacaacaagaacaaccaaaaaatacaatctttctctctttcgctagtagaattacgatttgccgcaacatccacctcttttcccactctcttgctcgctcgggatgatgattctagttcctttcaagagacttgaattaccatcggcgtcatcatcatcagccgttagtgatttcttgctgattattcggtagatctctgttaagatggtcaaaaatgctgtttcaacattggtagcttctagagcagaggtttccatgaaaaacaagttttctctttgtgcaaactcttgtgcgtcttctgttggcactgctcttaggcttccaagatcacatttgttcccaattagcataatcactatgttcttgtccgcatgtcctcgtaactcttccagccatttagccatgtgatcgaatgattgacgtttggtcatgtcgtagaccaacattgccccaactgctccacggtagtatgcacttgtcaccgccctatatctgccaaagaaacactttgataaacgtaagagccttaaacaaagtgatgatcaaacatcacatattcatgttgcccatttgcccatcaaagatcccaacccattgttcatacatatctacttatattggaacatgtgttgcctaattcaatggcatctctagctgctaagacataaatcaatcaaatggatgaattgtgaacgttctctgatatataccaaatgatattcatggtgtcattacttctaatgaatgaagaagaaaaaagcaaaacctttcttggccagcagtatcccaaatctgagctttgacggttttgttatcaatgacgagcgttttagtctggaattcaacaccaatggtggctttagaatcgacgctaaactcattcctagcgaaccgagcaagaagctgagttttgccaacggcagaatcaccgatcaacacgactttgaagacgtaatcgatcttttggttataatctccatacaaattagacatctctcttcttcttcttattattattatttaaaaacacaacaacaaaggagaatgaatatacacaaatctccagatcacgaatacgaaaggcgaagagtctcggattcgtattgcacgcgtgaaacagtcgaatctaccatcagacgaacacagaaactcagatcacaatgaatggtggttaggcagagaaagcgaaaaattattcagagattgagagaaagagaggattaacggccgatgcgggaccctttactctaggaattattctactgtgccatagatcacccttaacccaattcatcctggccgtttactttattcgtaccttattcaccgttcaatttcctaatggcacggtacgtaaacataaccggcgcaatttgaacgaattaattcaaaatcgatatcataccaaatcaagttcggtttaactactataccagattaggttataaccttgttaaaataggcggcaatggaaatttattggcgccataaattttctgagaagcaaaattttaactccattacttatctctggtgtgtactttctcggcgaaggagttacacgagaacgttgaaaatggagaatgatggaagatccaatgagaaaaatctgtacgaggtatctcaacattctctttatccgatggttccaattagggtttccgtttctggatttgggacttgttccagttatgcttcgaaatttaagattgttttgtcgattttcatgtgctgattcgtctgatgatgtttttgtgataatctgaatatcattgtttattgttgggattgtaagaggctaagagactttacttggttaagatccatggtttgatcaatttgtaccgtagctgttgcaattcttagttgttttcttggtggttagtagaattcagtgaaacgaactaatgaatgcgtctttgttgaaggttcttggtgttgaagcaacagcatctccacaagagataaggaaagcgtatcataagttagcattgaggcttcatcctgataaaaacaaggatgatgaggtttaactgaggggttttggtttctttacttttcttagtttttaggggtctattcaattttacattgtaaccggaattcttgtttttcttatccaatacaggatgctaaagagaaatttcagcagttgcaaaaggttatttcgattctcggtgatgaagagaaaagagcagtctatgatcaaactggctcagttgatgatgctgtaagttgaaagaaagttttcaacttaagtaaaggtactggaggattttcttacaaactggttatttccctatctcattaggatctttcgggagatgtggttgacaacttgagggacttcttcaaggcaatgtacaagaaggtaagaatcatgattcacaattgatttctttttggactttgcaacacaactgtttcgttctgtatactgatcatttgtgctataggtcaccgaggaagatattgaagagtttgaggccaactataggggttctgaatccgagaagaatgatttgattgagctatataacaagtttaagggtaaaatgagcaggtaattaatcatccccttgttttcattattgtcaagtttgtgagttgaagtttgtataaacattattggtactatatctctttcaggcttttctgctcaatgctttgctcgaaccccaagcttgattcgcaccgtttcaaagatattatcgatgaggccattgcagcgggtaggcttctctttcttgcaataattcttttgtctataaaacctatccaggttctgatttgtttgtgcataccattgtttaacatctgcaggagaagtgaaatcaacaaaagcttacaagaaatgggcaaaggagattgcagaaatggaacctcccacgaatccccagaagatgagacggaagtaagcttctatttgtctaccttttccaccccaataaatgccctctgaagttatctttgttgtgacctgtttcaaaatttctatactttcagagcagcaaaggctgcagataaagatttatacgctgtaatgtcccagcggggagatgagaggaaagagaagttcgattcaatgttctcttcacttgtctctaggtatggtagcaatgctgactctgagccaaacgaagaagagttcgaagctgctcagagaaaagttgaaagccggagatcatcgaagaagtctagaaaaaaataaagattatgtagtagtttgtgaaatttaggtttcgtgtttgtaatggagaccaatgtttttagcgtaaattagatcacatttgttgcttcttagaagttgaagactaatgtgtatttgctaggaaacaatgtgtatttttactttttgtcttttttccaacaacaaaaaaagcagtgagtttaccagttcaaaagctcagggtcccacgtgtatgtcgtctggatcttcagaagaagagaaattctatcaccgggtcctaggacttctccacctgcaaaaacaatcaggtcgagtaatgcatcataatcagttgataactaaacaagcctttgttacaatgtaacatataaacgtacggtatcaaccaagtttctcgggaagaggagagtggacggatcctttggcttgtataggcctaaataaagaactaacaaatttcaagtgaacttatttaaaagaaccaaataattattctaaaagagaagaaaaaaatgaaattatttacttatatggcttgtataggcctaaatggcatacagttaataaattttgttagttctttattaattaacaccaagcatcttttttttttgttgaaaaagaaaaaggaatttaacaaaaaggatattcacaaaaagaaactagagaagtaataataaaaaggaaagaagaatctaatgtccaatagaaccccaaagtaaagtacaccaattgttgagagaagaagagttctttttttttcaaaggtatttaaggagaagagtcgcagtcgcaaaaagacgaatcgtaattgttgaagagagcaaatatggcttgggatttgtttttatggatagtctccttcttcgttagcttggctctcgtcgcttccgtcttctaccaggtaatctatctactttgtttgtccccttttactttccattaagattcttaaatcgagatctgtccttactgttcaaatcctgattgtcggaattgtacttgtgaaaaaacaccgagcaacttagctttttgttcgaattagctaaaaaattaggaatggaacaattttcctttgtgttcgtcggttttgtactaaatacaattgacaattttttgggtccagagaggtttcattgtttatccttaatcttatgcttctaactcaaagttgttcttagttctgatttggattgtctgcaaggcttgtatatgatacttggtcaattgagacatatagttgattaattgcgagttatatactgtgaatgaatgaagttagatactactaccaatagtgtttactctcatactaactgcctctgctaatgattgaagcattgagattcctttttagtctattgatatcgtgtgtgattttgtaggttatctgcttaacggatttagaagctgattacttgaacccttttgaaacaagtacccgtatcaaccgattagtaatacctgagtttatcctccaagggtcactctgccttctcttcctcctcacatggcattgggtcttctttctggtcgccgtccctgtaacagtctatcacgcaatgttgtaagtatctatatccatccatattgcttatgattcttgattgacatgcgtggaaactaaatacgcgcctcccattgttcttcagatacaaagagcgacgttatctcatcgatgtcactgaagtgttccgtggtatcagctttgaaaagaagctccggtataccaagctcgggttctacgtctttctcttcatcatggttgtctttaggtaaaaaaaactacagctttagctttcctattaacatcttcacttactttggttcttctactatgaagttacttaccgagtccataaaacatttttgcaggctcactctctctgcggtctatagcttcacggaagatgatgatctacttcatttgttttgatttatgcgcttgcgctctgcgttatcaaccactctctctttattttctgagtgtgttttagaaaattgtgacaggtttttattacgtccctgcttagaattagccattcagggattcatcatgtagctttatataacgtatgattaccgaaaactcatcacaaatcgtttgacatggagggtttcatcagttttgttttgcgcaatataatgttcagtctcatcattgaagtcataaaaatcatgtatcaagaatgaagctacattgtattacatagactggctgtggaaaaacgcaccgatatctagtttatcggagatgcaattgaacccgctgtggaccttaaatccatgtccatccaagaggaggaggagaaggtgacccaaacagaaactctgcaagaacaaaaaccaaggcatgtttcaacaaacctttttatatgagccaatttttgcgatagtgaccaaatagcgacccaagaaggattacggcccaacccaagagagttatccagcttgattacgtcccagaccccctatgacccgatccggaccggctcagaccatctcacaaaccgataatatttactacgggcattaaaccggttaaataaggaactttccttatttagattttttagggcaagagtctgggaccacgagagactctagtcaatccaagcgaaaagatcattcaagatagatagactacaattttcatacttggccgtggcccgtgggtgtccttaattaactcccaacgactatgccacttaatccagcaaataggcgcttattcacttaccttatcaaaaccataatccatcctatgacttcatttcttttttcctcttgatgcctcacttatgagttcttaaaacaaaaatttctctcatgctttttcatttttagtatgattttaatctccagctcaataaatttgaggttcctgaggtgagaaaaataaatgggccatttttctcatgttttttagaaagaaaataaaaattttgacccaaattttaatgtatttcattagcacctccaacacatgtctagtcgtctagagcagagtctgattttaatgaaggtagtttagataccttcaatggaaatacagttaaggaaatccattaataattttatttctgttcttagggataagagacctagttactataaaataagttgaattaaaagccataataaggtaactaataaatgtttgtagaaaataatttgtaaaaagggtataaaaaggtttatatgaaacttgtatcctcatttactcagtagccaaaaaggatcaagcagagagagttcgcactcccaaggtttctttctgcatatttctcttttctatcttcttctctgtagatgatcaaatgttcgatatcgtgtcttagtttccgcgattactgtgttcatccatttcttggtcttttctgaattcaaaggacctattatttcgagttcatagatcgcttgccactttgtgtacgtcattgtgagtgattgtcttgttatctcctagggtttctttggttccttgtggctcattctctgttttttttttgtagtagaaagcttggcgttgaagaaagtgtgtgcaaatggaagtgaaaaagttaagagtcgccaagtggaagaaagagcgtcttcgtagatcattgatgaaggccgagtctaaagcctctgatgtattgtccttcacgctatcatggagagatctagaatctcattttgattcaattgaatcagatcttgtgaagaggtcacaagaaatagagtcgaaggagaaacatctagagaagaggtcacatgagttagagtcaaaaggaaaaattctggagaaaagggctcgagagattaatacagctgatggatttagaagagactttgaagaaaagcagaggaaactagataggctaaagagagagatcgaatctgaggaaaagaaacgttttctggttcagaaattgaaccgagaacgtaagtttgagctaaagcggacaagagagcaagtggaagcgttgcagaagaatgatatgaaactggatgttaaacattccaaggagatgtcggaggagctactggttcaacaggagaagtacgaagagatcttgaagaagaagaagttggaggagaagaaacttaaagattgtaccagagatcttgcactgagagaaggagaccttcgatgggtgagtatgcgaatgacaaagcgttgtgaggaactgaggtgggaaaag

SEQ ID NO: 1289 - DNA, 86536 bp, Arabidopsis thaliana
gatcttgtgaagaggtcacaagaaatagagtcgaaggagaaacatctagagaagaggtcacatgagttagagtcaaaaggaaaaattctggagaaaagggctcgagagattaatacagctgatggatttagaagagactttgaagaaaagcagaggaaactagataggctaaagagagagatcgaatctgaggaaaagaaacgttttctggttcagaaattgaaccgagaacgtaagtttgagctaaagcggacaagagagcaagtggaagcgttgcagaagaatgatatgaaactggatgttaaacattccaaggagatgtcggaggagctactggttcaacaggagaagtacgaagagatcttgaagaagaagaagttggaggagaagaaacttaaagattgtaccagagatcttgcactgagagaaggagaccttcgatgggtgagtatgcgaatgacaaagcgttgtgaggaactgaggtgggaaaagaaaaagaatcttgtgttatgtaaacgtaacgaggaagcagaaaggaagctgaaacacttgaacagagcactagaggagaaacagaaagaggtcgatttgattgagaagagactcggtgaatggagagacgtgaagggaagaggaaacggagataccagtggagatgaatgaagttcaaagagagcaactatgtaatataataggagaaaactagctcacattcaaatatttatatattacatatgacaacagataaatggagtgttcacaaactaaatttaaaactgatgataaaagaatttttttacatatttgacaaaaaccaaaaagggaaatttgtctctaactcaatcaggttccttggttgagtttgtcagacgacaagagtgtctttgcgaaccaaattgcagtgtccctagccgagacaccatcttccccaaatggtgtaagcaaaccagcaagttcttcatatttctcttgctttacaagccctgcacatttctccaataaacactctaatgcatctgccctttctttactctgcggcggacccaattttgtgagcttacttagtaccgatgacatttcactcgctgttagtttcaccatctttgctttatcgccctcaaggcttccagacaaatggtcttttgctgctgcaacttcagtagatgaatgtgcaacactagaaatgggcactgttatctgttcctttggtttaggtaatgcctcctgagtttcagcttcttcgatggctcttggaggggaacatgctacttcttgtgcactcacaaccccaacatcaacatcacgtaactgagattcctcagagaatatattttcagtttcttttggcagagcattttcttcggctggcgtttctgtagagtaaactgcaatatcaggatcaattaagctctcatccgacttctggcttgtaaactcagaaatcttcaatgtgtcacagcttggatcgattctttttgtttcaagtttgtcttctgcgccattcgtagatgatgccggttgcgatgagctgctagatccagtctctgtattcgtccaaaatggatatagattttccaaactgcgggacacctcgctcttctctcttgaaactctttcctttccaaactttcctggcaatgagtttcttcttgctttatccttcggactatttaccggctttatcgggaaaaccggaagataaataggcgacaggttttggcattgaagaaggtatggttgtagagatgggtttcttaacaattcgcaggcctgcaggataaatgttacataatcttagttaaaatagtcaccgtggcaaacatccatgatccaacaatgaatatgttcacaaacttactgttggccgatattctggtttcttcctaagcataagctttatcatttgtttcctgtaacatgaaatagttgtgtcttgtttcatgctgtttgtgtttgtattaaagagaatcttgtcaaatgaaagaataagaaacttacaaggtagaggagtagacgatcggaagaggagacataagggatctgtttattttattgatgagtccagccatatcctgtatattttcctcaaaatttagtttcaaaaagtcatgaaaacattacattacaaaaaagatatgatataggaaaagcttaaggtaggcccaccggagctttaaacgcaggctggtgtgctgtaatttcatacatacaacaacctgaacaaagcaggataaatgtgattccttttaatgacataaagaagtctacattgttcaaacttaacttacccagcgaccatatgtcagatttatatccatatggttgatcttctaatacctcagggcacatgctgttagagatacccgaaacctatgcaaaaagtactcttaattagataatctaaaaagaactgacatttgagatactagatgtacaaatgggtgcagagagatactataaatagaaaacaaaaaggtatagataacacaccatggaaacaggcttttctggatttataagtttcgccagaccataattacctgtgccatgagtagagattaaaagctaactagtgcataaaaagacaaatatatagtttccaatgaagagtaaattcagtattctcatttatcataccaagctggacgtgatcatctttcggcaggaaaatatttgaacactgcatagataatcgataatcagagaagccattcttcaagaaataacacaaaaaagaatcacacatcagcaagagtaatgtactaggatttaaatatataccgttagatccatgtgaactacacggtttgagtgcaaatagttaacagccagtaacaattgtgccaaccatttaaagattctctgtagaatcacatgaataatcagcaaaacagtaacctcacatatttaatgtcgcaaaacaagtgtaaaagaaacaaaagaataaattaaaaatagagagattacttcctccgggaataattttcctctcgctttcttaatagcattagccctgatttggaaaaaacaaaatagttgttagtaatccacgacgtggatttcgctttaggctgagccccatagagaaagattacaaatacagattccaaggaataactcacatgttccctccctcatagtaagcagtaaaaatgcaggcattattgtcctgtgaaaagaaaaagaatctgtgaagaaatccttttaacttgttcatatatgaacattgaaattcaacttttatacattgtcaatccaagaatcttcataatgcacgatataaggattctttaagcttgagagcaatttcatctgcaacacaaaaagaaaaagatgatgattttacaagggaatgagaattgcaaagttaaatgccaaataaaccaattgctcaaaaccctgaatgaaaataagtgaagtgtgtttccataccagatcataatttataacagctctgctaatctgaagttatcaggttaatacattgctcgaataatggagagacgaatatcaaaaacaaatgaataccatatgcgtagaaacaaatgagcaccgagaatcaatacaataactagagatataaatatcacctcatatgctaatacatgtgtgaataaaataactgatacaaagatatgtcaaatgtcttccccaatttaaagagcatagttaacataacgattgaagattcaaaagatcaactaataaaagtcacatagttacctcttgtaaagcggtttgctttaacttgtccgtgtgtttcgctaggcaaatcttcttcattgcatacctaatcgatacaagaaactttaagacatgaaagaaagcaagagaccaacataccacaaacagggtttttgatcaaagagaatgcaaacaaaagaataaaaattgcttttttaaaatttatggatttgcagatagaaactaatttacagaaccaaactcattcattatagacaaaacccaaaaccttgcatttgtccgtacaacacatacataaagcgtctccattattactcgaattttttttaaaaaaatgaacagtgtctgccctaattattatgaaacagagcaaaaagaatcttactttttgtcttcaatatcatgaagaaccacgaaatcggaagaggacttgcctcttctaacctgctccacgacatgatagttgtcgagagtgaacttatgttcctcttgacagtcattagcctccatttgcatgaaatcttcaaaaaagaaaaacctttcccggagaaaaaaagctacagaaacccaatttcaccttgaagagcagctaaggaaaacagtagaacgacaagacaatccaaccaaaaatcttagggtttcagaaagagaagaagataatgaagaagaacgtaagtctcttgtagtagtgccaaaatcaatggaagccgacgacgacggaggaggtatgttgaaatcgcccacctatcaagacttttatttatgtcattggattctttttttttctccggcacagaatttactcttttttcccctttccctatgtactaagaaaaatattatttgttggcaagtaacaagtgactattttaattaaataaaaagtgagtattttcctctcttttcttttcttttcttttttgagtaatgaatgtgtcggtcggcaatcgaattttaaatgtagaaaagttgattgaataacgctcacaagaaaaatatataagaattttaaagcactcatttgattttatctttctgttaaaggaaattgttttaaagtttgaacatgactggggcatggggatttatatgattctataaaatactatgtcatctagtgtgctatttggcgaaataacgatagtgtatattatgaataatgttcactaatcatcattttatttccttatttgggctcaatacaaaaggttttattggggaaggattattgaaaagaaatataagtgttgatattatgttgtgctcaatctatagtcatcaacatagattgattttggtggagaaaatttagtgttggttgtttatagaggttgaccacttaaccacctcttgatcatgatataggtctccactggtttatactcactcgtgtgcccgcctccctataaaccatgcaaaaacaacctatcaattaattaaaacaactaagaaacatatatatgtatgtacctagtaaaagcttttcatgcatattgtatgtaaaaaacttgctttgacagtggcaaatgtcatcttattcgcataagtccttgtgtatctgcaaaaacaaaaaaaaagaaagtcaatctcataagagaatcatgcatgacttattgacttgcatcaatgtcgttgatcattgaattcgtatccggtagaatgcattttgttaagaaaataaattgcttcctagagagaacaattaaacaaaagaaaagtagtataataataatacccagcaacttgattctgaaccatccatggtctccaatcgtcaacaatggaatagttgagagatcttatccatgcttgagttccaaggaaaggtactaacatgtcgtgatcaccactgtttcaccatgaatgtactaatgtttataagcaattgaagcttatataagaaataaagatgaattgtatacttgagaagcaagcaaaggttaaaattgtgtaccgacctgaagacgagagatcgatacccttcaatgctaatatacttatgatatggcacactactcctaatgtccttattgtatgcgatttccgtattacatcgtatccattttcttacggtaccctgcatgcaaccatatattagtcaaccatgtcctgtgaaactttttctttgtcctcgacatttatcaacttatcatatacatatacctcgttcactagaagagctttgcgcacgcttttctcatttgcccaatattcagatagcgaatgcagatttgccatctgcaaaagcaaaaaaatctctaatggtcaaatggtttgtcattattcaaagatgacataacaagtagaccaagaatgattacttacacaagaataaagccacatgcagtcaggttttagaatatattcttcacttattccagaaacacactataaatataaaaccacaacgtctgaaataagtgatcttctttagtgaccatcagtgatgtattaattgaatcatctccttagctaattaaattccagagagtttacctttttaaagtcttcaaggagtttcaagcattttgtgttacgaggattcacgctaatataattcccttgacaacttctctttagagactgcgaaaatcagataataactactttcttttagtgacaagaaagacaaaaccataaaatcccagatttggtacctcatagtgttcatcagagatcagtgcctttccatgagcaaatggaatgcgagagttaagatcaatatcagtgtctgttgccgggtttccgagtacaaagccctgttgtttagtagagagaaacaagacgacgactctcagttattattgcagaaaaatgtgtatataacgtaagaagcaagcgataccgatgaacctgaagatttatttgaggtttgctgtctaaatggtttcctgtgtgacaaatgggaaacaattgataagaaaataatataagacttaaaagaaaatgggattgaaatgaaagaaagacataccatttgagatttcttgaacgatggtcggaatgacaataccggaataagaatttccggcgacatagagcggattggataagaactcaggatgtttgtctagccactgcacaacaaaacaaaaaaaaatgctcagtaaacgtgcatgcatcaaaagatagagatgatttaatagacgcattttaagttttccattcaccttatgaagaaactcgttgaccggcttagctacccctgtgtcacttggtatatcagcaagtggatttctggagtaggagaagccagtcccaacaggctgatccaaatagagaatgctcgccacctgacacgaagcaatgatgatccaatactttaagaagatgaagattcattgggtttgtgttcatgagtacactactaaaatatcgtatattaccttagtccatgcatatgtggtagagaccaaagaggggatacttccattgtattcctcagccttgaaagcaattggccctgcgtttttgtttttggtagttgtttgcaattcaaacaagtcactaattctgatcaagtgataaagaaagaatgaaaagtttttggattttaccattctcataaataagagcagtgaacgaagaacagaaaggacctccacttaaccagagaagaagagggtctttctctggattactctcagatttgatgaagtagtagaacatttgatctttctctgcctcacccacaccaatgtaccttactcattcaacaccaaaactcagaacacacatatatatagtcatacattatcaggataataagaagaggaacctacccggtctcgagctcgaaaggaagagggccttggaaaccaggaagaaatctgatggtagatcctgaatcaacaagctgaatcaaaacaagtagaagatgaaacttgagtatccatgacaagtagtagcactctttccccattctctttgatcaaaagtttttgaatttctttcacaatagagataatttattgaaatatatagtaaccatacaaggccaaagcctgataaacaaaaaagccccacaacattgaaagtctacacagtttgcaaaatgcaattcatcacaaaaacattgacagagacaggtcatattctcctaagaagaaatgagccgcgtagagttaccaaaagacacaacaaaacaacaagtggaagacatgcaagattagttacagagtatactagtgatgaagtctagtgccttgtacaaaagcatctgaaaacaagatggacatttttgtctccaccaaaatcacaagtgtaatctatctttttttttttttggtaaaaggtgaaagatttataccattttcaagtttgcgacagcatacagagaaaacaaagaagaaagaaaaaccaaaaactatgctctagagacctgctttatgctttagcttctctctgtatgctgtcgcaaaaccaaaagtaaagtttaattagttacagaccttactcaagttaagaaatacctctacataaatcttccagcttcacttacgtcgagaccggagcacgatcgactgctcaaaataaattcgtcgaaccaaatcatttaacaggcattgcaggccatgtacaataaattacatacaaaaacaaactgttgggaacttaaaggattactctttgaagcaaaacttgttgttttcttttttttttggtaagacaataatttattcatatgcgttatctgccacgtggctttatttaaaatagactttgttttatgaagttgaattgaagaaaagaggatgcagacagaaattagggttcattcatacatactcaaaaattaatagacgggaatggaactagagttcaagtgttccgatgttggagtatggaaggaggctctgtcttcgtacgattcccgaatcgaatcactgaacaaaccagaactcgtctctctcgaccaattctaccgcatcaaactcccttgtcttcttcacgaccgagaccctaacccttacctcactacttccgagctttctcaactcatgaaatggaagctctctcgtggaaaatggcggtacttgatctctctgtctctacaatcttatatttttgcctaattcctcaattctactttacctttttgggtttaatggtaatcttcctttcctcgaaggccgcgtctgctggacttcgtgtcgtctctagacgattcagtggtgaaatctgcttctgagaaagcttttaaatcgcttcctgacatctccaaggctgtgaaagagctcactgtgcttaagggcgttggtgctgccaccgcatccgccgttcttgctgcttacgcccctgacattgcaccatttatgtccgacgaggtacacttctctttcagtcatcagatagtagcaatgaagaatcctgatttttggctctgtttttaatttggtaaactttaatgtggaaggaaaggcaatggaggtggctcttgggaactcaaaggattactctttgaaacaatacttgttgtttgcaactaagctacaagataaagcaaaggttaattacttagtctctctagacaattgtctgtatatatatatattatgtgttctaagttttattacaactaggatgattcttgaaacatgttgattttgtcaaatttttttgttaatttcaaattttcaagtgatctgaaaatccttgaaaatgttgagagcgtatagattgaaatttggactcttgaatcagatatggattgttgttgtaggaattaaagttgaagggagagtgggatgggccttcagatattgaaagagctctatggagttgtactgtgcgtgcaaagtcacagccagagaagagctcttccgggaagaaaagaaaacggtaggtgataatatttctatccagttcaccttccatccatttttaagatcaaccatatgtcagcagctcttctggaagtcatatccgtaattgttcaactgtagtaagtgttctcgaatgttttatcaaaatgctgagtatttagcggaatcatataacttgaagggaaaaaatggatactttacattttcagatatcttccaaattaacattgaaggtgggaatcgaatcctatatttaagggaggacgatgattctattttgacttgttcaaaagactgattcaataggttatgagggtagagttatagggggagaaaaacaaaacagaggatatgttgtgtcccatttaactaaactgattttggcatgtattatagctgataggttgttacttgttacagaatttggccacttatccatcccttgaacatgattgatctttcctctgccgaccctataaatcaaacccacaaaaaattaacagactccaagtacaaagccttttttctccccatttatgtaatgcatggcaataagtgatgttttctgataaatagtcttagcacctaaaatgtatttcagatgatacatcaaaccaaacactttcggtttcaacattaacaagatcacttgaggagtaagttttgtgtgtttaaagaagttggccacttatccacctcttgaacaagattgaattctcatctggtttatagtctaacgtgtgcccgccaccctacaaatcaaaccaacaaaccgatttaacaatgtgatgtaaaaaagctttgcatttttgtcaatagaaaatgtggatataggagtcactttcacagtagcaaatgtcatcttattagcgtaagtcgtagtgtatctgcaaatgaaaaaatgttggataagcagcttatacaaatgaagaaaagaaaccaacaaccaaaagaaaaaatggtatatatacccagcgacttgatcaagtatcatccatggcctccatttgtcaataatggaatagttgagagatcttatccagtcttgagttccaacgtaaggtgttagcatgtcgtgatcaccactattcaccaaacacaccaataccagaaaaaaattacagacaactaataaaaacacaagccttatagttaaatttgtgtattgacctgaagataagagatcgatagccttggatgctgttcttcttatggtatggtatgctgcttttaatgtctttattgttttgcaaagtccatttacatcgttcccatctacctgtagtaccctgcaataaaaagtcctcatatatagagtttgatcatcagactttatcaatgatcttatgataaacttgtcaaatacctccacaactttaagtgctctgcgtacgctctcgttattagcccagtaatcggatagcatagaccgatacgactgcgaaagcaactttgtaaatattcttctcttgtggtttagtttagtggctagtgcaaaatctaccaagatgcttacatggcaatcaggagatgtaaggtcacattttggtacgaggataagattttcatatattccagaaacacactgtatttatcccacaaattctaagttagtgaatagtgattataactttttaccattgtaccaactaaattttcagattgtttacgttgtcatagtcttttatgagttccaagcattctgtgttaagaggatctacaaaaatatagtttcctccacaagttctcttcatcgactacaaaaataagagtttgttaacaataattcattgtggtgacaagagagcaaaagcatcctagattttgtaatgatacctcatagagttcattagagataagtgccattccatgagcaaattgaatacgagaatttctatcaagatcatagtctgttaccggacttccgagcacatagccctgtttttgatggtgccaaataactcttcaattcttagtgctccataaggtataatatagaaataattaatggcaagtacacttgaacctgaagccttatttgaggtttgccgtaaatacaatttcctgtgataaattggtgaaatagagggtcaacaaactgatgtcaaagaaaagggcttgcataggaactgacgtgataaacacttaccatttgagatttcttgaacgatgaccggaaccatcttaccggaataagaatttccaccggcatagaaagggttggagaaatactcaggatgcttggttagccactgcacaacaaaccaaacaaaaactctaaagtgcatagatagtaaagaaagatgccttagtggacaatttgagttttcccattactttacgaagaaactcatcgacccgcttagctgatcctgtgtcacttggtatatcagcaagtggatttcttgagtaggagaagccagtcccaacaggttgatctaaatagattatattcgcaacctgaaaagaagcaatgattcttaaacttgaagctgaaacattaagatttatttcattgagtttgttatcatgaattaaatttctctaacctttgtccatgaatatgtagtagagaccaacgtggggatacttccattgtacgcctcaaccttgaaaccaagtggccctgattgtttttatttcagttcaaacaagtcacttaatattctgcagaggaatattaagaatgagtaaaagaagatttaccgttctcatatataagaccagtgaaagaagagcaaccaggtcctccacttagccagagaagaagagggtctgtttttggattgctctcagatttgatgaagtagtagaacatttgatcttcatcttcctcaccaacaccaatgtaccttaatgatttaactccaaaacttagagaacacagagtcatacatcataaggctaatatgaagaggaacaaacccggtttcgagctcgaagggaagagggccttcaaaaccaggaagatatttgatgatagaacttgaatcagcatgcttagtcaacagaagcacaagttgcagcagcagcaacttgggtatccatgaacccattctttttcttgtcttaagtttttgagtttaaagacaaaacatctttatcttggaaaacagagacgttgacccaaacaaacatcttttagtctttgtttagttgttccgtctgcaactggttaaagaaaataaaactaggtttttgaaatgaaaatttgagcacgtgatcatgcacgtggaagggacaaagtcgcgcgtaaagtgttttgcagtttgcacgtgggacagacgaattaattttcaacttatttaaactattattgttaaggttagcatctctgtataagttttaagtgagaataatacttctgtataagtcttaaggtagacataaaagggtgccttcttttgatcaaagtactagagaaaacagtagttacgtagacattaacttttctttggtctataatgttgtcttatgataaacagtgtaacattgacttcagatgggaaaactatatatatcaaaccaaacacttttggcttcaacatcaataagatcaccccaagtgtgtttaaagaggttgaccacttatccacctcttgaacaagattgaattctcttctggtttatattccaacgtatgcccacctccctataataaccaaacccacaaaccaattacaactgatgtaaaacagctttcaatttttatattgacaaaaaaaattaaaatgtggataaaagaacatactttcacagtggcaagtgtcatcttattggcataagtcttggtgtatctgcaaataacaaaagtttgatttcatcggatgagcagcttatatatgcaaatggaaacaataacaaaaagagaagatgaaaaagaaatggttatatatatacccggctacttgatcgagtatcatccatggcctccatttttcagtaatggaatagttgagagatcttatccatgcttgagttccaaggaaagggattgtcatatcgtgatcaccgctactcaacagaaagaccatgccagaaaaaaaaaagcttacaaaaaaactaattaatgaaagcacaagcttgtaaatcagtttaattttgtgtacctaatgactagagatcgatagcctttgatgctgttattcatatggtacggtatgctgcttttaatgtcttgattgctacgcacgcttagatcacatcgttcccatttccctttactcccctgagatcaaaatattcttagagtttgataaacagattttaccaacgatctaatcataaacttgtcatatacctccacaactttgagtgctctgcggacaatctcgttatttgcccaatatatagatagcaaataccgatacgtctgcaaaaagcaaccttgtcaatattcttctataacggttagttaagtggtttgccattgatcgaaagataaacagagatacaagttggagtcccttacataacaatcaggggatgtagtctcacattttggttttagaatgagttcttgatatattccagaaacacactgtaaaaataaccacaaatttaagtgagttattttctttcttttttatcattcacgccaactaaattgcagattgtgtgtaaaccttgtgataatctttgatgagtttcaagcattctgtgttaagaggatctacaatactatagcttcctccacagcttctcttcaacgactacaaagtaagatatttgaactggtttgtcaactactttgttgtgctgaaaggagacaaaatatatatcctaagttatgtaactgtacctcaaagagttcatcagagatgagtgctactccatgagcaaatggaatgcgagagtctttatcatgatcatagtatgctaccgggtttccgatcacatagccctgtttttggtggttcaaacaaatagctctttaattataatgttcaatattggaaataatgtaagaagcaagcatatagtaatgaacctgaagatttatttgaggtttgcagcatatataatttcctgtgatgtaataaatgatcaagaaactagattcaaagaaaagggcttgcatatatagggattgaagtggtaaaacttaccatttgagatttcttgaacgatagccggaatcaccttaccggaataagaatttccggtgacatagaaaggattggagaaataatcaggatgcttagctagccactgcacaacaaattaccaacaaataacgaaatctccaaaagtcaatgcataattaaagatagatgctttgagtttgatactttgatctttaccttacgaacaaactcgttgaccagcttagctgatcctgtgtcacttggtctatcagcaaatggatttcttgagtaggagaagcctgccccaacaggttgatctaaatagattatattcgcaacctgaaaaggagcaatgattcttaaacttgaagatgaaacattaagatttcattgagtttgttatcatgaataaaatttctctaacctttgtccatgaatatgtagtagagaccaacgtggggatacttccattgtacgcctcaaccttgaaaccaagaggccctaattttttttatttcaattcaaacaagtcacttaatattctgcagacgaaaatcagaaagtgttaaagaagattcattaccgttctcataaacaagaccagtgaaagaagagcaaccaggtcctccacttagccagacaagaagaggatcttcttctggattgctctcagatttaatgaagtagtagaacatttgatcttcatcttcatcaccaacaccaatgtacctgaatgatttaactccaaaacttagagaacacagagtcatacatcataaggctaatatgaagaggaacaaacccggtttcgagctcgaagggaagagggccttcaaaaccaggaagatatttgatgatagaacttgaatcagcatgcttagtcaacagaagcacaagttgcagcagcagcaacttcggtatccatgaacccattctgttttttcttaagtttttgagttttatgaaaaaacatcttttatcttcaaaaatcaaaacagagacgttgacacaaacaaaaatcttttagtctttgtttagtttaatatctgttagtctttgtttaatttgacatcttttagtctttgtctaatttgttccgtctgcaactggttaaaggatagaaaactaggtttttgaacgtggaagggacaaattcgcgtgtaaagtgctttgaagtttgcacatgggacaaagccggacaaagacaaatcaatttttgaacttcattaaacatttataattgttaaggttattgacatctctgtataagttttaagtgatcataatatactttttagcaggtaggagttaaaaggtgcattcttttgatcaaagtgctagaaaaaacccacgagtagttacgtagacaaaaaattgtttttttatatattttcttctagattataatgcaacattgacttcagatgggaatactatatcaaaccaaacactttgggcttcaacatcaataagatcactccaagtgtgtttaaagaggttgaccacttatccacctcttgaacaagactgagttctcctctggtttatattccaatgtgtgcccacctccctataataaaccaaacccacaaaccaattaataaactggtgtaaacaagctttgcatttttgtttgacatataaatgtggataaaagaacatactttcacagtggcaagtgtcatcttattggcataagtcttggtgtatctgcaaataacaaaagtttgatttcgtcggatgagaagcttatatacaacaaaaaaagaagatgtaaaagaaatggttatatatatatacccggcgacttggtcgagtatcatccaaggtctccatttttcagtaatggaatagttgagagatcttatccatgcttgagttccaaggaaagggattgtcatatcgtgatcaccgctattcaacagaaacaccataccagaaaaaaaagcttacaaaaaaacaaatcaatgaaagcaaaaagcttgtaaagaagtttattattgtgtacctaatgactagagatcgatatcctctgatgctgttattgatatggaatggtatgctgcttttgatgtcttggttgctaagcactctataatcgcatcgttcccatgtccctttactcccctgagatcaaaatcttcttagagtttgatcaacagatattttaccaatgatcttatcaaaaacttgtcatataccttcacaactttgagtgctctgcggacagtctcgttatcagcccaatattcagatagcaaataccgatacgtctgcaaaaagcaaccatgtcaatattcttctctaatggttagttaagtggtttgccattgatcgaaatataaacagagagatacaacatacaagttggaatcacttacataacaatcaggagatgtgtgctcgcattttgattttagaataagttcttcatatattccagaaacacactgtaaataaatataaccacaaattctaagttagttattttctttttttatatcattcacgccgactaaattgcagattgtgtgtaaaccttgtcataatcttcgatgagtttcaagcattctgtgttaagaggatctacaacactgtagcttcctccacaacttgccttcaacgactacaaagtaaaaagagatttgaactggtttttcaactactttgttgtggtgacaggagacaaactatacaatatatcctaagtcatatatgtaattgtacctcaaagagttcatcagagatgagtgctactccatgagcaaatggaatgcgaaagtctttatcatgatcatagtatgctaccgggtttccgatcacatagccctgttttttggtggtgtgcaaacaaatagctctttaattataatgttcaatattggaaataatgtaagaagcaagcatatatatagtaatgaacctgaagatttatttgaggtttgcagcatatatagtttcctgtggtaaaataaatgatcaagaaactagaatcaaagtaaagggcttgcatatataggggttgaagtgataaaaacttaccatttgagatttcttgaacgatggccggaatcaccttaccggaataagaatttccagtgacatagaaaggattggagaaatactcaggatgcttagctagccactgcacaacaaatcaccaacaataataacgaaatctccaaaagtcaatgcagaaagacagatgctttgagttttggcctttaccttacgaacaaactcgttgacccgcttaactgatcctgtgtcacttggtatatcagcaaatggatttcttgagtaggagaagccagtcccaacaggctgatccaaatatattatgttcgccacctgagaagaaccaatggtcttaaaacttgaagatgaagaagagtttcattagttgggtttgtaatcaggagtacaaaactggtgttttaccttagtccatgaatatgtggtagaaaccaacgtcggtacacttccattgtaagtctcaaccttgaaagcaagtggccctgatttttgtttttcaattcaaacaagttactgaatagtatgcagagacgacaaatgagaaagagttaagagatttttattttaccattctcataaacaagaccagagaaagaagagcagccaggtcctccagttaaccagacaagaagagggtcttcttctggattgttctcagatttgatgaagtagtagaacagttgatcttcctctttttgaccaacaccaatataccttcattatgtaactctaaaactcagaacacagcgtcatacatacattataggggtaatatggaaatgaaaatgcagaggaaaagaacccggtttcgagctcgaatggaagagggccttcaaaaccaggaagatatctgatgatagaacttgaatcagcatgttgaatcaacacaagcacacattgcagcagcagcagcaacttgaatatccaggaagccattcttgttttagtttttgagttttaacattttttatatatactcaaaactcaaaagcagaggcgttgacccaaaacaaagatggaatcttttcggttgagtatggttctataaaccggtcaattgcaatatctatacccgagacaattcgggttagtctctctaaccagttccaattaatctgtttagttttcctttggatgtaaaggtgtttagagtttgttttctccttcaattaccaactgccaactggttaacgaattgaaattgagggtttgagctgaaaacacttgggcacttgacgtgagaatgtacgtggaaggccagaagggacaaagtcccatgtaaaatgctttgcaggttattttattgcacatgacataggacaaattattgtttaatgatttcagcattgcctagaaaaccggaccggttgacagtttgaaccggttcaataaatttgtatggggtaatatttgtaaagctaagactatagagttcgttaggggtaacaagaatagtatggggggttagtttgcaaattcccgttaaatttgtcgatgtttctttttgggatggtgggtttgtagacaaatcgacgtctcagagattgtaattacggatcgtgtctctgctgcttcttcttctttcaatccgatttcggacaaccttttactcagacaggagatttcagtttttttcaggtgagcttcttgctttctgcaactcaagctcttttgttttttgggttttgtttctttcctttttcttttctttttcttttgtttgaagtttcctccttctttgttttactttagtcattggaaagcttactttttctcactttgtgatttgcctttggaaattaagacttagttgactttcagaagcttataaagtttcaagttttttttgttcatttgatgacgttttcagcaaccaaattccatcgaattatcttgatgaatccttatggatttcaaatgttagtatgctttgaatttcatgtgtctgttgaattctgttaagagtcatagattttgaatccttggtgatgagttattggtttgagtgatcagctgctataagcttagttctcgcttgtgttataagcttagttctcgcttgtgttagattttgaatccgctgttttgtttcagtccatgttagtacttgaaccgttgtcttgcagtgtgacttaagctggtttccgtgagccaataacttgatacttgtgagtgtgcccaaattccaaactgatgcagttctctctctctgctatctgttaatttctttcataatcatcttttctctttcctcttggcagcttttcctccctctagtgtgaaactctgcaccagaggtgaaaggttatcattgcaaaagggagcacaagtggatagtgtttgctcaagtattagtacagaaactagtatggctgataccagttcaaggactgatgtctcaactgatggtgacacagatcatagagatctgggggttagctcgtaatctggctctaatcattttatagttttattatctctacaatgtcactcctgggaggcttgtaccggaatcccttggtaaaacttggggcattctaccggtatagccaaatccacaggactagtcatttgcttatgttcatcaaacatgcatagtttgaatgaaacagtaattcctgatgttgattacatgcagtctgatagagggcatatgcatgctgctgcctctgattccagtgatcgatcaaaggataagttggatcaaaaggtgatagattcatctctgtggatcaactagcatctgtgtatattacgcatatgcataatctgttttgtttccttttcgttttgatccatagacccttcgtaggcttgctcaaaatcgtgaggcagcaagaaaaagcagattgaggaagaaggtatgtatattttgcttttgttcttgttttgatttttcttatatattcctcttatttccttgtaatatctctagaagaatatctatctgtcattaccttaagcatgttattgtttcctccataggcgtatgttcagcagctggagaatagtcgattaaagctgactcaacttgagcaggagctgcaaagagcaagacagcaggtttattaactttcttatttgttttgattctgatatgtatgtctttataaagaagataaaaggctgaagctacttcaacttataactaacagtcagttacgagttagtactagtcttgggttagctgaagtagaggaggtaacagaattatgggtcatccatagtttagttgggtaaaagtagctggtaactctctcgaaataggtccttctggtctgtttattcggatgttgatggcatacagagaatttctattctggttcttatcagattctttgtcatgactcatgacagtgtatttgtcacttaaggatatatatttttcaattttagggagttttcatctcaagttcaggagaccaagctcattctactggtggcaatggtgggttgtttcttctctgttagttttgagattgatccttttgatttgaaatttctatgtgagataagtgcatatatacatatatgttgatgaattggtgatagcataagtcatctcatggcaatatgcttacacttgttagagttaatggtttcaagagtcagtgatgatctggatgggaaattaaagtcatggtgatgtcaaaactgaagtttcttatagtttgcgctggtgttagcttaggtctgcaagggtttgttcttgatctagtatacttgcctttctgcaggggctttggcatttgatgcagaacactcacgatggcttgaagaaaagaacaggcaaatgaacgagctgagatctgccctgaatgctcatgcaggtgatactgagctccggataattgtggatggagtgatggctcactatgaggagcttttcaggattaagagcaatgcagctaagaatgatgtcttccacttgttatctggaatgtggaaaacaccagctgagcgatgtttcttgtggcttggcgggttccgctcatccgaacttctcaaggtaagctctttccaagtccatagagagattttgatgaacagccaacttaatgagtcgcagtgttttcacaacagcttcttgcgaatcagctagagcccatgacagaacgacaggtaatgggcatcaatagcttgcagcagacgtcgcagcaggcagaagatgctttatctcaagggatggagagtttacagcaatccctagctgatactttatccagtggaactcttggttccagttcatcggataatgtcgcgagctacatgggtcagatggccatggcaatggggcagttaggcaccctcgaaggattcatacgccaggtactttagaaatgtggatgttatcgagatataccatatcttttcatcgtcacaaagagataaatattttattttatatatgaatccgtctgttatggagttcatagggcatttcttggtggcaggctgataacttgaggctgcaaacactacaacagatgcttcgagtattaacaacacgtcagtcagctcgtgctcttcttgctatacacgattattcatctcgattacgtgctcttagttccttgtggcttgcccggccaagagagtgaaacagaagaatagtgctctactcagcagtcagccctatacataatcttatgactcagatcggcagggatactccttccaagagatcgatcacaaagcaaggcattctcagattcttaccaaaagcaatattttgggaaagaagactgcaggttttgaaattggtttcctgaggtccgcaagactcgagtgttgtgtgtgttgtaatttttagccatcaggttgcatagttttatagagtgaatgtttataggtctttgaatattcaaagcggataggtgatcagtgtaaggtcgcaattaccaacatgacagaagatgggatcctttcaggaacttggattgtatgatcataaactccagcagaccaaatcaatttatattgagagttcaaaaaagagagcagattgtgtatcttgaaatcatagcaagattgcccagtaaacactgtcacacataaagcttacagaggtttggctaatactatgtataaccaacctgagtcagagaaaatactcatacaaatgaaaagatctaattatttccaggaagaagacttcttccaaatgtcgagaatacaatactggcaagacatatgcaaacttgagcaagaactgaagcagcataaacagtacagcttatgtgaaactcgaaaagtaaacatcaccagttcaaaagtagttgctggtgtagaaattcttgagaaaatcagtctttccttgatccttgtttccagtattctgcacgagcccttcacccaccacatattgaccgatgatgtggtgacgctgctttgcgtgatccacaatgtcagtcagctcttccattcctttgaatataagaagatcaattacctgcagaagcaagaccaccatcagattgcattctaaaatcaccttaaaagagaaccaatccgagatcactacacccacactcaaggagatgctttgaattgatggttcaaaatacaaacaactaaccattcaccacataagcaaatcttaactttggtaccaaatgccaacaatgctgtcatactacgagaaagaacaccattttgatatgaagtatataattttgtagcaggtttactgtatcgacgacaacagactcatctatgaaagaaaacaaatgcaaagaagaaaggaacacagctttagcaggatgtaaccggtaaagctcccaccttttcgctccaagtaaatcttcaccaagcacccaattcacaagacacttttttgttcataagataagactaccaagaaattaaaagtctccgctcacataaactacttgcacaaattctacacgatagaaggtgtaagctttcagctttcaacaacactcaaacaaagctgacaataaatccaagccaaaagtggaatagaaagcagatacgatcagattaacaaatataaaacagctcattgtttggtagccaaccaagacgcattagccaaacaaggaaaatgctttcaatttcgccatcgcataggacctgggtccgtattaatcagagttaaattaagggaaagtaccttaggatcggtgatgtgagcgttattccgaatctgagcagagatagcatagcggagctgagaaggagcgacgacatcttgaagattgtaaatgtccatgatggtggggatagatctacaggcagctctaaagaaatcgaaaacacggcggcgagcttccgtcaggttcgccgagttcggaggaacaccgattttcctcaacgcgaatggtgccgccattttgatctacgaaatcgaaaaatttcaccttcctgcctgagattaaaagagaaatgagtagccgaatagagaaacaaacatctgactatctgattgcttccagagttatctgacgacgtcgtttcgaagtgagtggctaatgggctttttatgggcctaagctgatgtagagaatagccgtaattatttccggttagtttcggtttacaaaaaagggtaagaaggtaattgtttttctatcccgccggggtgtctccgctttcttaaacctctctcttaagaacttggcgccgttatctttctcatggcggcgacaatggtgaagcacgagattctcaactacagcgaggatgaagaagaaaattactcagacgaaggagattggggagactggaaagctgatgataatggtatagaaggaggagaggaggaggaggaggatgatggtgacgactcggaatctgattttctgtgtttgttttgtgattctcacttcgtttcctgtgatttactcttcgaacactgtcgtctaagccacggattcgactttcatggagttagaaaggaattgaagctcgatttctactcttcttttaagctcatcaactatattcgctcacaggtttgtgtttttgcttccttcgtttttggtttctctaattttattgtttttgtttaaatttggttcctttaatgaattaggtggctgagaacatgtgtttcagttggaagattgaagctgatgattacaaagatgttaagtttccttgggatgaagagaagtatctgaagcctttttggcaggaggattcacttttgtactcgtttgcagatgatgaggaagatgaagaagtcacgtttgacagagaggaagtgatggaggaattgcagaagcttggggatttaagcattgatgtcgaggctttaggggaaagctcaatgtcgaacagtgataaatgcaatataaatggaagtaaggatgtaacttcgctctcaaactgcaatggcctaaagcaaagttctgcggatgatttgatagtcaatgggaaagatgcagaaccaaaggtttgtgatggaaggctagttaataggaacatcagaaaggtgaatgagaactattttggatcttatagttcgtttggcattcacagggagatgctaagtgataaggtaatgcactaatcttttctggaattgtgtcataattaactaacctgcacttgcaccatatgaagaaagactatcagctgtcaggtttattcaatgtgtctgatgtctgtaacaggttagaacagaagcataccgagatgcacttttgaagaatcctactctcttgaatggctctgttgtaatggatgttggttgtggaactgggatattgaggtgagtttgcagttatctttctcactctatattggccatctcatttaggtttcttctcattctctaaacgaagctttaaacatgtggttctatttgcttcttttatttcatattctgaaggcttccttgaatttctcttgcctatatgcagatcctttgattgtttaagtcaaacttttggtacttcttatttttagtttgcatgcaataaccatttatcctttgtctgcagtctttttgctgctaaagctggggcttcaagggtagttgcagttgaagctagtgagaagatggccaaagttgcaactaaggttacctttttttctacttgttacaagattttcattatttcttttttcctcatagatatcaattatttacctggtttctagcagattgcgaaggataacaaagtattcaatgataacgagcataatggggtacttgaagttgcacactcaatggtagaagagctagataaatcgatacagattcagcctcatagtgttgatgtgttagtcagcgaatggatgggatactgccttttatatgagtcaatgctcagttctgtgctctatgcaagagatcggtggttgaaacctggaggtgcaatcctccctgacacggccactatggtaaagcttatcttttgcccttcaaatgttgtctttttcatgaaatcatcttgatgagttttatcccttgttttctccttggatcagtttgttgcgggatttggaaaaggtgcaacaagtcttcctttctgggaagatgtctatggctttgacatgtcttcaattgggaaggagatacatgacgacactactcgacttcccattgttgacgttatagcggagcgtgatttagtgacacagcctacccttcttcaggtttgaaagatcacacattatttggtttcgccaggaaaaactttgaaattaatttccttgaatttctttgtttctagacatttgacctggctaccatgaaaccggatgaagtagatttcacagcaacggcaacgctggagcccactgagtcagaagcaaaaactaggttgtgccatggtgttgtgttgtggtttgacacaggtttcaccagtaggttctgtaaggaaaacccaaccgtactatccacatcaccctacactcccccaacacactgggctcagacaatcttaacttttcaagaaccaatctcagtggcaccggcctcggttctgtctggtaatgacagaagagaagccatcggaaccgaagagtgtcccgcctcaagcattcatctgcgtgtgagtgttgcacgagcacatgagcatcgcagcatagacatctcgttagaggctactgggctgagctcaaagggtcagaagcgtcactggccggttcagatatttaatctatgaatgtgattgtagccattgtaacactcttttctggcaaatttgctgaggattttttcataagttgcaaggttgttttaaatttaacctattgagaaagttttgagaaatatgctggagtagtaagttattctgaaatcgacataaagtgttgttttgcggcgtaaatttatagagagctaaaaaggtaagacagacaattgttcagacaatttgttggttatagttaattgcttaactgtactgtatatgttccaagttaagtaaatgtcacaaattgtttttttttaaagtggaaaataaatttagtagatgggacaccgaacacagttagaaagagtgaacaagaaaaagacatttattaatgcttattaagactgacttaactaagataaaaaaagaaaaaagaaacaataaagggatccatccgctcatagcctgaggtgatcactataaactagaaagctaaacataaaagcaaactctgcaacataaggatttacagatgctataactgaagagaagttggtgtagcaagtagagagagatatctatgaatctgttggctcggttttaaggggtgcggcaccacctgaggacgatgcatcgcttccattttggttttgattttggttttggaggttaaggctatttgctaccatggaatcgctgaccatccctgcttctgcgtcaaagtttagcgtcctcttgcggttgctgctgctgctgtgacaccagatgaaattggattgggtcagtgattggttttatggaagaagctgatgagagacgtgatttttctacttacttgttcaagcggttgttgatggcagataggtcctttgaagggctctggtaagcatgtgtactctctccaacacaagcatagtaactctttgtactgtgtgaaataagagcatccatctgcaaacacacaacacatggaaggtaaccaaacaatcttgtcacctacctcctcctcaagacttagtcatatcatgataaagagttaagcactatgatcttctttacctttgatccccgaagaggagaaacataaacattgtgcactgcagatacttttttaggggacatgtctggaacacttggaaacacagacacctttggcgatccgggacattgacctgtgaatccaaaataagacgatcatttaacttagggactaaattgatagacaaagcttacatctaacaagtatctggcctttcttaactaccttcaggcttattattggcttccacagcccggtcgtttcttacaggacctagctccaccagcagcggctttacggcaggaataaatatttcattgtagaatgtgatgatgtcaacatgatctggccctattctctgttcaagtcattgtcacaaatttagtcttctccaccgagtaaagaaacttttcagcataaggttaagagtgtatatataccccttgacggcgacattgtaacgcatccacataaacgctgcggaaaactaatggtttacactgtggttgcttccggtagttgtatatgatttccctgaaagtcaggctcatttgggatatctacaaggtgattcatggaaaaagtgtaagtgtaagagaagccattgtaaaccagatgacatatagttaaaccctttgaatcacactactcaccttggccactccgtagaagcaacagagaatgatctggtcaatgtgtcgactgaataaaagagaagtccgctgagcaagtacatgttggaagaaacaatacacactctcccttatttgctgtgaaagttgtagtctttccaccattccattgattcttacagcagccaatttattaatctgggaagagccaccacatttaacacaattcccagccgaaaatgaagaatcaataccgtgttttgtagtacatcatctaaccaaacgattagtagtagatccaaagatctcacagacctacctttgtgaagaaaatattgattccagtttctgcacaagtttctcctccacctcctgggttgggccgtgttgggctgtagacataaatccgaagaggttacttaacaagtacagggacaactagataggtaaactaactctccatttctactcatagttactcaaaatgtacctggcaaatgcagactgcaacggaggtggcagcatcttggatttaacgttgcctaaggccaacagacgatcctttactggtgatgtaaaggaattgcgttcaactagaatgctgcggtaatcagtacataatcttttgggcgatctaatccccccattttgtcctatatggcagcaaatttgacaatttttggtaagaaaatcataccattaacaacaggttggaaaactgctttaattcagaaacaaataaaactacctggacaagtttcatgcttttgtacagatgatgcatgatttgctccgtcagagaaattaataagtgctgcgattgcatccagagatggcattggttcagctagtaaaccgagctgatttatctccaatgcaagcgatggcctggcaacaatcagagaattgtacattgaagagcctttctcccataccatactctctagaagccgttcctccagtgaattcagatgtcgtctcaactctctaggcagagaatcttcatgtcgtatgaaactctcaattaccttgctgagatcaaaggctgtgatcccagtcctctccagaacagctgggaacaacattgtaattgttttgtgggtagccagtaccaattcagctgagcaagcaagcatgcatctatggaacctctcatttgtcaataaagagttcagattatttgcatgcaaaatctgagcttctgctttacacattgcctcaagaactctgtagtataacttacaagcttctaatctgcgctgctctgcccatatgtcatccatcaggtcaacagcttgcaaacttccacctccacattgggcaccaagggaactatttgggaaaatagcttccaatattatgtgtgctcttcgtgtgacgtcatttgttatatccctatcacatgatttaaggaaatgttccaacccaggagaaggttttggcagaagcggggatatgacagtcctgagccacttggcagttgtcattgctgtgctcactggtgttgctgccaacttggtagcaccgctaataccatttgtcttagcagcaggcgacttatgaggagaaagtgggcttataaatgtccttgcaggtgagctcaaagcatcaattttcctcttaacaccagtaatattaacagctcctgcagataagcttccagatccaagtaagctatcctcttcattgatgaataccctctcatcaagttcgcctttaccatcatagtaatccttttcaagtgtaattaagctagttgagatggacgtctcttccagtaaatcctcaaagtaggtcaagccatctgcagtaaaacaccatatagattcgaagaacaatcaggcaactgttcaatgaactcacatgattctttaattgaagaaggaaaatgattttagaccaacctgggtcaatattatctagcttgtcagtttggcactcagatgctggagatggctttttcttcagtatggtttctaccaaattatttgccttgtcaattactatcctcaactcatcttctgaggcgtcatatatcttgcaaagtgatgcaaccaagtctacacctttgtcacctttcttaactgagattcatcacataaatgaaaatagatgataaacattctatggtgccatggttatcgggatagaagaaaagataaacactcaccaaagcgagaagaatcttggatgctgaaatttctaaaccgacaaggaacatgtatgatcaaaatagcctgataacatgaaaaggagttagcctatacttcaattgcgttatattaaacgaagcatctttcaagtaataatgtacagcaagactaaaatgaatgaaagattagggagagctccacaggtagtcactaaccaatatagaaactacgccatttgagcatgtcacgaggtccttaaatcgactaaacgcatggtttcggagtgccaaaaagagtagccatccaaaacgataactatccagcaaataggtagaagagtttgctgagttcttttctgcgtttgcatcatatgtcaaaaagaattcccggaacccacgtttgtagtatctgttaccaaggaaaggtaccaaaaacatcatactttaacatgtccttaaaacaattcacagaatataatcacatgaaaaccagaaatctgtaactctaaatcttaattaatttaaaattgaaggaatattgcaagcccatattctgattattgcataggaagaaaatttgcttctaagttgcaggtccaaaatatgaaatctatgtcaataactattcttacacaaaacaaagataaatgtaaaataggaagggagctaaactcacttgcttagaaggctaagatgcacaaagttagcctgcacctcctttgcctagtaagtaaaaattagttaatagaagcatatttaacaatgatataatagaagtagaagtatatttaaaagatgttagtcaaaacctgaagtctgttctcccagtctgcgccgtaaagttcacccagtacagatccagccttgaccacaaactgaggtaactctttaaaaaaatccacaatactataaacagaaaagaggaaaatcgtcactacaaatgaatttaagaatgacaaggaaggaagaattgaacactacttactttagcttcagagccctcagtatctgacatagattaaactcattatcaccagacactgacagaccatccgcttcttttctcacactaagcctcttcactgaatagagaataaacgcaaaccagaacctctctacttcttcccgctaataagaagaagaaaaaaggatttagtcataatgaaaccacagttaactgataaaagagaagttagaggaaaaatgtatttcaccgttccacttccaatgttagacatgcttgctgacaaaattcgtttggtttctgtaaacaacttcaaagcttcatcgcaagtgctcccatcaagagacagaactttctgcaataagaaatcaactacagggattagagctagtcctcaaaatttccgagagaactcaaatggtatcttcaactaaacaaatgcaactagatcagcaaagagaagagtaaacctcgcatatgtccaagagagaggcttcgcttcttttcccatttggttcaatgggcggggtcactggaggctgaacttcttccatagtctccaacgcagctgaaaacatgcaaaatcaagctaattttacttccaattaaactgctaactgaagacgaagaaaaagggacttttcaagcaaagagatttgttaatttaatcacactgaaattcaataggaaccatgcccaacccattcggaagaacacactaacagacatgagaaaacaaactcccaatttcccaaaacatggcagaaagacaaaatttgggggaaaaaaagaagagaaattggggcataatctaaaacccaccactccggaaaaattttacccagatgttatcttaaatattcattcaaagtttttctcttttttgtttttggagaattctctcaccaacttacaatcgaatagcgaaatatcaatagaaaatttcagataaaccacctagaggataagatttcaaatcaaaggataggcaatagagaaagatcttacctttttgtgtcacagatcccaataccagacgtcgccgattaaagcctgagcagaagatctgatttttaagaagcccgacttctaacgcctcctccaaaaaattcgacaaattcagaggaatcacagagatctccgaaaaccctacaaattttccctcctctcagtgtctctctctatcttcacctgacttccctcttctctctctagaatggggtctgattatgcggcaaaccctaaaaaaggatatatctcgcgcgggaaaaacaacacggagaatacatacacatacgtatacaattatattcgcgcgctttcaaccactattaaatcgacacgtacccatctgtgacccaattttaccgccaaaacttacttactgttgcgtgaaacgctgagagggaaagattcgccgtcacggcggggtcgaaacaaacggagtgggccattaacgccgtctgggttttcgtgaccgcgacaaagcctcgtgtgagttatgattgggcccacccttaatacgatgccgtttctagtttaggtcacgcgggaaattacatatttgccattgtagaacgtttggttgcagaagtatgagtgtcctatccgcggatggattcagattaagtcttcttcgtcatcttcgagtgtgagtggatccagagagagaattagatatttccgacacgaggcaaattcctagtggctcatggcgtcatcatctgatcacacggcgaagataatcgacggcaaggcgattgctcataccatcagatcagagatcgccgaggaagttcgcggtctatctgagaaacacggcaaggtaaacgcatcttatgaatcagtgtcctaatcttgacatgtctctccttataattctccgttcttttataagatgatagcactattgaaaatttactctcttttagctttatggtttaaaatgactagatttaagcagctatgatcacaaccttctattgaaaatgcttaacagggtcaaatgtaagctccattttagttagatcactgttattttgtttcgctggatttttgagctgcctgcattacttcaagtggcatactatcttatttatacagatagtgtgtgctaagcttataatgtttgatatcattgtaataaaatagaaggaacgagagtatgtgtaataaatggtttagtgcgtttgttcagttgcttcagttggacccctttatatagtttcaagaatgtacgagattcaatcgaatctgattttaccttcatgcaggtcccaggactagctgtagttattgttgggagccgaaaggattcacagacctatgtgaatacgaagaggaaagcgtgcgctgaggttgggattaagtcatttgacgtgggcctaccagaggaagtttctgaagctgatcttattagcaaagttcatgaactaaattcaaatccggatgtccatggttagttgtggcggtaaataatacttgattttgtatgtcttctcggttatcattagtctaaactattaaggatagatagaaactttaatgtctatgcaagtctttcgttttggtataaagcaaacattccttgctctcctgtgcttatataagctttggtgtttgatttgcaggcatattagttcaactcccattgccgaaacatattaatgaggagcatatattgggtgcaatcagcattgataaagatgtcgatggcttccatcctttgaatattggtaagctagccatgaaaggcagagaacccctcttccttccttgcaccccaaaggtacttctcctttttttgcatatagacttcagtctctttcaagcgagaaatctcagtgttctgtttttcttctgtatcaactatgaggtgattttctgtgtgtgcagggatgtttggaactcctagctagaagcggcgtaaagataaaggggcaacgagcagttgttgtaggtcggagtaacattgttggtttgcccgtttcacttcttttgctcaaggctgatgctactgtcacaactgtacattctcacaccaaggatcctgaggctatcatacgggaagctgacattgttattgctgcatgcggacaagcccacatggtgattttcatacattttcattgtcatttagaagataatttagtctacctcttgtagatcaatgtgaatagtttacaattcaaatatactatcgttttgacatttcagattaagggcaactggataaagccaggggctgcagtaattgatgttggaactaatgcagtcagcgacccgagcaagaaatcaggataccggttggttggagatgttgatttcgcagaagcttcaaaagttgcaggtttcataactccggtccctggtggtgtaggcccaatgacagtggcaatgcttctcaggaacaccgtagacggtgccaagcgtgtctttggcgagtaaaacaatctactgtatgtaataaagaaaccaagagtttctccattctgtaattgtgtacttggcttgacgatatttttccactcaaataaattgaaattggcgttccctttggattaccttacattgttctgcaactagctagaacgattatttccgcaattcagttaaatacaagggtgtcatcatgtgactcaaaagcatgtatgttacttgtctgcattgacccaagatcatgtacaatattcattgaaaatcttaagagactatataatcccattacaggaagagtttaacacaacaaagttaaagcatgcccaaggtatggcaaactccaagttccatgggatgctacaagcgacactaaaactatcacgctcttgctctatctgaattagtcaacacttaaacagtagatttcctgtataccacgacaacggcagcagcattcggaatgaacttatcatgctttctgcaataagaaaaagagcatgctttgtaagtaaacaaagtgaacgagaaaaggagaagatagtaactaaacagtgaaatccaaacctgcactgggagatacagcttgaattccggaggaagctcctcttcagagtagagacgatcagcaaaatatatgcgcctaaggcggcagttagcatgaatctgaactcgcaatgtctcagcataattagtcccataagctctcctagtaagatccgctaagttaagctggatttgattccatccctcgtccatcttcagtggcattgtgcaaatatacggctttactctagtgacagcctaggaaaaattgttcaatacaaaacatcaatactagtccctaggattttagcataatacacaaagtgcagcagatctaatgtattgacaacaactgtatttacaagcttatcgaaagattaggagattgataccaactgttgttagtatactaaactaaacattatccagaagctacctactaatctattgtgtgacatcagactaagccattgattagaaattgcttgaagagaataaccaataacctaaaacgcagcatcgacactacagtagataaactagtgaagactgaataagcaaagggaaagacatacatacttgaaagttagaagctcggaaacgccggcgaacattcttgtcatccagaatctgaatctcgaatgagaaatatttcttcatatccttcaccaccaagaccaaaaaaggaagtttgataccaagagtagcggaaagatcagcaggacatgtaatgtatgtagactgaatatttgatccaactacttcaagcacattggattgaatgtcatcatcatggcaacgcttcacatgtccatccacaactattaatcaaaaaacaataaacaggcttaggtaaacactaatttgatcaaattctagagaaattgtagctcagatagaacaagtcaacaattatttgttagacaaagctcacggttttaaattcatacagcttacagaggattttgacaaaaaatcacactaacttagattcaattacttatatctagcaaatatattatagattattttgatcataaagctcaccttctttatcccatatctgaagaggcttacttctgcaaaacaaaaaacctccatgatttaagaacagtagaacacatcaaacgattccaattaattagatattgaaaagaaaaaagtaacaaaataatataccctagactgtacaaaatagacagaaacccagattgaaacgtgttcttgaacatcttcctgctcctccggaattttcctgcttctccgattccgagaagaagaagctcgtagacttgtcgtcgtatgataataaatctatagggctaccaaattcctcgttataaaggcttgggcctcggcccactaataaagccatgagcctttgagttgaatgaagatagataatagatgccattttttccaatataatattgcggttcagctggataaacccaacgtggtattccacccgctaatcacatgccacgtgtcttattctccacaaagagagtgtcacgtgtgcctagatatcagccaagaaagacacgtctcggtgcgcaaatgactagtttatcctctaacagccgcgttatcttcgcactgctcacgaaggtcatattcggaatgacacataaggtagggtcttcaattcagcaacttgcagaagtatttaatttccaatgccgactttggagacaataaaagatatgacagtacacgtgggccaatgagaagagcgctttagatggaggaaagataagagccacaaatctcgtctatgaattctgagccacgaaaacaagatctacctcacgcgccctttatctcacgcgcttccccttacttgtggttctcttacctcctcggaagttgaaacattacaacaaacacattcgtcttcttctctctctctttctctttggtcttttttttgcttactgttgaagaaaatttaaacaaaggcttctcttgatttttgaaccaatcatctttacttcatctgagggtttctgatttgggtctgattcaaaactctctcatccgttcactacaaagtgagtttctttctctttgtgcttgttagatttgaatccatacatttttcgaattgtttctgaaagtagtgagcttgatttgttcattcatcaggttgatagatcgatcgattgattttatggattgttatgctgaagagcttgttgtgcctaattatcaagaatcatcatcagagacatacccatctactggtatgtggggtggatggagcatgagctcccctgaagcagctgagaaatgtttcgattacgatggtttcaatggagaaggaatgatgtatagtcagatgagtatgaggactagtgaagaagaagaagagtctaaaagatcaaaggctttctatggtgcttcttcacttcacgatttcgaaggcatcgaacagatggatgatatgttcttgtacgtctctcaattctaataagtctcttttttacttattaccatttgcataggtttgtgttttccgatgtaattgttgttttcttctgtttgcttttccggttttactgcagaagttcaattttggaggatgttccagaggatgatggagatgttcaccgcgcgaccagtagcaataacagtgtcggttcttcttctatgtatggtggtggtagggaagtccctatgttccattgtcatgacatgtctttcaaggtaagggatttgtctactttacatggtgttaatttagagattcatgattaaatcttaagaacgaccctttttgtttctggtttgaaggaggaagctccatttacaatctcggatctgtctgaagagaacatgttagattcaaactatggggatgaactgtcttctgaagaattcgtgttgcaggatctacaaagggcttcacaaaaggtcagttaccgatgatttagcttgtaaacttgcttcgcatcctagattttgtctgatagaatcttgtctttgctttctagttgactgatgagacacgcaaatgtttccgggatactttttaccgacttgcaaggagctcacaagataaatctgattcagtcagccccaactcggaagagctgcttatgcaaacgtctagatatgattatggtgatggaaacaggtacatatcatatctttatgtctgatctacacttgaaaggaaatcatcttggtgctcataggaacagaatcttcattttcttctggatctttagattcttatgagaagactgatcaaagtgacatctatttgattgcaggtttagtagagaggaagagatagaatctgaaacgaattcaatcgatagagctgtcgcaaacctcacattcaacaaaatggaatccaacataagcaattttcctctgtcggaaagagtacagtagctgccgctgatcaagatcaaccattggcgcctcatcatcttcctatgaagttttctgttaccatatgtgtataaatgtgtgtatatatagttgacttaatgttgcaagcttcagttttgatctgtcaaaagaatctggtcccctttttaattcctgcagtatgctttctacaaacactacctgatggccttgagacttactttcctcaatatgaataagaacatcgtgtttcaatgaacacataaacattgactcaaccataaaccagtaaaacagtcgaaacaatactcattgatagggcttttcagttaacaatcaggaaaattttgagttttgaatgatttgagcaaaaccataaaacaggaagtaggagccaatgaatttttttaacatgagacaaatagatggctcagagcaaaatcctacgcctgtattaaaaagtcaaaagccaatggcattatctgatttttacagcctccacttcatagacaagccacgcactcttaggcaccttttccttcaatcccctttttgagtacctgtgtttatcacatccagagtaagagacacaaagcaggtgtataaactcagttacattatgctgagaagcctgagatgaatcatcaagacacggtcaactgaaaccattatgacatacccgagggctggcggtattatgagtcttctcttatcaccaactcgcattcctgagtattagaaaatgcagccgtatttttaaaaggtaccaaaaatcatgaattttcagttgaaatcctctatgggttaagccactataccttcaacaccaatgctgagaccttctatgacattttctccacctgcaagtagcattataattaatcataaaaagtaaacaaaaagcaaaatgtgtttgaggatgggagaaaaagcaattataatgaggattctacgatatctatgaaatctttacctaagcggaatcttagtggatcttctcccaagtttgaatcaaacaagttcccggtgtctttcaacttcccagtatagagtatactgacctggaaaaaacatcaatcgttcaaagatttccaacctaatggtgctgagaattgagacagcatcaagatagcacgtgtcgaagaagtggataggatgtcaaaaatactcacctttttccctttaacagctgattttccatctaactttcctttttcaatatcttcaatgatcactccatttgataaagtcctcgtttctagtggtttcttagtaccagcttctttctcgatgttcctatacattatggaaaatacaatttatatgagtagtttataaactaaataccaattgaactcaaaatagtatccactcaaacccaaaggaaaaactaaaagagacaattttagcagaagcttatctcaggaaccccatttctagtggtttcttagtatcagcttctttctctatgtacctattcgttatggaaaatacaaaaacctaaataccaataaaactcaaaatagtatccacccaaacccaaaagaataactaaaagagacaactttagttgaagattgtctcaggaaccactagttcatcagaccctttaccttgtatttgcagataattatatttacttctgcaattttttcaaatgaattttctacctaagtagcaatgttaagactcacttgtcgatagcttgtttcttcttctctggacattccgggacatctgtagtttcctctctcctatcccttttcttctttttctttgatagagttgcatcaccattctgagaaagtaatacatcacttgatgatttgatccccctgtcatgtgccagacatgatatgttagttgacgtttaaaaatggacctttaataccagtgagaatttatgtgcatttaacaatgatatcaactttctaatacatggggataaaccatttgtatattaaacgtcaacttctgaagaataagagtaaccttttcactttcaccggataagaactaccctgtaagcacacttgaccaatcatttaacaccggcaactaatttgagtgtataataaataatgtttgatatcgattcacttaaatcataaacgacaacaaaattccattccgtgctttcaaatcatcctagcatcttctactatccggaatatctagcagaaagtattatctattcaatagtatggtaccactcacttgtcagaaactggattctcattctgaagactttcaggcatatttttcccctctccgtcatctgagtcaataattatagctgaactcttagacctttccttgtttctttttttcttcgaaagaatttcacagtctttctggacgggagacagtttagcatcatccaatggtttatcctccctggcatgttaaacataatagatttataaaaggttaaaatttggtctgtagtgggtgaaacttacttacctattatccagagtcttgtgagtattaatttttgcttcaaatgtcttctcacacttggcaggctcaccactttccaaagtcgattttcttgccttcgacctcgtaacccttgaaggcagaggactctctgaagaatggaccttcgcgatcttgggctcattaccattgttaagtacttctacagaatcctcattgctagattcatcagctctagccgaagtttcatcagaatctgaatcagaaacttgaaacttcttccttagtcttctaccttttccattttttttcttctcttttgttttagctgtcatctccttaatagatactggaaaggagtcaagattatcaaaaattggagatacagtatcagaaaagaaacaatgagcacatccccaatctaatttcatgtaagaaaatcgcgagatgcagatcaatacaagaattacataaagaagcgtcgtactaatttctccaccaaaagacactagtacagagaatcatactaaacaaaaactgcggttaactcacaaagtcccatgcaactagagtcaaggaaaaaggatgcagaacaatactccatatagaaactgaaaatcttatgtatttgtaagtgcagaataaatagtcaagcaaagtaatatagtcagactgcaaagtaactcccagtgtattagtgattctaagaatatattaatgattaaagcttatatccacaaagcaaacataacatataactaaaaagtaaagagacaccataaaaacaagaaacgaaatggcttactttcatcatcatcagtactagacacgtgtgaaccacggacagctggatcgtcgtcgttaatgaaactatcactgtagtcataatcatcactgctacctttctccatgtctgtgtcaacaatgtcttctccaaatgactctcttttgattaagtcaaggatacaaaataacaatctaggaaccaataattcatatgcactttaatctaaattcgaatgaggatacgattcatcatcatttggcctaaacccggtactccttccgaggaagtagccagtgaggtgtacactccgaggtccgatgacagagaagataacctcatcagtttcttcaaactccagattcaattggcaagaatcaactttatcaggagtcaagacacataacaagaggggacttttgttcccaacgttacactgtagaatgcttctattggttgcagtaccatggcccaatgttgcctaaagcaaagataaccaagtaactccactatttgctacatatcagtctctctaccctaatacatatctatgtaaaactttcctagcgcgtttaaacacacccaaatcaagagcagacataagaattaatcaaacaagcgtacaaaaacctgaaaagttccactaaattaagattagaagacctgggaaaggtgaagtcttctgattcctgtagcttcattattcttaagagtgaaagttttgcctggcttcacttcaactcctgcaaacaaacaaatcgtgttcatcaacgccaagctccattgaaaaaaattaggtcttttatctcaattggtgattgttcatatttgttttgggttcaaaagaaatcaaacggtgaacccaccccaaaaagccatggaatttggtcaaagaatgaaagataatcgtcaaagaaagagagacgagagacgagagactccaacgccgacccttttgggtttctccgttcagtgctgaggtttttgttgtcgagggttttatttgtttgccgccctgattaatttatttattgtaatgcccaatggggttaaaccttttaagattttttaaaaaatttgacaaacatatttttaggacaaaagaggaggaagaaattaaaaaaaaaaaattaataacgttttaggaaaaattaaggaatgatttccaaatatcaaatatcaaaaaaagattttaaaaatcagaattaaaaaaacttgaaaacgttcctacacttttgagtgagtttgttgtttcttttggtaatgtaaattgtttctgaattatgatatttttggtggacaaaatatataaattgtttaggaaacttatcagaaattagtagaaacctctataaatgttggatctttagtgatactactccaattcttgtaaacaagctcttaatgataatccaaatgacgttacaaaaaaggatcatttgtaccaagaagttatattgaaatggctatgatgtggccaacaagttctggttaacaacttgcattatcaatcacatcttctttcattgttaataggtttagctacatcatctagtcttaagaggatacaccaatctcatctcatcttcacctgactatgaagaaaacagaacaaacatcactctgtatcaaaattttgttgcactctgattgtctttagctaccaattccataaccatccagaatttgcaatcacataacaacagcacactcaaaccaaagtgagattctttaatagtaaaatcttatatccatgatcagatgatcttgaactctgtgagtatacaaatacatacattcttaaaacaaaagcatacacatttcaataacaaaagcaacaattttcacaatctctcaagtctttcttaatccttaggccaaacactaaccttctccttctcaatcttgacaaacatagcagaaacagccgcaacgaaatagatctgaagaaacaccacagaaggcgtgtggtaattcaacacactcttacccgtcgcaagctcaactagaagcaaagccgtgagccctaatcccgcaatccttccattaatcctttcgctgaagggactaaaccctggttccactttcaaaccacctgaaaccgcttcttttaagcttaccggcggcaaatatattcccgtacctttcgacggagacccacttgaccctttcttcgattttctcacttctgctttcttacccgtcccgcttcggtatctgagtctgatgtttgagagacgagactcgaattggtccggatcagtgccggattcggactgtgtagtttccgggtcgggttgagtatcctccgtggactcaacgtcggtagcgtggacggtgaagattcttaaagcattgggctttccggcgggaataaagcggagagatgggaatgggttcgtgattcgcagaggtgttatcgccattttttagagcttcgcgtctcgctctctatcactctccttctgtgtgtccctctttggataagagaattatattttctcttcttttaattcaactttgacatttttgtttataatccattttataagaactatatatagcatacaatttttgtggtgttcattttttctgaattttcatgtttactatataacttccacataattttctcgaggcaaagaaaaagtattaaagtaagatcacaaaatttacagatccctaaaaagaaagcaaaataattatgcaattttccatcatagtaacgactgtatgattttatattataatcttttttaacatactataatctttgtcccattttatacgaggattacgaattagatacagtaaaataaatttgcaatggaaatataatattttattataatctttttttctataaatgaaaacaatttggaatgacatcccaataatatttttattaatttcccattaatgatatcccgataatatagtcagccaaattcgaaatcaggaattttgtgaaccccataattcgttcgatagaggactatttcgataaatagataaagttagaggttaattttgtaaataaatgataaagtcagaaaaggaacataacagatgcgcgaatatgcgaccacatgagatgagtttcacatcttaccaaagtctgtgataatttttccgacagaagtttcatctgagaaaagatggctacatttgcacttcccttctgcgaaattcccgaggatctccagctccgaatcttatccctcctcacaccagcggagatctccagcttcgcctgcacatcgaaacgcttcgcctcgctatgtcaagaagacggcaaaatctggcacgttatgtgcgatcagagatgggggaagaaaactaagatccagaaatgggcaaacggtcaaatcccttatagacacctttacaagactctaaagggattggagaatctaattggcttctggcgtctctgcggcagagcaaatcccgccgcttcatcgccgccgcttgttttcttcgattggggttcttcttttatattgggatctagagttttatccaccggagatgatacttatgaggtaaagaagacaccttttctcttaatggggatttcgccggagggacgatctgagaatttcttggatctcgtcggtggtaatctcagatctgtggatgatgatttgaaagaattagaagcttctaacaatctcgtctcggtggatgtgaatttcatggggaatggtcatatcatggtggaggagaatcgatgttttaccaacaacaatcgtagagaagaccagaggagctcaggggatgagagtgatgatttgatctcatcgcccaatttttcggaaatgtacactcaattggcgaataagacgagtccaggcggtgacaggaggagacagaagaggaaggagaaggagaggcaagcgtcgaggactaagtgggaaccagaacactttctcaaagttgctgattgctcccccacgcctactagacccttacaaggcttatggaaggtctcaattataactccttatcatattgttttcattgataatgtttgagattgagaaaagcctttgtctttaaggtaaagggaatgcaaaatttggtttttttctaagtctagttgattgaatagaccaatctttcattagttatcttcgttgtaatgatgatggttgtgttgttaagtagtttatctccatgattcttgaactcggcagggtttctgtgagggaagcatcgagttgtatttggtcaaatatgatgaagttggaggcattatatgcagaaaagtagaggacttgtccctctcacggtacactcctcctgtgttctggacacccaaacatacgttcatcagatctcctttttcagctgaagaagagctgctactgaatagtcgaatccatattagccctttcgctgaagttcatgaaaatgttgtatctggaatgttgtacatgaagtctagctgcgatctggtgttgccaggagaacctggcaatggcattggttttcttagaggtgaagggcgggtctggttgtatgacaatgggactttcggtttcgggtttcttcgagatcaatttatcattgatctgaaacgtgttgctctggaagatgggtgtctagctgacgaggtagaagcttgtatgtgatttgctctttggttgtgatttttaaattctgatggtgatagatgatcacctctttctgtacataaaagagtttggtgactttagaagtttgaactttcaagtttagtctcattttagtggacgtaaactaggatgatggaatatcaccttgtatttttacttgtttatgtagatatggttctaaataagagatttgtagaggttcatgtatcaattgttgaaaaagaataataaacttgcatacacttgccactttgccagtataatgttaatgatgcggtttgtacagcaaagcttttccagcagcatttcccgtgtagctatgaagctgctcccggagatgaatttcaagcagtgaggctaatgcattgtgctgtttggtggtggccagtttgagaatatagtacatggccaagctttgccctgtttttgttcatagtatagactatatctagaatatgagcatcatggttgaacttcatgagattgtccactgtctttgttggctttcactgcctctgttttacgatccctctttccgtttgcaaactgcaacgagagtgacactcatggtgcattcatcgacacctttttgtataaacatttcgttgttctcagattccagaggtaaacctactacctgctaagcatcatcactggattcagaacttgactaaactgttgacagatcttttgatgttgaggacacaagtaaacataacccgttgttgcccacaaaagctatggtgttagagtctctaccttccaaagggccaatttttgtctccaaagtaaagagagtcgattcagtaatatagataaagttggaggttggttttgtaaataaaagaaaacaaaaaagtaagaaaaggagtacaaatattttagtcatgccattgaccacacgaagagaagagtctcctttttctctatatctaaccttcttcttctcactttcccatttctctttcccaaattacatctcaaatacacaatccagcaacacctttctctctctaacagcttcgagcttctacactcatggctgcttcatcctatgtagacggtaacccaatcattctaattttactttacttgtacttgtacacatctctcaacttttttagtcttgttccatacgatctataaacttttgatccgattttggttagttttcgttaggcagaaatatataaaatattctcttagctgattaattgttttgcatgattgtcggagagaatcttcagacatgtgatcttcatggtccctcgtcttgtctgtgaaataccgaaccacccatatgtttcacatgaattttgtattattataattatatccaaattgatataaacttgattgaaggaataattgaattcatgtttggagtctcccaaaattcagatagagatgtgtgtttgtttatattctagatctgtgtggtagttgaatcctgaggtttttgttctctgctgaaatttttcaggagaaagagatatggagaaaggaggaatgatattactacagtcaagtgagaatcaaaatcctatgatagatccttcaccaacaccttcaccatctgcaactgctactgccccagctttggttttgtctaattcaggcaagagaatggatcaagctggcaagaaaaagtatgttaagcaagtcacgggtcgccacaacgacaccgagcttcacttagcggcccaacgaggtgatttggctgctgtgcagcagattctcaaggatattaactctcagatggaagggattctgagtggggaagagtttgatgctgaagttgcggagattcgagcatcgattgtgaatgaggtgaatgagttaggggagacggcgctcttcactgctgcggataaaggacatcttgatgttgtcaaagagctgttgaagtattcgagtagagagagtattgctaagaagaatcgttctggatatgatccacttcatattgctgccatacagggtcatcatggtaatgctccttaactcgtcgataggcttttgatcaaatgaactacagtatgtgaataagaatgtttttttctttctggcagctattgttgaggtcttgctagatcatgatgcgacgcttagccagacatttggcccatcgaatgcaactccgcttgtgtctgcagctatgagaggccatacagaagttgtgaaccagctcttatccaaagctgggaatttgctagaaatttctcggtctaacaataaaaatgccttgcatctagctgcaaggcaaggacatgtggaggtcataaaagctcttctctccaaggatcctcagctagcgagacggattgacaagaaaggacaaactgcacttcacatggctgttaaaggccagagttctgaagtagtgaaattgcttcttgatgcagatcctgctattgttatgcaaccggacaagtcttgtaacacagcgttacatgttgccaccaggaaaaaacgagcagaggtatgcatcaccctgatagtgtggttcattttgagatttttgattgggtcttcacattttggcatatacttgcagattgtagaactattgttgtcactgcctgataccaacgccaatactttaacccgcgatcacaagacagcgcttgacatagcagaaggacttcccctctcagaagaatcttcatacataaaagagtgtcttgctcgtagcggggctcttagggcgaatgagctgaaccagccaagggacgagctgagaagcactgtcacccaaatcaagaacgatgtacacatccagctggaacagacgaaaaggacgaacaaaaacgtgcacaacatttcaaaagaactcaggaaactccacagagaagggatcaacaatgcaaccaattctgtaactgttgtggctgtattgtttgcaactgtagcttttgctgctatattcacagtgccgggaggagacaacaatgacgggtctgcagtggtggtgggccgagcatcattcaagatcttcttcatcttcaacgcactcgcgttgtttacgtctctggcggttgtggttgtccagatcacattggtgagaggagagacaaaagctgagaagagggtagtggaagtgatcaacaaactcatgtggttggcatcgatgtgtacatctgtggcatttttggcatcttcatacatagtggttgggcgtaagaacgagtgggcggctgagctggtgaccgtggttgggggtgtgataatggctggtgttcttggaaccatgacttattacgtggtaaaatcgaagaggacaaggtcgatgaggaagaaggtgaagagtgctcgcaggagtggttccaactcgtggcatcattcagatttctctaactcggaagttgatcctattttcgcaatctaagatgcgtaaaagaatcgtgtatatatattgttgtatttggtgaagagagctagactatttagtgtataaagccccctgaccatcaaaaggcaaacactattgtcaaccattaaaggtttacactgctcaactcatctgtaaaacagttaacaattgtcttcttcggaaagcaaagaaaagcaaaggttcctttgttaggaaatcatttgtagtattcatgttcaatcacttcagttgcacagctctgaggttcttccaagcacaaataatctcttgggctgtatactgattctgaaccaagattttggagttgtggaaatctaaggaaacaccagacgcaaccatgatagtatttaacttagattgagagaggtgaatagtcactgagaagagtagataacagcgttcgatttctctcccatacgatccaaaaaccacaagaataaagtgaggcttgctatttttgggttcaaaagggatatcaatactaagtataagccatggaagtaaactccttacaccagcaactgtagatgttaagattgtgatgtacaaaaccaaaattggtagccaactgtttcaggcaagagtgtagtccaaatacatcatagaacaacacatttggatttagaatttcttacctgaaacttgttggatgatgcagtaacagtcattaaggtgtcaaagaggattgcaagtccacaacaagtattactaattcaccaattctcttctagcaaacaacagaagaagataagccaagctcaatacactacaacaaaatccagtaacactggttccgaaatcgaagctcaaaatcaaagagtaaatccataatagcaatttctaagagaattccaacaaattatttttgataggacactatatgtttaatccggaagcacaaacacaaaaggagacataaattgaagcgtttttagagcaagaaattggaaaattccttccttctatgcaacaactgtctcattttccgacgccgccggtggggcctgcaacgcattgacgagatctaacgccggccaatgcaaagaaccaagcatcataccataaacatcagcgcgagaaggcatcgtctcaataaccttgtaatcctgaggagcatacaatttctcctcaaaaacagcaccgcctaaattgttatcgtagagcttcttctctttctgaaaattgatgaaagtcttcaaagcagcaggtatatcttcagattgaacgaatagccaagcgttcatacccttcatacatggcttcagagactcccatttggttccttccaaggctttgtagactaaagtgttcttggcgacgaggagcttcgtgtttgtgttttcacggaggattccacggagctcttgtagttgcttcacgctgagaccgttgtagttgattccggtgatgaaatggcagttttctaggttgatcttcgtcttccctgctacgagcagagctcttctcaggctagccatcgatctatacagaggctaactcaaatggcacgatttcgatccccaacgaagaaactgtgagctcgagcgagattcaaaatgagaaatgctagggttcttacctcagacttaagagaatcggagaggtttactttgggctattttgagttgggctaaggaaatgacaaaactatattatttttagaaattctaatttttttatgatttatagatttttgtatttgtccaaataaattttggtatttttgtcctaaagcatcgttcattgatctagagacagctaaagctaatcaaataagaaactccacaattaatagcaactggaggaatcacaaatagttgtatcgaatttgataatttctaagccaatcttcacctttctcgtcgtaatccatcttagtaaaggcattccccaagaagttcaaattagcagcaaatgcagatgctcctcgccatgcatccagcactggatccatagctctaaccacgttaatgggtgatccgcaaggtcttatcatcctaatcccacattccaaccgctcgttcatccctggaagaaggctacacccgcccgtcattagtatcgagctcgttagcctctcctctaactctttctcgtcgtgcggtagccttctgattgatgtgccagccatctcgtctaagcctacttggtcaataccaataaggtttggatggaacaggatctctgggcaacggaatctttctataccaatcactatcttgtagtcttcctctgttaatgggcgtacgcgtggcacctcccctgatgtctgactcaattctccttctactttctgcacaaatgttggatcaatttcctgaagtctagatgataaacgagccaactctgcctcgtctgaatcaggttgttcgtcatcatcgtcattatccttgctcataagtttgtagagctgccaatcttcatctctagaaccaaacgtatcctcgcctttccctctatcaaaggctgctgtcgtcagcagacgcattctctccctctgtgcagcactgagtcgctcgcctcgcccaatacctccagacttgttattcccgttactggacccgtttgttttcagacgcttcttctgctcaactctctccaacacttccttgtactgagcttgcaactcctctaagtaagactctgggttctcactacaaccagaaaacagacaaaaacaaaggattaatatttgctccctttttccctttctaacattgacttatgaattggcatacataccgacgtctttcctcctctaattgatttcttttctctttttcgagttcctcctcattacgcttttgtctagctcgtagccggccctctgctgttgttttaagaaacatttgcctcttcttgtccttaagctgcaagcagcaaatgaaaaaagtcatgaaaattaagccagactctcaaatgagtaaaggatttctcatcattctggaaacaaacctgctcaggagtaagaatatcatcggggacattcataagtggatacttttcattattaagagaatcagggttttcttcatactcagctggttcattcttcggctcaccccttgcttttctaagcgactgtgtcactttcgtaatagtagactctagctcttgcctggacgcgtaaccggtgtctgacaaaaaggttggaatatcatcctcttcaacctggtcaacttgcttcaaaaggaaacgcaagctaatcagttgattctccatgtcattaatcttggacactctctttgcttcagccatttctcgcagcctttgaccttgtttttctcttatagctgccttccttgcaatctcttcttctgatggaggaacttcggtgggaggaggtatccatggaagctgccaataacttgttttctcttcagcttcttttcttccttcctggtcaataacgatcacatgaatttagtttactaccgtcccaaactgcctaaaaaaggaaatgagagaatgagtaaatcaacttacctggaataaccgaatttccgaagcatagtcaggtgcgatataacagtgttccaatttcaaatcttcggccttctcccatgtaaacctagaccttttgagacattgaacatggcaagaaaaacatatcaaatcttgaaatgtgagtaatcacattgagaagatagatccagaggaagactcacgaatgaaaagggtacttaagtgacagaagctgctttaaataatcagtgacatgatatccaccaatgttagttcggctggatcctttatatataggttctccgtcgacaaactgataaccaatgaaccatgtaccagatcaataagacatataagaactatcagactaatgactaagtgatatcaggaaaggaattgtttgaagaaagaaagtaaacagggttgacaccagcttgcattcatagtagtcatagatacataccggaatggagtgtgttgtcgtgaatccaggacagagaacaattccatcttttttacaaattccatgtagttgattgtatttgtagctgaaagcagcatcgactccaaatgctgtgacgacatgagagttaatgaattaatgaaaacaataaacaaaaggttccataattacagtatcaaacattcagttcaagaagacgatcaaattcagaaaccaaaaaaataacgcagattcataccaactgcaggcactccataagtctcaaatagcagttctgccattttgctacgagattgaactgggttgcatgcacattcagtgattaggattggatgatcaatctgtactgccatcaaatgacgttaaatgacgagacaaaattctgacaggtagtaagatgaaactcaaaatcaagatgaaaacaaaaaagttctaggacgtacccctgatccattagcacccaaacgatcaaaggcgtagtcaagaatctaaaaagcagaaaaatcaattagacaagtgggttcttcagtgattgcattatttaattagcataaacatcaaagaacttggaatacaaagaaatgatgagagcaagaaattcctggaacagaagaccttacaaatatacaatacaattcgttattgaataaacgggtatagaatccatacatattccatgatctcaaactgataaaccacattgctgtcaaaaggggaacgtggtccagagcgagtgcaatcaaagtacttcatcatggaaggatccaggtcgccaacaatagtaacagtttcacctgtactagagagaagaactaaccattacaacaacattacaaacacacctagaagataatttagaagcagagcaacttttaagcaaaataggataaagcatagttatatatatctagaaatcgtagccaaaacttcaagcaactctgctctagtactttgaaacatatcattggctaaatttgttactctagcagcgaaacaagcaattaagacacatacatagaagcgggaaaatagagaaaaaaataaagacctgtagctttgtggcgtggtctttgcacgatattgcggaaaacaacacgaggctcagtttctcctgcccacctaaaaaaacgcaagagaatttcaaaatttaacacgatttttacgaattggggaagagaattactaaataccaaaaacctcaagtaaaagtgagttagcgataagaaggaaattagggtttatggaataaaagtacccgatacggaagtaggaagcgccattatcgataacaatgggaatcgaagatggatatgtattgtaatcactctgcctacgtatcctcgaaacgaacgccatggctttctcttcctactgcggtgttgatttagtcgccgtcgtcagtcatcgactgattttgtaataagtaaattcggccacctagttctccggtgaaagaaagaagaagacacaaatggagctccgtgacgtggaaaaacattattaggcccaaaaccctctgacttaaaaaagacttgataattgaataaatagtttaatgtcgttgacataaacgtaagccgtcttagctcagtggtagagcgcgtggcttttaaccacgtggccgtgggttcgatccccacagacggcgttttcgtattccgacataggttgtcttttttgctgcttttctttaactgaaatattccgaccaattttttccagctgataagcccaacggacaatgtgtaatattgcgattttatataaaagttttgggccttttgattttccttgcaataattaacactcggtcttctccaacctaacaattattctagggttttagagtttccgcacgaatcacgaatctctctctctttcacacacttcacactttcaatatacactctcattatgactaccgaagagaaagagatcctcgccgccaaattggaagaacagaagatcgatgtaattgattactcttttattctttacctatctatcatctctgtttatttgttgttatttgtcttttagtctggaaatcattagactgaattcagagttttttaatctgttcctgcccagatctttgcttttgttttgttttgtatatgcaaatattggaccttattataagactttagatctgaatttacatgtaattaacctttgtggattctctcattttcccaattagttcaattattgatgatttgttgtagctcgataagcccgaagttgaggacgatgatgataacgaagacgatgactctgatgacgatgataaggatgatgacgaggctgatggtaaaagctttctacatttcattcatcaaattactggaataattagtatagttcctagtatttctgttagcttacatctggggcagatttgttgatgctcacgtgtatgtgtagatatgtagcaatgataattatatggccatagcttgaaaatttagtgaaaatgaatccatcttctttgttttcaaataatctttgcgttgacttgtgttgatagacatgtttgtggaacttaatgttatcatctattttattcttgttgattggtgattggaaaacaggactagatggagaggcaggaggtaagtcaaaacaaagcagaagtgagaagaagagtcgcaaagccatgctcaagcttggcatgaaacccatcactggtgttagccgagtcaccgtcaaaaagagcaagaatgtttgtgttttctctttaatattcagtcaatcttaatttcttttattcacacatcaggctttaatattgatctgttttggggacatttgctttggaacacagatcttgtttgtcatatcaaagcctgatgtgttcaagagtccagcatcagacacatatgtgatctttggagaggcgaagatcgaggatttgagctctcagatccagtcgcaagcagcagagcaattcaaggcaccagatctcagcaatgtgatctcaaagggtgagtcatcgagcgctgcagtggttcaggatgatgaggaggttgacgaggaaggtgttgagccaaaggacattgagttggtgatgactcaagcaggagtgtctaggccaaatgctgtgaaggctctcaaggctgcagatggagatattgtctctgccatcatggagcttaccacctaaaccaaagtcttttctacttagatgtggtttaacctgagttatgtgccagagattgtccaaagaattcggaaatttttggtttcaatgtttttcatgaagtgattttcgatgttgtatcagtataaacctcataagtttttgattttcagtttgattttatattgaatatcaagtccaagtgtttaccattatagacttgtagttataatttgtcaagtatcagtctgtttaatgaaccgaacccaaaggatatggacaccccttcactccaaccaatacgaggtatcaactgaggttaatcgatacatgcagtacaatgtacaaagtgctacaagtggaggttcatagactagaaaagtattcaacaggacctgattctaagagaaattgttataaagccgatgtttattacctaactcctcaaggaaggaggctagggagttgcaaggaaggagctggttttatccaagactacgaaagattcaaaggcacactgatgaagcaaaacaaggcgtaaggatgttgcagttgctgataagaagacttgacaaggtttcatcattgatggtggagctaatgggttcaattcgacaaggttttagtttccttttgcatggtgaataaactaaagcaacatttttttaatggagaagaaagaagagtcatcaaaactgttccaatatccaaaacaaagatactaacattctcaaaccaattgattgattcattagataataatactgtttatcacaaagatccccaacatgtaaaaaagtagtcatagatcacaaaaggagacgattctcaggccctgatccattcaaatatgtatgtgcacaacagtgtacgtgtatatatagtctatagacatttaattcaatcttaaagaggaaccatcatcacacgcatagccacagaaatactcctcaaagatgctaatctcagactatataaaccagcattgtgtgacacagtatcccgcaaacaaaaacactgaatttcattcatgaatgtaacctacctgcgatggctgcaacctgaacctccatttgtgccgccctgactttagaacccgtggctcggtggaagaactgttctctcgacaacaacctcacattcctcaaatactgatcaaagggaacaacaccatcttgaaacgacttatccaaggaataaatagcatcttcaatggctaaatccaaagcagtacactctaacatctgcttagagagtgtgtcaccacattcaaaagcattatccacatccaaatcaactaaattcttggttttgccttggttctctctaacccacgagtctagaatatcagtgttcatggagataatctgtaattgttgttcaagtgtttctttctcctcaaccatctctttcaaccctatattaagctcatcctctcttctcttcagcccagcttgcaagctcagcagctcctctgcttcagcttctctggctctcctcatcgaaaccaaatcgctatgaaccatctccaccatcttattaatcgcatttctcttgaaaacctccgccgcatcatcagattgctgctggtggtgaacatgctgcacttgcaccctacttactcctccgccgtaaggtgatggcgggaacggtctaggcaatgactgatcagccgaaggaggtcgtgacagagacgaatcgtataccgtaggaggagacggtggcggtggctgaggacggcgtcgagaataaagaggcggatcacgagcaaaagcagcgctgagatcggagacgagatctacgagattggagctagggtagacccaattctgaaggtacggaagagaaacgagaccagaaggagtgacatgtgcgtgaggtcgcttgatgatcatatcagcggtgggattcacatagacgcaaggaggatgacgaggatatgactcgaggagccagataatcacaggtatgttataggtgactccatgaaaaggcatcggaatcgtaccatctgcttgaaggaggttgacggagcgaccatcgttgtgcataaacgatgccgttttgggctctaaggaagggtaagaagagattaggttaagtagatgttgccggatcaaccacttgttggactcttcgtaggggactgaagatgggccgcgctgggagagggcagaggagaggaactgctgaacctgctgcggattagacggcgggggaaccatcggagttaaacggtgtcggcgttggaagtccaaattgaagatgacgacgacaactggggaggagattcgatttaagaagaagaagtaatgttattatacgcgtctttattagctatttactcttttacccttcagtgttgttttggatagtgtttaatccggtttactccataaaaatttgtaaggagtggacatgttccaaagtccaaagtttaacacccaaaacataaagcgagtttgtgatcaaagttttattcaccttactcatgtaagtaacgagtgaaaaacaaaacagtttttttctcataactttaacaataagaagattcaaaccacttgacaacaaaaataaacgaaaagattcaaaccacaatttttttctcataacaaaacaaaaagaagattcaagtcacttgtcaacaaaagacagaaaaatccaagtagcaatttattcattttgatacttgttttcaaacttcccagagacgagtccaaacaccaagctgatggcaaacgtaagcatctagtgacgcctgaagaatctgatcaaggtctagatcgtaagcggtccaatcgctcatgcttatctccggatctagcatcactccttgatagcccatacattcctcaacaatctcttcaaacgaagaacgcctcatgctccttccccacgaatcagtcacgtaccgccttatgtccagaagttctccgatctccaactggtggcaacaccgagcaagctttcctgcatcttgaccattccagacaccgacgaacgtggtttctggatctgctaagaaactgcggaggttgttaggtacttggtcacagtaacctaactggatgatgagacatcgattacccacgcataactggagaatatccgctggattatctgagtagtatcttatcggcggaggatcggcgtagtagttattcggtcttggatcggagtaataactaaacggtgtccactggacgccaactccaacgacgagagggtgagaggagaaacggttgttgaagaggacgttgcgaatccaacggctgatgacggaagaatcccacgttacggtgacgatgaactcgtctccaaagaaatcgacggagtactctaggtgagtgttgtaacttgcgacggttcttatcgtcggggaagccattaattaagctctcgtctttgcctttttgtttctggttttagaggagtgagtgagggagaagcggcttgtttttattttcttgctatcgtccaagggtgtttgtttttgctaatgtacacactgctttttagtctttgtacgtacacgaagagtttacaccgttgatctttgaaggcatttcgtacagttaatatcggacggttgataattgggatgctgtctgtcacatcgtaaggcgtgtcatacacaccaatttcattttatttttaattaatacatcctaaattactgaattcttatcaagaaaattgattcgatttgttcaaaatatatatgataatgagatatagcaaatgagatcacgagtaaatttatgtagattgaattagttgatattttatggaatcatccgatgataaaattgagtatctccgtatatttagcttacgaaaatataccattcaattctccctctctcatatttatttttttcttttttcgattaaacatgagctaaaaatggtgacacaaaaatgatctcaggattaaagccagaatttttctcaccaatatttgtttgtttgcttagtcaaatattaatgtttgaccttagagaaacagtttatatactcctcaaattcaaaactgaagaagaaaacaaaaacaaaggttgagctataatctttagcaacctaagcaaaagaaatattcattaatcaagatttgcaacattgggttccttttaagatagtagtcgtggaattaacgtgtggaaaaagtgttaaacattgtgatcaaagagatagatagtagtgatattcatggaattaacgatccactgaagcaaaaacagtttttttttttctcacagcataaacaaaaacaagattcaagcaattctagtcaacaaaaaaaataaaaagatttcaagccaccattttaatcttttggatcttgttttcacagacgagccataacaccgagcaggtggcaaacgtgaacatcaattgacgcctgaagtacctgatcacggtctagaacgtgaacgctccaatcactcatgcttatcgcaggatctagcctcagtcctgatcctggagaacccaaaaattcatcaacaatctcttcaaacgaacaacccctcatgctctttcctcgcgaatcattcacgtactaccttatgtctagaagtttcccgatctctaactgatgtttagatctcgccagctttcctgcgtcttgactattccaaacgccgacgaacgtggtatttggatcggtcaagaaactgcgcagactggtagggacttggtcacagtgacataactggatgatgagacattggttacccacgcataactggagagtatccgccggaggatctgagttggagtcaccatcggagatgtaatcaccaggataaggatcggcgcagtaactagctcgcggaggatgggcggattcgttgtcctctagaggatcggcgttgtgatctctcggcgcagaatgctcgtagtaaccttcagtttgatgatcgtagtacctattcggcggaagatcattggcgtcgtacctattcggtggaggattacggtcgtaactacgcggtggatgatgatccgagtagtacctattcggtggaggattaggatcgtaactacgcggtggatgatgatcggagtagtacctatccggtggaggattggcgtcgtaacttactggcggtgtccactggacgccgactccaacgacgagaggttgtagatagtacggacgacagttgttgtattcaacctcatggatccattggctgatgatggcgaaatccgaagttacggtgacggataacgtgtttccgaagacatcgatagagtactcttggtgagtagagtagtaaccgccggttcttatcgtcgtagccatcgaaactctcttcttgcttgctttctggatttttagaggactcggttagagagaaaagcgatttcttcttcttgttaattaggttttatcgtcggagagtttttattgtattaattttgcgaatctctttattttgttgtactatagaattatcaccgttgatctttctaaaggcatcttctagggttgaaatcggacggttgataattaagattcatgtactatagtctataggatttacgacacgcaaattgctgagtatttcccctccgaagtttgattttaatttgttaaaaatatatggtgaagatatggaaaaatacgtcaaaggtaatttctgatccgcccaaaaaaatagaaaggtaatattctgatgtaatttacgaattagtttgataacttagcttatgataaaaatgctgtataaatacctttccatgtttctctaatttgctgctagcttattattaacagctccgcttggaattaaaaacagtagtctccaatttaatcaaagaaaattgcttttactaatttattcatggaagaaataaacgaccgtctggaaaaaaaaagaagagaaatgtcacaaacaatctaacaagaggaaaaagattcaagattggtctttaacaacaactttaaaacaaggattcaaagatttgcaacataacatggattccattgagacgtttactcaatactcccaaaggtggtcaagaatagcaagcttgcaacacgcataaacatctatcgacgcctgaagaatctgaacgtagcgaaggtcgtaaacgcgccaatcgctcctgcttacctttcgatctagcctcactcctgaatgacccaaattttcctcgacaatcttttcaaacgaacaacgcttcatggtccttccactcgaatctgaaacgaacttccttaaatccaaaagcaccgcaatctccaactcatgtttagatcgtttaagctttcccgcatcttgactattccaaataccgacgaaagtgtaatcgcgatccgccaggaaattacggaggacctgcgggactcgttcacagtgagaaagctggatgatgatacatcgattaccaacgcatagctgcagagtatccgccggaggatcgaagcgacgacgaacccgtggagagtcggaacgataacgaacctgtggagaatcagaacaataactaaccggtggagaatcggagcgataactaactggaggagaataggagcgataactaaccggaggagaatcggagcgataacgaaccggtgaagaagcagagtaataactagagggtgtccactgaacgccgactccaacaacgagagggtgggaagagaagcggttgtgggataggacgtcgtgaatccattggccgataacggatggatccggcgttacgatgacgataaactcttctccaaagaaatcgactaggtacctttgctgagtagcgtaagttccgatggttctgatagtcggagccattgattttgcattcactttttgaaggaaagaaaatgatgaaactgctttcttctacttttgctatcgtcggagggtgcttaaattgtagtactggtgctctttatcaccgttgatctttgtgaaaataaatgcggttaaatttggacggttgagatgcatgtaggcaagggttagccttttgcatcgttgggtcagtgtgacgtcatttaactaaccaggttttttttattaatatttccttaatttttcgaagctatttgttttttttgtaccatagaattatcaccgtcgatctttctgaagatatgtattgtcgtctaggactgaaatcggacggttgagaattaaggtaatttgtttcaaaaatatttgacaaatatatgatagtaataaaaaaatgtacacttctgatgtacattttaccaatcagttgattatttcgtttctttagtttgatacagtttaatatcttcgaataatttagcttatgatttattataaaaaaaacttttacaattttttttttattgtttggaaagaatccccgaggtataatactagaatttgtctaatttgttgtttgttttaataacagctccccaaggaattaaaaaaaaaatgtactcaaagaaatttgaattttactgattaatcatggaagaaataacgacaggtaaacaaacagaaaaaaaaaggaggaaacattttacgagtgaaaaacagtttcttttcactcaactgtaacaaaataaagattcaagatttgtgtttgaaaaaaaaaactcaagatttgcaacattagattccattgaaacgtttactcaaaattcccatagacgatttcgaaaaccaagcttggaacaaacataaacatctattgacgcctgaagaatttgatcgtagctaaggtcgtaaacgctccaatcgctcatgcctatcgccttctctagccttactcctctataacccaaacattctccaacaaccacctcaaacgaacgaccctttaagccccttcctctcgaatctacaacgtgattcctcaaatccaaaagctctgcaatctccaaccgatgtctagatctctttagctttcccgcatcttgactattccaaaaacccacgaaggtgtgatttcgatccccgagaaacctacggaggacatgagggacgcggttacagtaaaaaagctgaatgatgatacatcgattaccaacgcatagctgtagagtattcgccggaggatcagagcgagccggtggagaaacggagcgataacgagctggtggagaaacagatagataacgagctggtggagaaacggagcgataacgaactagcggagagtcagagagataacgagccggcggagaaacagagcgaaattgagccggcggagagtctgagcgataacgaaccggcggagaaacggaacgataacgagctggtggagaaacagagcgataaagagccggtggagaaacggagcgatattgagcaggcggagaaacggagcggtattgagcaggcggagagtctgagctataacgagccggcggagaaacagagcaatattgagccggcggagagtctgagcgataacaaaccggcggagaatcatagtgatgagtaaccggcgaagaatcggagtgataactaaccggagagtgatacctagccggtggagaagtaggatgtggtgtccattgcacgccgactccaacgacgagagggcgagaggagaagcggaggacgtcgtgaatccattggccgatgacggaaggatccgaagttacggtgacgatgaactcgtctccgaagaaatcgacagagaactttccctgagttgcgtaacttccgatgctcctgattctcggagccattgcgatttagaaacaaaataatcgtagaattgcactcagaatatcaagaagaaaccaatataataaaagctcgtttgtttctctcttgctgtcttttttttttgtccgtcgtctctcttgctgtgagcgtatatagtagcaaaagactgagaaaagtaaatttcaattaaaatggtacttaaataaatcccaaatttaaaacaaatttgtagtactggttccctttatcaccgctgatctttaaggaaataaatgcgattaaatttggacggtcgagatgcatgtagacaagggttagtcttctgcatccctgtgacgtcgtgcgtagggtttgtccattcagctaccccaaactcaaataattaccggtttgaattcaaaatgttttttttgtcagttttcgaaagttgaattaaggaggataatttcagtaaattttgttcagatttagctaatgttaaagctgattcaaatcaaaataatcctaaatcaagcttatacttgatctggttcgtggtattcacaaatcggaaaatattcatattattgcatatgttttcgttcataatatatatccaatccaccgtagtagtagtagtatatacttatattatcgactccaaaagattggtgcttttgttgattattcagtttttgtaataacttgcattgttcataaattatttccagaaaacaaaacaacttgatcttcgacttcgtctatgttttcatgaagtcacggaaaaagacgattctaatgtaacatagcttaagcattgacgatgacgtatttgatatgctttcttggtacgtcgtacttttttgtcccatatcaaattgaagaaatttgataatttaattcatcatttaccaactttgtaataaaacaaatagtcacaaaatgccgtaacaatctctgaattgtttttttaattagaagatgttgattaacaaagagagttaagaacaaacatgtttgatccaagtcacaagattcagcaacattacattcctttgatccatctctgatcttacaaacacgttttctcaaactttccatagacgatacttaacacctagcttgaagcaaacatgagcatcaatcgacgcctgaagaatctgatcgtcacaaagctcgtacgcactccaatcactcatgcttatctctcgatctagcctcactccacgataacccaaacattcctcaacaatcacctcaaacgaacaacccctcatgctcctccttccgctcgaatcttcaacgtacttcctcaaatccagaagatcatcaatctctaactgatgtctagatctctctagcttcctcgcgtcttgactattccaaacaccgacgaacgtgtaatctggatacgctaagaaattatgaaggactctagggacgcggtcacagtgagaaagctggatgatgatacatcgattgccaacgcatagctgcagtgtatccgccggaggatcgtagtaaccaccagatgaagaatcggagtaataactaaccggtggagaatcggagttttaaccaggcggtgtccactgaactccgactccgacaacgagagggtgagaggagaagcggttgttggagagaacgtcgtgtatccattggccgatgacggaggggtccggcgttacggtgacggttaactcttctccaaagaaattgacagagtatttttcctgagtggcataacttccgattgttctgattctcggagccattgattttacgtttactttggagaaccagagcatagaaagataatgattctgcttgtatcgtcgaaggctacttaaagtgtagtactggtgctcagtgctctttgtcaccgtttgatctttgtgaaaataaatgcggttaaatttggacggttaagatgcatgtaggcaaaggttagcctttcgcatcgttgggtcagtctatcgtgacatcgtgcatagtaattcgacgtcacaaactcacaattactgattcgttaacctcaaacctaaataattactgattcgtattcagaaagattttataaaaaacttgaaatttgggaattaaggaggatgaataatttcagtattagttaatattagtatcatcctgtatcaagattaggattgaaaaactcaacatagcaagcattagatccaaattaaagtaggaaacatatttagcacagcactatgcgtttgtaagttcgtttccttattttgataaaatttagcttatgataaaataaaataatacttgtattttacaaaatactcatggaagaaataaactactagttttttaaaaaagaagggaaatttcactcacaagtccacaacgaacaaacgagataagatttatttctctaataagtaataacaaaccaaaaaaggaaaagattcaaacatttgcaacattagattctaattgaaacgtttaccgattcttttcttcccacagatggtctagaatagcaaggctgcaacacgcataaacatctatcgacgcctgaagaatctgatcgtagctaaggttgtaaacgcgccaatcgctcatgcttacctctcgatctagcctcactcctggataacctaaattttcctcaacaatcttctcaagcgaataattatacatcgatctccgtccactcgaatctgaaacaaattccctcaaatccataagctccgcaatctccaactgatgtctagatctctctagctttcctgcatcttgactattccaaattccgacgaacgtgttatctcgatccgcgaggaaattacggaggacctgcgggacgcgttcacagtaacggagttggatgatgatacatcgattaccaacgcatagctgcagagtatccgccggaggatcggagctatagaaaaccggtggagaatcggagcgataactgtccggagaagaatcggaacgataactaaccggtggagaagcagggtggtaaccagagggtgtccactgaacgccgactccaacgacgagagggtgagaagagagacggttgtggaagaagacgtcgtgaatccattggccgatgacggaaggatccggcgttacggtgacgaaaagctcttctccaaagaaatcgactgagtacctttgctgagtagcgtaagatccgatggttctgattgtcggagccattgattttgccttcagtttttcaagcagagataatgatgaaactgctttcttctccttttgcaatcgtcggaggctagttaaattgtagtactggtgctcgctatcaccattgatctttttgaaaataaatgcagttaaatttggacggttgagatgcagtgtgacgtcattaacctacgccaaaccttaatggttattactgatttgaattcaaaaagaatttcttataaagatctcgaaatttgaattatggagaatattttgagtatagtttatcagattacgttagctaatgttatatactcctaaaaattagtattatcctaaatcaagattaggattgataaacgcatctcagttgtaaactcgtatccttgatcttgcttgaggttatatccagtttaaaaatcggaaatcatttaactgggtgcaaaaacatttgattgaccaatttggtacgtcgtgattttttttgtcccatgtcaaattaaacaaaattgataatataattcatcaaagcgtatttgtttttaatcaaaacgttagatagtcttttaatatcaatgcctttattacaaacgtagtctacatgtactaattttccagtcaacattcatagtcacaaaatacgataacatgaaaactttcatgaattagaagaagacgttgattgataaagagagaagaacaacaacaaattcaaatcacaagattagcagcaacttttaagttccagagacgttcctcaacagcgagcttaaagcaaacatacgactcaatcgacgcctgaagtacctgataatggttaaggttataaacgccccaatcgctcatacaaatcgccggatctaacctcactcctacgcgacccaaacgctccttcacgatctgttcaaacgaacaaaaacacatcctagcccctctcgaatctctcacgaacatccttatgtccagaagcttcccgatctccactcgatgcctacatttctcgagttttttctggtcttggccgttccaaacgccgacgaaagtcgttttgggatcggcaaggaaagtgcggaggacttttgggagaccgtaattgtaacctagttggatgatgagacagcgactaccgacgcacaactggagagtttttggtggtggatctggatcggaactatccggtctccactgaacaccgattccaacgacgagaggatgtaccgagtgattacggttgtaggagcggacgctacgaatccagcggcggataacggaagcagtcggcgtaacggtgacgatcaagtcgtctccgaaaaaatcgacaaagtgtttttggtgagtacggaaacttctgattcttttgatcgtcggagccattgatctgtcttcttcttcctttctctaaatttttgagcgagtgttagaaagagaagcggtttctttttcttgttatagggtacatttttgtttctagttataatcaccgtcgatctttgtagttttaatcgtacggttgacaatggagatgcatgtactgtcacatcgtcaggcctatcatagatgtatacgcaaaacatttactaattactgtattttacggctctgaatttttatttttatttccataaaggtttgatgaagacatggaatataatacttttttacgtacttctttttactaaaatagtttattcagttatttgggggcttaattaggtagataaccataacctttttttgtgtgtttttttcacgaacaatgattcactgatgtaaaatcataattactgatgaagttaactttcaacgtataacgctatgacgcaattactcttgatattttttcctatatattggtttgacaaaattttgtaactttaaatataacttctgaaaaaataaaaaagttgtaaatataaattccacaacattttgtttggaactttggatacataggccactttgttttatcacactttataataaaggtggtttctgttttttttttctaaaattcgacagtttggtttataagtatctaaattcaacttgaagacaaataattctaactttattttatttaaattgtgataaaaaaaagtaacccaaaacatattttttggttcaggcatatgtgttacaacttacaaggatgcattatcctcaaacaaaatccaataaataaaaaatagagaaggtggatgaagatctaagaattaatactgtcacgagaaaacgtatacaatccactaatacatagccacgtgtatggttagatcttttcaaacaatccgattatattttgtgctccgccgtatatttataactaacattacttaattaaataaccatgtcgtcgacccattttttttctttgacccaaaactttaatttgattatatatatttaattttaatttttccatcgcacggagattgtaacaaggaaaccgccgtcgccggatctgatagtgcatatccatgaagtagaagacgaagaaacttactttctgatcttagaacggagtatatgtacagaagattcgcgtccctcaatttttgatctcaagggtcgggtttacctttttttccttcttatttttggtggctttgcgttttctcattcgacgatttctggatttggggatttcaaaaccatgaggaagaagctcgatactcggttcccagctgtaagtttttcgtctctaattgatcatttctgaaattgaagtccaatttctcggaaattactttgatctgttgtttttcagatcgaatttccaacactatttgggattagattagtgttctacgatgaaaattagattaagtatctcatttctggcgaattagttttagcaaatgacctagtagtcaatttcaccctaatttttgttgtgcttgttatatagctatagtaatatgtgttatgaagatccgctatggaatgtttcatgtaaattagagaattcgagaatttaggtgactagtgctcgaaacgtgttctttatcaacaaaccagtcagctattggttagatagtgttgattgaagcagggatgttatacacgaattgttttttcataggcttggaactttttgtagagcttccaatttggctagctagattttgtttagctttattgaataaaacgtcagatgatttcataagttggttattgttgatggtggtttattttgtttgagctgaggctagaatattagtttttcacagattttgactttccatttaatttgttaatatatttttgtttgtataatctgattggtgattgtacagagcgtgcttggtgtttctcagttctaccatttgctttataattcgtttagtagtctgtaattattgccacacacactgtgtgatggttgctgtttcttcatttgatgcatatattacaatttttcaggctcgtattaaaaagattatgcaagctgatgaggatgttggcaagatagctttggcagtgcctgtcttagtctgtaagtcatcttgctatcattgacttcagtttgaaaagagaattattggaaactttaccctttggctaaatttcatgttctcttattacagcaaaatctttggagttgttcttgcaagacctttgtgatcgtacatatgaaattacccttgaaagaggtgccaagactgtgagctcattgcacctgtaagtaacagattggtttacctttatttttgctttaactctgcatgctagcatcgtcattatctaaagagcatgaaaggtttcacttgaatgcattttaaattctagagctttcagatgttgtaattattgatattgtggtttaagagttaacatgatgttgttaagcggaatagcttccaactcatagggcctattttcactgcatccaacaccgagaggatgttgtttactgttacagaattttataccacaaatttgggataaagttcttatttttgctcatccatgtttatcaaagtgctttgttgtttacagaaaacattgtgtggaaagatataacgtgtttgattttctgagggaagttgtgagtaaggtgcctgactatggccattcccaagggcaaggacatggtgatgttaccatggatgatcgcagcatctccaagagaaggttggatgtttgatctcttagttccatatgttctagttctttgtttatagtccgtgtcaagctgatgtgagatggtttatcaaaacaggaagcccatcagcgatgaagtgaatgacagtgacgaggaatataagaaaagcaaaacggtgagctcgtgttcttcttgaaatattatacttcatcattcatttggtgtctattcccagctccttagattcattgaatatattggtaatcactgcagcaagagatagggagtgctaagaccagtggcaggggtggtagaggaagagggcgaggaagaggtcgtggtggacgagctgcaaaagcagccgaaagagagggtctcaaccgcgagatggaagtagaagccgccaattctggacagccaccaccagaagacaatgtcaagatgcatgcgtcagagtcatcaccacaagaggatgagaagaaaggcatcgacggcacagcagcatcgaacgaagacaccaagcaacaccttcaaagtcccaaagaaggcattgactttgatctcaacgctgaatccctcgacctaaacgagaccaaactggcaccagccacaggcacaaccacaaccacaactgcagcaacagactctgaggagtattcgggctggcctatgatggacataagcaaaatggatccagcacagcttgctagtctgggtaagaggatagacgaggatgaggaagattatgacgaagaaggctaagtcataacagcactataggatatatagagtagcagcgtttagcagtttgtctagaaaatgcttcttctgtcatcaaaatcttctcctgtttccatttattgtatgaaccaaagattgcatgcactctatgaaacttaatttattctcctgatttgttatttaaggttttagagttttacatcagaagttaaaatatcttacagagtaagtaaacactcaaaagtacataaacaaaggagagggactagtcatggtgttgctccgcgtggttgagatgaagagcaccttcatggttcttgtgaacttccaccttgaacttttcctctttttctcccctcttcaacttcagtagcatgttgtattttgcagcctcgccggttacctgtgtccatgtttttaatattaagctcattaatcttgtaatcaccaactattacaactcagacgttagtcctcataccaaggagaaccaatatgttgcttaaagtcttttctacttctaaaacttcaacaccattcggtttcactgacacttgatttcgtttatttgcaatttctcagatgaaattcatgcaaaaacattgtcaaaatctgacaagttctctattgaaattcattttgtgcaattaagatcgaagatagagtatatagtaaattaaagccatacctcagctttagcatgcacaacctccagaagttcataagggaacaaggagttagacctctgctgaatggtcttgacagcctgctcagcaacatgcttcacttctggatcatctccgggaacttccctccatccagattcatgttcacctgatccacaaaacccaattttcataaccaaactctttcctaacccacaatctctgacttgctacatatatatcccctgacattataatgttcttatcagtaactactcaaattcacaccttgcttgcagccaagatcggaggaagtgatagcaggggcatcactggcaggcttgaactcctgtaactctttaaagttcaaccacggcttgacccacactttggcttcgtaaagcttcttctgtcctgcctcgagaatctccagagtcaggtgatgcagtgttccggctacaacttgttctttcgccttcacaactctcgcaaactcaagaagtgcattctacgacgaccaaagacagaacaaaccaaaaaatcaatcaatcaatcaatcccacaacatgaacgcatttcatcaccgaataatatacactctctaagatctgctggtaactgaaattgagatcaatagagaaactccggacaaaattagtctaatcgtgttctggatcaagactataatagcataaaacacacatatcgagacgagagatgtgaaaaaatcgaagatgatgagagatttggaacctctttcttgttgtgttcatcgacagcgaaacgagcgaggctctcaacctcaccactgttctgattagcagggacatcgccaacacctccgactaaagccatctcttcgttgcagaagcctaaatcactggcgatcagagaggaaatgaagagggatagagagaagaaaacaatgaagagtaagaaacggcttctcatcattctcacctttatttggttcggtgccctgtatttttagatatttttcgttttactcgtcgaattgttgattttatcctctacagttaattcgccgtgtaccggattaaggtgtccatttggtttgatgttggttttgttggtacagttttaagtttaggctctgatttatgaaaatattcttacgatttaaaacaaaaaaggtttacatttgattggatgccaattgaatcgaatcatttgtaagaaaagagtaccgattcgagttatagattggtttgatttggcctcaatcggttaagctaccaacattttaaatagaaattcataccaatctggattacacatgaaaacgttgctgaggatagcggcacgttatacgaaacgtgtcggcagagtcacacagaaattgtcaaacacctttacttgtaatcgaagtttaaaacatctatgcacctttcttcgtctttctctcatctgctagagagcccaattaaaaaaggcccatgggaaataaaatcgcaacataaacagtgaaacatcattggaaagagttttattagtctgatattattgttttgataatacaaagctgcgtattatattataataataatactctcgttactaaatagcagcttcgaggaggccgttaacgaaggatctttggttgtaacaatcaagattaccaccaggattaacaccaaatatgttacaatacctctgataaaaccctatacgatcggcgactctcccgtcttggccacgtccacactccaatccaccgttaatgatgttcgtaatcactccataacccggtaatctcccggcggcacggtcggcgtctgaaggctgccactggccggctatcacggcatggcaagacggtttgggaggctgagcagtcatccagaaccaaatcgcggctttgaaagcgatcactgcgtcgttggcaacaaggtcagggttgttgagtaagtcaactcctattgctctaccgcatagaccgtaattgtagttccacgacagttgcattggtcctcttccgtagtagcgtttgccagatgcgcatggccacgtggcgctcggttcacagtagtctgaagcaggattctgttcttgcttgaaacagtagccccatgaatatggtccgtctggtgctgtagcccatccacctgcacgacgtaaccgtccacttaattaattagtatatagctatatatatagtcacaactcacaaacttgacattattcaaaagtgtataatttggaaactggaatattcgtaagttccttgattggttatttgcgtttagattaatcaagaatttcatatttttaaaatagttttttaattgtaaacgcaaacatctaagaccaaaacatttttctttgcgtttggcgtttttgtttgatttttttctttcgtttctaaatatgagaagctataattttttcaataaaacatatatatatatatatatatatatatatagtatagtagttctttgtatatatgagcacttggatccaaaactctttacagaagaaaaaaagaacttcaaattctgatgttttaataataaacaccaaaatttagcaattgtgttttgaaacaatctccgtcaaattgttaatgagttttgggtacctgtagtttcatgggaagtctggccgaagaaggcggcgacctccttcttcctcgtggcggtgtctccggtggtgccaaaaccggggaaggactttgcagcggtgataaaggcgttgtaagtgtagaaacctctagcaggacaagcggcatcattcctatgcttaagcatatcatcgaactgagaacttgaaatgatgcccgaaagatcgccggtgggtccaggaggagtaccaccgggagtgcactggctttggcagccaggctgcttacagtatggttcggtgttaccgcaccagccgaactcgctgcagcatagaccgttggggcagagtgctcctccagcttggcgaccacattgctcggccgaggataatgataggagaagtgaaaagatgagaaagagaaaaagattagtcttcattttgttcaatgttctatggttttctttttgtggaggcatgaaagatatatatagatccaattaatgaatgttttatcacatcaaattctatctttttccatagtttattgtttgttatgtctatggagtgtggctatggggaacaaacagtatttggtaggtttgtttttgattatatttattttccttccgtcattgttgctaggttagatattgatttgtttttttgggggattatcatgttaattccaagtaatgagaactttctatgtatgaaactgtgctaaatgttggtagaagaatacaaattttagaagaccaaaagcataacaaattacactctttttgagttttttgttctaaagttactatcgacgtagatagtgggacacaaaggtcgtaaaattttgggtggtctgaaaacacgtttactcgagttgcggactaatcgatgatctgagctagtgtgcactaattaatcaaacacacacatattcggatattccctatgatgtatacacaatacttgactatatctaagacaagatcacaagagttgcatgaatagtcaagaaaatgtataacgtggagaaaataaaaatagacgtgtctaaatatttaactatgatcaatgttgacaaaaacaaaatttaactttaattatgaatatgaggcggcgggttcgtgatcaactttttcaaaaagcaattgagacatttagaattcattataaggtaacgtatagcattagccaggtaatgatataatgactcaagaccaaatcataccaatatttaatatattcattattccaactactcatgatgactttccctatttcataatgttttatccaaagtacgtgtcatgtttacaaactatataaaatccaaaacctcgacgaaacctgcgtgctattcttatgtactaactatgaaaagtaacgttaatcatcgttgactgaatctctaatctccaatctcactgtgggctgcgttgccgtctctttcgggtagaaataatcgaccatggaaaaaaataatattgtaatgtgaatatattggcaaatcctacaaaatacattttaaatgtaatcttaatttttgtaattaattacatgacaataccattagaaaattttaatcaaaaatagaatcttttaatgacatcattaagattaccaaaatcatttaacgacaatattcatctcttaattatagggcttattggatttaaagacgggtcatcaaagatttcctaaactgaagcaaaatataccgaatattcaaatatctatctgttaccaaattataaacaaataagttcgtaaaacaatttaatattttatatacgaaatcaattaaaatcttaattacagaaaaattagcataaaaaaatatggtacattcgggtctatagtatttttgcaagacttttttggtggatttgagtaaaagtgcattcaggtcatatagtacattctcctattaaataaatatggtgcactcctatgttattagctaaaatgtttagattataattcagagtcatatcataaataaattaatattaataaaataaatggctttttggcaagacggatttggagggatgggtttttgaatcaacattaataaaaaagtaaaatctaattaatccaccgttttaatacggattaaatttttaatttattattttttaagactactaatattaaatatatcaaatcatcctaatttagaaaagattatataaaacaaaaaatgttacgtggtatgtataatgttactatatataaaattaaactataaaatataaatgtattagaaaatgatacaatttacaaaacttttatatataataaataattcttaaatttttaaaattactactttaattaaaaaattacgggacgggtaaagaaattatagaacgagttttattttggaattgagttatatggtggatgtatttgaatcaatatttataaaattttaaaatattattaatatgttgttttaataggattaaaactttaattttttaataattgtctaatggatttcgtagtataacgttatttaataataattataaactgtaaaatataaatattttataaaaataaaatttgcaagttttaatatatattactttttaaaaataaatcatcccgcggtataccgcgggttaaaatctagttgacttttattcctgaaaacaatgaagaaccaaatctaggcagttgcatctgattctgatcacatgggatcattaggtgatatatcacacacacatcaagcaacaaaaaataatatgttcctcgtttttggaacgaacaatctccacatcttgtatttcatggacatgcaacgatgtatatactacttgaaccactaattatattaataattcactgatttatttgttacctagctaaattgtagtgtaattatattgttattctggaaacctttgttgttatcctacctagcaaacaatttatgttatgactcgaattagggaatggattgagatatcagattgattaacgaactcatttttctttcgtgcttcacataaatattgttgcgtctcatttttacatgtgtgtgcatagggcttagattagttagtctattcaactacaacattgactatgattgcctaacattaatgcatttaggaagtagaatagatattcagtttttttggtgtaactacagaaaaagtttgatcattaaaggctattggatttgccccaaaaaaaaaaagatgtaagatcattaagcctattggattgggccggagatcagaagatgttaaaatcagattaattttgttttgttttgttgcatttaacaaaattccagatcgtttcgaacttggttttgggtaaacatttaattaaaattataataattaattagttactgatcttatcttaataaagtagatattaaccaatttgtaaaggaaaattggtaattcagatttttaattgaattgggttcacacgcagcatcatctccaccgtacacgtggatgaatcaaggaccatcgtcgattttcgatgggttttttccgcttggagtcggttagtgacgtctttaagaagagaagaagcttataaaaaaaaaattaagaacagtgtgaaatcaaaattcgaaacggtacaacaatgggagattctaagaggcaaaagacggagacggagacgaagatggagatggagaaggtagagaagaaggaagcatcaggatctgttaatttcgcagaactacgcgacgatctcttccgcgaagcagcgaaacttgtctccgaagatccctccaccaaaatcgccatcttcgttactcctcctccttcttcctccgaatcggacgtctctatgttctccttcggctttccctctgtcaatggcgttgttaacactttcctcgagaataatccagcaccagtggatgatgcggaggaggaagatgaagacgaggaggatgcggaggttgagcacccaaggttttggtgggaagatactaagcaattcgaatcgatgaatccagagcaattgaacgctgcgtgtcagaggatgctgaggctgaaggaacgtttgaatctcgaacttgacgctatgctgaaagctgaagcttctggaaatcaaaaggatcctcacaacgacaaagctgctgaccccaaaacctaaaggcgctctcatgcattttcatgttctatcttttagtttaatcgttttgatttctatttctatgatattgccccagatgtcccaggattggttgatttgatcgtcttatggattatctctgttggttgccaaactattattctattcttaacatcaataaatcttatgacttccaatttttattgtgcttttctatacattacataagaaatagttttttaaggttgaaacagagaaatgggaatcatatttttctcaaccaaagtgaatgctttatttgatacatacattacattattgtaaaaagaatcgaagtgttcaatgtctctatttctctcttgacaacaatggttcctctaaaactatgttcgattcaacttcagtgtaggtcgatgagtttttcaggccgcttcttctccataagcttggtttgctgctttcttctacatctgtgggtctattgacgtaatgaacacaaacttggactgcgtcatgtactctcacgaagaaccattctttgccaataagttccacaatgcctgctcttgctagagtcaagagaacctctttgtttgggttcgaaatcgctagctgatccatagaaaaccaactaatcatcaaggtattgacaacttagaaacaagtactaaataatgatgatgatatcaggtttgcacctgaatgccccttgttttatactcctcgtacaaatcttttaaagcttctacagcgctcgagtcgatgtatgtgacagctgcgttacatcccacccattgtcgattagattaatcacctctgtaagtttcgaactgtgaatagaagaaacattggacttacgagacatttccaggataacaaagtagatcctctccatatctgggcccttgcttgtgtgtttgtcgatagcaacttcatattctcgtagcctgcaatttcgaaacatggtgttgttgtgttgattctttatgtggatcataacagaaagcaagtcaggaaccaaatgtcaatttcacctgtccttgatgtagcttatgttggcaaaataaatgggagcatcgattcgaacaatcacaatcccgttgtaagtgtatgcctctggatactgtttcatgtttctgtacacagtggtccctggaagacgccccaagacagctgccaaaacatatgtaatggtatgtgatcaaggatatgagtgaaaaccatttctgagaaacaaaacaagcaaattgaacagaaacttatctcacctatatgagggtttgcagactcgtgtataacaaatgcaagtgaaaaaccaacctgaaaaattccaagcattacaactctgtgagtcctttaaaagcgttgcacaattcatgtaggtggttatactactttcaacatcatcactccttttaatttcaaagagatatgatcagctacagaaataaagctgagtgagtatgagcatactcacaccaatgaggaccccaatctctattccaaagaacaaagtggtggtgctagtgatggtccaaagagtaaaatctctcttgtccacacgccacagaaagattgccccttcatagtccacctaatatggtaaacatccagaaagaataaatgtgaatatatattgctcaataaccaaagacaataagtacacaccccagattcttttctggtgggtttatttgaacttaccaaaccactaacagcagagataactattgctgctaaagcacactgcgtagttgagaaacagacaggaattagaagccagatttcagttttaaaattctccagagtttcagactaaaaaataaaaacaagagagcacaggactggaattagaaatactcaacacagacctacctgtggtataaatttgaacattggggtcaagaacagtagagaacatccaatgatgattcctgttacaaggcctgatagaccagtcttggcttcactttcgctattcacagctgacctagaaaaggatcctatgacacatttagggaattaacagatacatcaaattcaggctacaacttagaaaatattatcaccttttgttttgaatttatcatagaaaacacacattacatgttgtctactaatctcaacagtcaagattacgtacctgtagttggatatgcagagaatagtgacccaaatatatttgcaacgccaagaccaaacaactgccaagtcacgggaaaaacagacagaactctcaatgaccataagatgtagccattaaaagaacaagttacaacatttaatggtaagaattgggctagccgcttgcacttgattttctttattctctagggtttatacctctgaatttgaatccaattcgtatctatttttcgcggctagtgctttcgcaatacctacagattcctggataagtcgaactagcatatcagaaaacacaaaaacatgcgcatactgcagctgaaactaatcaagaaactccacttctgcttctcaggaagtcaaattactccatgtctcagccatatccatccatttacagattctcatgattaggttcagctgcaactcacgtaagtccaggaaaaagttaatgacaatgatgtctcaccaagatggcaacaccagtaatgagagccgatgttggaagcagtaatttggcatgatcaaaactttttgggaaagaaaactttggaagtccctgaggtatatctcccacctgagaaatcctaaaaactttgcaatcaattacggaaaacactcacaaaaaatgtagcttcaatagggaaaaatataagaatttcattctttagcaatctgaccagtgtgatggaaggtggatggaacacttttgcaatgattgtaccaagagcaagacctgtgagcggtcctgctgctcgtatgaaccgaagttccttctttgcttttccctgccgcagaaaatgatgccttagcataataaaagtaagggaacataagaagtatcctaatgacacactgaagaacaaggctcataccacatgcttcattactaaaaggatcaccagaatggtacatcccaacaagaaaggtggccacttaaactacaaaacagaaattcagatgaagttatacaagtaaggcatagaaggtatgttgaaccaaaaggaattgcaacaccattaagaatctgaagaccagacctgatcagctccagctattatgctatcaattactggcataatcttgctgctccgagaaacgctataccctaggaagtatttcagttgggataacccaattacaacagctgaagcagttgtaaatccagaaatgactgagtgacttatgaaacgaataagccatccaagcctgggttgaaaaaacaaacgaacaacttgttctaacactacaaaaaatacaggattccttgcacaaacaaagagaagactataaatacctcaagaaccccataatgctctcaaatattccgaccataagagccaacaaaatggcaagctcagtgtataattcttcagatggatcaacaattccactcaaggcattagaaacgagaagggaaactaatgctacaggtccaactgcaagctgacgggatgaaccgaagacggcatacacgaataccggcacaaatgaggagtctgcaccaaacaagattaataactacatgcaaaagtgggaatagcttagtatctctcacacacattgatgaattcataaaagggtatattcatattgagctcacatagaccgtatattggttgaagcccagctaaccttgcatacgacattgcctgctcaaatccatcaaaacagaagtttttagaaactaaactcacttaaacaagaagaacaaacatactcattagagttcctgtgattcacttaagcttatctctagatggtataaattcagggaagatagaatcaacaatcaatcggaaatgaagaaacagaaaatgacctggggaacaagcatgataccgacggtgataccagccataagatcgagcttaaagtactgatgccaccggtaagtccgaatccaaaggaagcaaggaaatattgcatcaatccagtcgaagaacgtcatgcgcttgatcttcgccgtccatcgggagaagaaatcattaaagggaatggagtgacagtgaggatcagaagaggtggaatcgggatactggagaggaatgatcttgaccggaatcgccttagatgaagaggatgaagcggtggagagatccttgacggcgagggacatcggaattggtgggatagagaagaatgtgatcaacgtgaagaaagacgtatcactgattgtagcatgaagaaacagagcatagcgtagtgccagtttgggatggataaggacgatatggcagctacattcataactttatcttgatcattaatcatatcattgcgtgtcttaattaatcagtatgtttcgttgattactgttaagtataagccttgacttgaacagtaccatctctaaatatcctgtcatgattcaggttcatcattctttcagttttaaaattcaatcatttttcatacttagattgtcacattaaactagctggtttatgagttcgtatgtttcaaccttttgtgctctccagtaaattgtgtatcacataaaaaaaaaacactgagctcattttgcagaagtgtttgatcgatttcagcccacatacttgaaatgaaaacatatgggatccttcgtgtgaccatttcacccataaaactcgtttgccatcttaatatttctgttcattaaagtgaacttttcgtcacaacataaaagatgctaatatcaaaggagtatgtaccacaatgcaggagaaacaagtcatatattaacgataccgatacatgctgctggtgttctaacttctcagggagttcgaccaacgttggcacagaagatacctgacttctactcacttaggcaagggcgtggaagctacctagcgttgccttagaggtctctgcaaaacatgtgttgaggtttgtatttgtcttaaaaaaaaagggggaaaaatcgagtgagaagtgtgaagactgaagagccttacccttggttcattgttggtttcacgctgttgtctactacttctggtgtctctgtctacatcagcctctggcttgtcatgcttataaaatgcttctaaggctcttatcacaaatgggcgtactatgtttacttccattgccgatacattagagatc

SEQ ID NO: 1290 - DNA, 21826 bp, Arabidopsis thaliana
aaagatgctaatatcaaaggagtatgtaccacaatgcaggagaaacaagtcatatattaacgataccgatacatgctgctggtgttctaacttctcagggagttcgaccaacgttggcacagaagatacctgacttctactcacttaggcaagggcgtggaagctacctagcgttgccttagaggtctctgcaaaacatgtgttgaggtttgtatttgtcttaaaaaaaaagggggaaaaatcgagtgagaagtgtgaagactgaagagccttacccttggttcattgttggtttcacgctgttgtctactacttctggtgtctctgtctacatcagcctctggcttgtcatgcttataaaatgcttctaaggctcttatcacaaatgggcgtactatgtttacttccattgccgatacattagagatctacattctcaaattagagatattgttattgttaaaaatcactctttagaggtaatgagaaaaagctaatgtcaagaagtagcaataaaaaacaattacctttactgcagatgtaccttgaaatgatcctaagttagtctcaagtttgtgaagccgtacatctctgatgtcctcgactagggatctcacctatacaaaattcataaacggctataaaagcttaattcgaacacatagttaggatgggagacaaattaagatgtatgaaattaccatatacatgtctggaatatcgtcacgtgcactgccaaaagtgagatcgatactcatcagcactcttggatgttataaatgtaagggcgagcaaagaaacaagaagagtctaagaacctactggtcaaaaagtagtctggcaatctccacgtaactaaatggtaatgcctggaatgtcgactgagattcacgttctgcttccaagatctgagtcaaattatctagttcacaaacaaagaagcaacaagaaacagttaacacttaagcacctaatgttcgttaacatttgaaatttatctgctaaatttgaaattgtcttaccaacagacatccaccccggaggccggaaagtgcattttcctctcctcttcagtgccactgcaagccacagaggcacctttgtcggaatctgaggaatgaaccgaccgaaatcgccctgtcattgattaacatattaatcacatggttaacaaaataggttacaagggaaatgattacaggattgtataaaacaagagagattacactgatgaaattgagttgctccatgttcatattaggaacaatctcgaccagctcgtcctctgccataaactcaacctggtatgaatatagctaatcaattaaactattgcagacagaacatgaaacgcatacaagtaaagaggagaataaagacctcttgtggagaaaacagtgaaatatgaggatcagtctggccagccattgatgtatctcaagaaatctcagtttccagacctaaatgcaagcgtgataaaaattatacttggtagagacatttaatcaaacactttatctacactctacagaaagttcctccttatttttttagcacatatcaacttccaatttcagcaacatcatgaaacagcaaacctttaaaagcatctgatgatcaaatctaacaatcaaatttcgcaaattctgaggacatacttgtaaacgaaacgccggatatagtaagagagaatcatttgttcctgattagtgatatgaagttgagtttacctggttagattttgtgtgattcctggaagatcagatcgatctcttccgatattctacacacggacagtaaatgaagttcccctacgcccgaaactcccgaagattgaaatatcagtaaccactgtgatcgaagagaaggaaatggatgtagcttagcaaacccaggaaagaaaaaacgaagataaaggaggagaagaagaagaagaagagcaaaatagggagagacacagcagagagtttcgactttccgattgtggctctctacgatggcgggaaatccgatgatagtgtagcgggaaactaaaataactccaataggtttcggttagaccggtatttaattcaaccgaactcaaaccgaaaccggaattttaaacgaaatcaattttattctaactgatagcactttgtttataaagactagtcgaaaaaacaaacaaatcgaatcacaccaccactaattatatttagtcaaccagagatggtaaagcaatgttgtgctgtagaataaggtaaggttttagttttattaaaaaaaatcatctctaaccagaataaaactcttttgtgttcatggctttcacgtcatgacgactttctcctaatctttttttaaaaagacccaaaccaataggtgaatcaacaacataagacttgattgcaggcacgactgttatttatcacctaatcatatcttcacagctacattagtttgtttttgtaatatggttcaccaaatttgattctagtttctctcgactctccaaagaacacgaaaatgaaactggaagacttacttgtggaagacgaaaccaaagatcaacctggcgctagcgttgcgtctcttcttgatcatcatcgtcgtcacccccagccttcccttcaacaacaagtaagtcaaactcgtatttataatcctatcatattaatttggaatcccaacaatgacatatggaaacctaagttatatcatattatcggttttgttgcagccatcaaaagtgaatgagcataagagcgaagaagagaagaatgatttgatcaagaagaagcaaaagcgaagtcttcaaagagaagtgatgaaaatgcaaggagagctagaggacgaacaagccttaaacaaggctctacgtgatatgcatcgtggtcccgtcatgtctcagcctcgtctctctttattgcttcttcctcctcaggtaagtcacattagactcacagttccgagattgaaatgaaataaaatggaacttattgattttgagtttgtataggttcaagagctaatagaggagcttgcgacggttgaggcagagatactctgtcttgagaaacgaatccaagacttgaaacttgatgtgtatagtgagaaaaaagagaacaaagaacttgaagacagtattgatgaaggagaagaagagaggatgatgaaccctaagagactactacaaaggcagaatcatcttccttgcgacgctgacaatgaccttataaagatgagatctgaggatctaaaacagagatcaaagtcccagagttatggagatcatcatgttgtcaaggatattcaaatgaacagtccacgtactcatgcgtcaattggatcaaccatggagttctcatcaagaatccattcttcgactttttctgatggaatgtcaagaacacaagagaagaataatgtgcaagagacgacaccaaatggagtatcggaagatctggtgaagtgcttgatgggaatctatctggaactcaacaggtcatcgcgtgagcgagaagggtcaaaaactgtttcaaagctgagcctcacacacctcaagaacgcttctttcaaacgcaaatcggtgtatgaccataacgcatctaatcttgatccatatggagctgtcatggggacttctcttagagacataggagaatacaagaacttcatccatatcactcgaacctccattgatgttagccgtttatccgattgctccacttctcttgtcaatttgaggtacttacaaattcagatttccttcttatttacctgatgagatcacaagaatttcatgatctctgtataattaaacacacatgcagggttttgaaggagaagttgagcaaagtggatttgagtttcttgaaccacaagaaaaagatggcattctggatcaatacctacaacgcctgcgttatgaatgtaattccatgactcaattcatatttagttgaagcaaagtcaagatttcggaaataactttgtttgtttgcagggatttttggaacacggactaccttcatcaaaggaaaaactgctgaccattctcaaaatggtaactaatacaaaacaagaaacatctttaaacttcgcatacttaagttaatgaacaaaattgacttgtgttgtaggcaacaattgacgtgggaggtacacaactgtctgctctagatatcgaaggatccatcttgcagagtccatgcgaacctagggaatctgtaagtactcatatatatcatcctgtgaagttgtaataactgatctttaaaatgtttcttttatccgaataaaaaggtttcagccggtgaaagcgaagtgagaatacagacacgctacggattcagatgcgtagagccaaacctaatgttcgtgctttgtcgtggagattggtcttcacctgcagtaagttcactcaatttcttcaaatatgataagtgttgcttcaacggtagtaactaacaaagcatctttgttcatgatcacctatatacatgatacagttgagagtttatacagcagaagatgtggtgaacgaactaatcaaagcaagaacagagtatctagaagcttccatcggtgtctcgggaaggaaaaagattgtgattccgcgattcttgcataaacgtctacgggatttcgctgaggatgaaggctcgttaattgaatggatatgcagccaattaccaccagcccaacgttgctttcagctcaaggaaacagcgatggaggggttgaacaagaaaagtgaatctcaattgaaaaaactgatagaagtgaggtctcacgaatacgagtttcgttatctcttggcattgtaaaatctaatccttcaaatttctagtatttggagccttgaaaagacgattgtcctatatatgtgtgtgtgttttaagagaatgaagttacacagtgaattttgattaataatggaaacaaacaaaatagtaactacaaagtgtacaatacattcatattgtgatacatataaaagtgcttcatttaactatataaaaccttgatttaaatctagattggattcaaatcagtagattacaaatcccgatcaaaataattaagtatgctatattattgttgtaaatgtataatctgtagatattaactaacacttaggatgaggaacacgacaagcaattagaagtctgggcaagagcacagggttcttgataaaatacttgcaggcacatggttgtggctttaccattcttccacaacagtaactcggcaatttggtgcctttatcaatggcaactaaacaatttgcaatctcatgcatgcatctgcccatcatctcatcaccattaactttgatcggagccgccgacaagagtatgacgacgaaggcaatgagcatcaatggaacaatcttcatgtctaattattttagtaactagtgaacaaaaagataaataattttgcagaaaattaaactggttcatgccttctttgttttgttctaggtaaattttaaataggaattggaagcactgcttgaacaattgactttttcagaagtcacccatcataaaagcctttcctaaaccgaaccgaataatcacaattttttatctccggttaacaaattctttctcgcgacgacttcaacgcgcgacaatggcgcgtgtaagacaaacagaggtttcttggaatatctctccaagtacttttgctgcttctctatcaaaatgggaacaaacttagaaaaaaccaaaagaaatcgaaattacttggaaacaaaacatctgacgatctccagactcagctgaagtttcgagctgaatctcttcttctctacacgcgatttctctggtacagttcttaaacgtctgctttgctttgacattcatcgtttctctcccaatttgcttcttggttttggggatgcgcgttttgatgccgacttttttcttcagttttgaaatttcgtaagacattagaccccaattattcataattttttcagaaatcagacatgcatgtttcatacaacatagagagtgtgttaagtagaggagtcaacattttttccggatctatctaatcaagctgaatcatagacttactattcagaatgtttcatactcactttgtcttagatccaagtatgtaaggtttcaagtgttttttgtttcctgtggagataatgatggctaaattcatttacttacaatgtagttagattatgcagctcgtagatgtaaaacaataacgcgaggcggtgatgaacaacaaattgagtgattttgagaaaaatctgtacaaaaaactcaagagtggaaagctcgaggtgaaagtctcataccggactttcctgtgtccttattgtcccgataataagaagaaggttggtttgtatgttgacattcttcagcatgcttctggagttggtaatagccaatccaagaaaagaagtttgactgagaaggctagtcaccgtgctcttgccaaataccttattaaagatcttgctcattacgctacttctactatatctaagcgcttaaaagccagaacatcattcattcctgctgaaaccggcgatgctcctataatttatgatgatgctcagttcgagaaacttgtgtggccttggaaaggtaatgatgatgacgcatactcctatgtcattacaagtatcgtagtattagcactatttggatttatagcctctctactaaccgaagttgtatctgtggtgtggctgggataggagttttggttaatattcccacgacgagtacagaagatggtcggtcttgtactggagagagtggaccaaaacttaaggatgaattaatccgaagaggattcaacccaattagagttcgtactgtgtgggaccgtttcggtcattcgggaaccggaatagtggaatttaacagagactggaatggacttcaagatgctttggtgtttaagaaggcttatgaaggagatgggcatgggaaaaaggattggctttgtggtgctactgactcgagcctttatgcatggcttgccaatgctgatgattactacagggctaacattttaggagaaaacttgcggaagatgggtgacctcaaaagtatttataggtttgcagaagaagaggcaaggaaagaccaaaagcttttgcagcgtctgaactttatggttgagaacaaacaatatcggttgaagaaattacagataaaatattcacaggattcagttaaacttaagtatgagactgaagaaaaagaaaagattctccgtgcttacagtgaaggtgagatttgtccttctagtttcaagattcatatccccttagaaaaagtattgttgcatcacccagctatacatatttctgtagattgtgtttatatccgcgttacattttccgttttgcatctgaagatctgacaggaagacaacaaaaatcgactgatcatttcaataggatctttgctgatcatgaaaagcaaaaggtgcagctggagtctcagataaaggaacttgaaattagaaagttggagttggcaaaacgtgaggcagagaatgaaacgcagaggaaaatagtggcaaaagaacttgaacaggtatatgctaacaagctcatttcttaaactgatttctggattgcctctttcgtcttctaaaattcaatgacattattttcagaatgctgctataaatagttatgttcaactatctgccttggaacaacaaaagaccagagagaaagcgcaaagattggctgtagatcacaaggtctgggaatgcttccttctttaaaaaggttggctctttaactttatgtgacagggtcctaccgtgtttttaaccttagatgcaaaaggaaaagcttcataagagaattgctgcactagaaaggcagcttgatcagaagcaggagcttgaactggaggtccagcaactgaaaagtcagctgagcgtgatgagactcgtggaattggacagtggttctgaaattgtgaacaaggtggagaccttcctcagagaccttagtgagacagaaggagagcttgcacacttaaatcaattcaatcaagatcttgttgttcaagagcggaagagcaatgatgaacttcaagaagctcgaagagcattgataagcgtacgtatattcaaacaattttctttgaactttcgtctcatagaggagctaggtgactctttgcatgtactgagtgataaactcgaatataactgacatggtaggctagagtggttggatgcattaacaacagaaaagacactacttgaattttcctctaatttttttcttaactttgattgcatgtatagaatttgagagacatgggattgcatattggtgttaagagaatgggggagcttgacaccaaaccgtttatgaaagcaatgagaataaagtactgtcaagaagatctagaggattgggcagttgaagttatccagctttgggaggaatatcttaaggacccagattggcatccttttaaacggataaagcttgagactgcagaaacaatagtggtattccttctcctgtatatcactaattcaatgttttttatttctcatcctaaataatatgtttcgtaagtgttactagcagaagacctccattcaagtgcatgcgtacaactaccagctgcatatgcagatttgtttatgcatgttatggtgtttgatatgtagaaccctgaagctgttgatatctatgtcaggaagtaattgatgaggatgacgagaagttaagaaccctgaagaatgaactgggggatgatgcgtaccaagcagtggcaaatgcattgctggagataaacgagtataatccgagtggaaggtacatctcctcagagctatggaacttcagagaagacaggaaggctacgcttgaggaaggtgttaattctctactggagcaatggaatcaagcgaagcatctcaagtcataaaggtttatatttgcatttacccggtacactcaaaaatcccagctctttggaagtttgcctctttgcttacatagttgtattttcgaattttgctaatctgaggtctgtactttgcaagttgcaggagatggaaaataagtttagcgtgtaaaggatgtcaaaatgcaaggttcaacaattgtctctcgtctttgatgcaatatatgggtcttagaattgcgaagtaggtgtaaattagaggaggatggcgtcacattgggactcgaagttgaaactatgtttctacacttgacggttcaacattgtaggaaactaagtaacaaacattgttagatgattctaaaccttagagaagtttatgaatttgtgaagaaatgaacactttggcttagttaagagtctttccaccaataacaaacacttaactgtgtctaatattccaaaatcacagagcagcagtatttcttatctttcaaattgggttattcacattttgtcaaagatatctgtcacaatatcactctcatctctcatgtgttttattgaaaaaaaattaaaaaaattgaacgaaataatgaagaaggtttgacctgtcacttgtcagaaaggatagaacataaaagaatgtataaaattacaagatccctttttatggaccgaaattattacacaatgtaatcaatgttgaaaaaacaaagatagaacctaaaaatttggttagggacgaatctcatcccagttggagtcatttacagatgccaaagcaaggaaaaaaaaagtgtatgtaggagaaaaaaaaaaacgagaaataaagacaattaaactttgcagaaattgagttgtccatttattgtgttgtttgcttctgtacacccacccaccaatgcgtacctccttttttacactgaaacacctgattcaaaagctccacctctgttcatgtctggatctttggacgctcctctcgcctgatgttttccttggtgctgcgaccaatacccgtatgccctcaagactctgtctagcagttcttgtggcaccggctctcctcttcgttgctgtggggatatacttgctgtgtgaactagcgtcttccatttgtcctgcatattcacatgttcttgagatattaacctgactgtaagacgtgatatgttccagattacatgtttgtgtctgatgtgtttaccttcaagtccacgtaagtccgatgatctgcatcctcgaaagcacgcaattttacatcacgccatctgtgtgatcagatatatcgaccattagcttttgagctttgacattatcccacgaccaaactacatgagttatgaaagaactagtgttatataccttccagtcccgagttcctcaactgcttgtacaagagcttctacctctgtcacagagaagggtctcctagttctcctctgggctagctcagtacgcttaggtttctggttcaacggaactatggcaagcgccttgacttccaactctggaagtgggacaagctcttttgaatctgatgaaggttcatcaacagatatgtcaccctgatatggaactaattcgaggttactgtccacaatatttcttgaatcaatcacgtcatctgcatgtggaattccagaatctagcataggagacgccgcagacctgggatgataattcagaaccgcttttgcttaggaatcttcaagaagaatgaacaccagtgatattcaactaaagcagcacaaggatatgatagcgaatttcttagtaccgttcagacaaacttgtagggtcggttggcacagcaggatcttcagaacacaaaggtaggggaactttgctgggactaggctccaaggtgaacccaaggttgtctagattttcatcacatgagatcccagtctgggacagagttttcctttcatctctaaccttcttcccatgcattaacaccccaacacgtattcctccgctgagtaaaacactgacagcctccatcacagtcctctgcaaccaaaagggtcaaagagcaaaatggtaatttgttaacacctcaatgtccacacaagagaaccaaacaaatgtgaagaaatacatattggcatatacctttagtgatcctactgttgcagtttctggaacttcaataaaaagctctggaatcctaaaggacttaatgcttagctttactgcaccagagataaaaatacatgagaaccacattatcctgtctccggataaatgtctcagtatcatttaccatccagtcaagtaccatgggagccttttgagaggaccacaacagctaagataagataactgaagagttttgagatagactacaataaccacctgtatctcccttcttgggtaacttggaaacacttccactactgagtcctccatcagaagttacgaccgagcttctgtcaggtgatcttcttctcttataaatgatctcacgctgccatgcgttgtaaccataacatgattttcttttgcgataaagagtcttcacacccacatctagacatccatgtttaaagtaagaacagggtgaatcacaaaaagaagaaatgtgttcaaagataagtgaagcaggctgtgttatacttaccagctctactgtatccaaaatcttttggaacttgtttccagtatttggacgacatggactttcttattcttcgaattgttggagacctatacgacttaaatttattgctaagtttatggtaactatagaatttttcatcatcatcttttctacctaggttagtatggttcccatgtctagcataggaaccattaggggtcatatccaaggtggatggtgattttaaatcaccacccacacagactgatttcggaaactgcagacctaacgcagttgcatcctctaagttgcaagtatcagtgactaagcctccatcacccacgcgatcggttgcttctccttgctcgaacccattatttacattcttgttttcacaccctacatccatcaaaccatgaatcttcttgtaatcagacatcggagtccgctccaaaacgccgtcactatccggaaatgaaaaacaactgttcaccacacacttctcagtagagatatcataagtaggctttgacacagagtttccttggtcagaagactcagatttaatagtcttgcaattttctactttctcttgcttaatttcttcaaatgcattagaagacgcagaggaactctcgctttcctgtagaatctttccagccaaagctagtaagtcaattgcacagatctgagtgttatcatcatcatgatcaatcctcttgtttagaaccttcctctggaaaaaaagattcatcagaaggcaaattcatgacattgagctaacagatccagatgaatcaaaatttaccctgcatgaacgaggagctctgggaatgttgggaaaatcaaatcccacggaaaggcaatctaactttctcttgaacaccatctctcaaatatgcatatcactagcaacacaaaaacaaaacagaacagaacagaacactgtaaagaatcagaaagtagcaacaagaatcataaacagtaaacaccaatttagatcagatcaacacgaccaaatccgagcctttgatgtaagaaagacactgaaacaagaaatggatcacgcaaatggaaaagcgttggtaaaattgaacaagactcaaatgctagaagctgcttacaaattcaattataagattcgagacaagatgaaaagaaacagtaacctgatcagatctcgaacaaattatttcgacccgccaaagaaatttaatggaaatttgaaaaccggatcagagtcaaaggatcaaaaaccacccaaaaccccaagaattttacagatcggtaagtgaacaagtcaattgcgatgaaaaaactcacctatcagccaccagtttcttgatcacgatcgcgaaccacttattattacagatcacgctatcttaaaacccaaattcccccatacccgatttgtgtgttttatgtatatataaaacaatgtacaaaggaaaaattagaatcgatttatacaaaaactcgagattctaagatttaaaagaaatgaagaattctcgagttattttttttttgtgtgtgttgcggtaagaatccgtcgttgtctttagaaaagaaagaaggaagatgacgtgaaaagccccattgaaacagaaacccctttttttataatcattcttgtaaattaaaataaattaaaaaagtttttattgaccacacaaataacaacgggtttgagatgaggcagttgttgtaaaccggtaaaccggctattgacggtcacccttgtaaatttatggtaaaacactaaaacccctctctccggttaacaggctattgatggtaaccctctctctccgggaatcatcagttcataaccccttaaagaagataggtttgtcagaagaatctttattttagggatcggataaaaacaatacaacagtgctgtttgtgattggagtggggtcctttttaatatactagtactacaaaagctgtctttatcttccacgtgggtagagaaagcctgtgacaactccattgctttggtaataacgtcgtcacaaggttttttaagtgttcattcaacttgagtgataacatgaatttcttgatgagattacatgttgaagcatgtgctaatggggccaaaatgaacgtgttatgtgttttaaggtattttgtgaatgacaatgttcgcgccaatcttatggctattttagtgggactaaactactaaagcatatgcttggctaattaatgtaatgagaatcgaaatgggttgaatcaaacataaatttatggccggctgttgaatcgaattgtttgtttaattatgtccgtcttggacttctgagagtgtctgtctacttctgtggctggccttggagacttggacccttgtaaattataaccattcatgaatatgggccgcatgacgattagtaaatgggtcggatcggaccattctattggaagaggtacaaggaaaatgatcaggcatactacatacattctccacaaacatggactaatcattctatgttccttctctaataaagctttcactgaattcatgattagtatgtaaaccatcgttgattacagttttataataattagacgttatatattgggagaatgtatgcatgcatgaaatatttcaaaaattcatatatagatcttgttgtatcctagctcgtttcacttttagtttgtagtttgtactaaacaaatactgaaatacacatgcatttctttcgctttatataaaaacatatacacatgctgcatgcacttcaatcatattgaaatctctaattggtacattttcgtacgatttgttgatatactggattcataggtaggtaagtggatttatttaaaaaggccaaatttagaagaaaaagaaaagaaaagagaattagaaggcaagatatatatatatatatatatatcttgcgcggttgcatggttaagcatcaaggcacaaagggacaacaacgacattctataaagaaaaaagacgaagcatcaaaaggggtctacggaaattcaacatggagtatggagcttaaagattttttcaataaacccatatagttttattatgcttttgtatgttagaaccttgaaaacgtgtggtgccaaataaggagaatagttttataacagtatttcttactttaatgtttatttaataaatttaattctgagttactttgctaaattttttattttatcgaattttaagatgagcgtgttaatatagttatacaagttttttccctttctattcatttatgtgacttttgtattcatgaaatttttaagatagaactacaatttgaacgtattaagtaagtgtcacaagctataaaagtttgcttgtggattaaagaattgtgcgaacattgatttagtcaaatcacctaccgacacggtcttatatttgagtcaattatacatcgttactaacctattatagactatagagagagagtcagattgatgtttttagttagatagagcatatttttacagtatttatacatcaaggctgatatcattttatgtgcgattttcaaaataatatatatatatatatataatatgattacaacaaaacttaaccattttaattaacaagattatttttgcttttaattaaatttgcttttgacatatgtcaaattgtcaatatcttgtacaattaaaattattaaatttcacttgctattaagtactaacatatgttaactagataagacccgcctaaataggcgggtgtaacatataactgtaattttttatcgataatatttaaattttaaatagtaaaataataatctatacattgttcttgatatataattttgaatagtaaaatagtattcttatgcattttattttattatacccattcaatcttattgatgatatttgaagtctaaatagtaacctacacactttttctttattataatttagtatttagaagaaaagaacaaatttttatcttacatattcaattttgtatacaatttaactatctattttataaaaaactcgattttaattctacacacttcatctcacttgataatgatttcatatcaaaataatatatatatgagatcaaatctatatcttagttaatattaaaaattattaacaattaacaaaacataatgttaataccatacatattaaaaatttgaccaataatatatataaatagttttagttaattttccttttggttaaaaaaaacaaaatgtaatattttttagatatagacatatgaattagtatatgttaataatgatttattttttagttttctatttttttaagaagaaaaaagttaattgatttcttttttagtatttctatttctttaaaaagaaaaaagttaattattttgttacacgtgtcaacatctgatcgatagacttgacacatggcataatcttatgagttaataattttaaaaaccatactttattatataagatacttatttagaaaatatctaaacacctagtgacaaaaattgatctaccaattccaagtaaaatgaatagtcaataatcttttagtcaatagtcattaagatattaacttatttatccaagaactagtccattaatcaatagtcattaactttgttactaacacttggacatcattaagcaagcccccatgagtggaccgcatatttgactaacgcaaacggcaaatcctagcagctccgtcatcataacagcgttaacaaacggcgtcccctgtcgaaagtctctctctttctcgcttctctgaaaaaattgggatcattttgataggagcgactctgttccttcgccgccgatacgcactcttcttcatcggatttgttcctctggtaagatttatccttctcttcacctttatgttcttcgatgatcgtattgattctatctgaattcaatctctcttgattttacaattgatcgaagtaaatcactgtttgatcttatcgaatctctggaatatacatatcgaatttgatactatcagatttgtggatacgattgttgatgaccttgttccagatccctagctcgtttgatatttcgtagtgttcctgatttgattcgtgaatttttcgtttttgaaaacatgatggatttgtgtttgtttctcgttttagaaaatttaggacttgttgagattagattgaacttaatcccattctttgatctctcgattgatattcaggtgggattgtagctctccatgtgttgtactagtgcctcttaggacaatgttttggagcttatagtcaaattctgtgaaaactttgaggtgggaattgtgagatcctgtatgatgaagatatccttgaattgcatatatggctttgttgattgatgttctcatctcttgccacctaagggttttgattcggccactgtatctgctaggggttcgcttctggaagaaatatgggtgagactctcatcaccaccctgtctatggagaactatcacccgtcaacactgctatccatggattcaggtgcttttactcatgaagaatcagagagggatatgaatgggtctctcatacttactggaccgcctgatattaatctaccactctcttctgaagctaggccatctctgcttttgtggaacgaacactgtgacatcttagacgttggacttggacctcagctatatgagcctgaggctgttgttcatgtgcctaaggttgctaagaagtacaacaagcgtgttgatagtgcatggggtgcttggcttttcttcagtttctacttcaaacctgttttggatgagaagtctaaaagtaagttaacgagggacagcaatggcttgtctgggtatgataaatctgatttgcagctcgactcgttcttggttcagcatgacatggagaatatgtacatgtgggtgttcaaggaaaagcctgaaaatgcccttggcaagatgcagctgcggagctacatgaacggacactcacgcgagggtgagcgtcctttcccttttagtgtggacaaaggttttgtccgctctcataggatgcagaggaaacattaccgtggtctctctaacccacagtgcctccatggaatcgaagttgtttattcacccaacctttctgtactcagcgaggatgaaaagaagaagtggacagaactcacaggtcgagatgtgaactttgctattccagctgaagctagtgattacggttcatggaggaatctcccaaacaccgaatttgaggctgagagacctcttcctctggctaaagctaacgggcacacccacctgaaaaagctgaatggtacctgtctaaacctgtctacacattccccagaccatgcagttgatacagtggaagttcaactcgctggtagcaataaacgcaaaagggattgtcttgctctaggaaactgcgatgactcgagctcaagtgagaaatctctggacatgaaaatccatgcaacggagctgccttggtcaaatgattttagcggggtgatgaagaatgtgtacggtccagtcacagccgcaaaaacgatatatgaagacgacagagggttcttgatagttatgagcctgccatttgttgattccggaagggtgaaagtgacatggaggaatacaccagcacatggaatagtgaagatatcatgtgtaagtacagcatgtgagccattcatcaagagacatgatagaacatttaagctaacagatccaacaccagagcattgcccaccgggggaatttgtccgcgaagtctccctgccgaacaggattccagatgacgccaagcttgaagcttaccgggacgaaacaggaacaacactagaggttttagtgcctaaacaccgaatgggaccagaggagcatgaggttcgcgtctgtctccgtccgttcgtgctagagtgagattgtagcgcataacttcttaaaagaattttattgttcatgtatcattggattattcatatttaatcatatttactccatttcattgtgttcttttaacctcttaattccttatttgttcatatgcttgaatttgtgttacgcaatatgtgacaacattcaatggaagactctttaacaaatgaaatcatttttttttttggacaacaacaaatgaaatcttacatctcatatatagaatatggaatcccactacaatttgtacggtttttcagataaactatattgaaataagaagaaaattttctttaatatgtataacaagagatcttggattcatattggatggttaattataaaatcaaagtgctaagatcatattccttaaaccatgaacttaacttctttcactttgtctactatatttcgtgtagagtattatgcccagtcgtctttcataggtcagagcgagttttaaaaacggtaaagctaaattcttaaagcatcaaaatgatcacacaccagtttcagagtgacatagaaagataaaactaagaacaagaaaccaactagaatctcaagcaaacagagtaaacaaaagccaaaaggcttaatcaacttcttcaatctttgggccagcaccgccgctaccaccagcaggtgtgtcgtcatccattcctcctgcaccacccatatcaggcccagctccttggtacattcttgcaataatagggttgcaaagagactcgagctccttcatcttatcctcgaactcatctgcctcagccagttgattcccatctaaccattcaatagcttggtcgattgcatcctcaatcttcttcttgtcagctgcgtcaagcttagatgcgatcttctcgtccttgatcgtgttcctcatgttgtatgcatagttctcgagagcgttctttgcatccaccttcttcttgtgttcttcatcctcagccttgtacttctctgcctcttgtaccatcttctcgatctcttcctttgataaccttcccttgtcgtttgtgattgtgatcttgttcttctgaccagtcgtcttgtcctcagccgacacattcaggataccattggcgtcgatgtcgaaacagacagtaatctgcggtacacctcgtggagcaggtggtataccactgagctcgaactttcccaaaaggttgttgtcctttgttcgtgccctctctccttcgtagacctggatcagtacaccgggctggttgtctgaataggtagagaatatctgctctttcttggtcggaattgtggtgttcctcggaatcaaaacagtcataacaccaccggcagtttccaaacccaaggacagaggagtgacatcaagaagtaacaagtcctggaccttctcattcccttcaccgctcaagattgcagcttgcacagctgctccgtaagcaacagcctcgtccgggttaatgcttttacagagctctttcccattgaagaagtcttgcaaaagctgctgcactttgggaatccttgtagagccaccaacaagaacaacatcatgaacactgctcttgtccatcttagcatccctcaaacacttctccactggctccatacacttcctaaacaaatccatgttgagctcctcgaacctagcacgagtgatggtagtgtagaaatcaataccctcaaaaagagagtcaatctctatagtcgtctgagcagtcgaagaaagagttctcttcgcccgctcacaagctgtcctaagcctcctcaaagctctcgggttcccagtaatatccttcttgttcttcctcttaaactcctgaacaaaatgattaaccatcctgttgtcgaagtcctcaccaccaagatgcgtgtcaccagcagttgccttgacttcaaagataccttcctcaatcgtaagcaaagacacatcaaaagtaccacctcccaaatcaaagatcaaaacattcttctcgccaacactcgacgccttcttgtcaagaccgtaagcaatagcagcagcagttggctcattgatgatacgcatcacgttgagaccagagataactccagcgtccttagtcgcttgacgctgagagtcgttgaaataagcaggaactgtaacgacagcgttcttaacaggagaaccaaggaaagcttctgcaatctcccgcatcttaataagaaccatcgacgagatttcctcagcagagaactgtttctcctctcccttgtggttaaccacaatcataggcttctcacctggaccggaaacaaccttaaaaggccagtgactcttatccgcttgaacagagggatcactgtatcttcttccgattagacgcttagcatctgcaaaaaaaacacaacaacaagtttaatacttacttcctcctaattaacaacaacatagagaacactaataaactctaacagatttctatctgcttgacacactaaaccggctctgtttcgatataaccaaaattgaataaccgattcataaaccaaaatcactatggaccgatctacacaaacttaatcacatgcaggaagcaaagcagatatagtaagtaagatgagaaggaagtgagatgtttaccgaagacggtgttggtagggttcatggcgacttgattcttggcagcatccccgatgagacgctcgctgtcagtgaaagcaacgtaggaaggagtggtgcggttgccttgatcgttggcgatgatttcgacgcggtcatgttgccaaacaccgacgcaagagtaggttgtaccgagatcgataccgatagctggaccttcacctttacccgccattattagagatcagaattgttcgccggaaagattaaaaatagaaagaattcgtctgtgagctttaagagaatttgtgagtgttgttgtgtttatgattgtgtgaggaagagaaggcagagaggtgtttgtttatatatgaatgaagagtgggtcggcaaagagctttcgagaacgttcacgagtaaagatctcagccgttggatcttatttttgcgccatctaattactattgtttcctttttattttgttatcgcttctagctccttcgagatgggtcttttttaaattgtcaaatagtaactcccgttttgaaaacaagttatttcatcacccaattaacatttttgttttttttgcacattttaaagataaaaaggaaattactttttctttagtcctcaattaattactagtatttcaatcgcgttaatgaaatatattatgaatttattattgattggatatatatatggggaaaaaaatagtttgacccaaataaatggtttatttaccaaattaactcataagatataagagataatctagttatttttatgaccaaaataaccaaa

SEQ ID NO: 1291 - DNA, 21200 bp, Arabidopsis thaliana
gatcttatttttgcgccatctaattactattgtttcctttttattttgttatcgcttctagctccttcgagatgggtcttttttaaattgtcaaatagtaactcccgttttgaaaacaagttatttcatcacccaattaacatttttgttttttttgcacattttaaagataaaaaggaaattactttttctttagtcctcaattaattactagtatttcaatcgcgttaatgaaatatattatgaatttattattgattggatatatatatggggaaaaaaatagtttgacccaaataaatggtttatttaccaaattaactcataagatataagagataatctagttatttttatgaccaaaataaccaaaaaatttacccaatttgactcaaaactttgtaaaaataactagaatgactcaaaactgaactagaatgactcctcgctttggtgtttgagatttttttttgcttaaagaaaaaaattcaaagtttcatcaaacattcgaacaacataattggagggaacatatatatgcacatgcatataaaattgagaagatgtgaaatggattaggaacatcttgaaaacattatcatctcaacaaagactgttattatctcttctcagtttgaaacacagataatactagtataaactaaaaagccttacatcattctaaaatatcatcactcaagtggcttcgtatttgggatcagcagttacgtagtgataagcaattaccaatgcgaagatgaagatgccaagaaagttggcaataaaccccaagtcctgatcatcgatcatctgcaccaaccaacacaaacaatacttgagcaacaattctttttgtagtaacagactaacagtaatggaatcagtgttgccttattgtatctaatcagttcagcaaaatgttcgaataaggatcccattagagtctctatcatctttggcgcagccagatttctactaaacttttcaatttcaccaaatacaaagtccacagaagagactacaagggtaacattgcaaagttgactccaaagtagagaaaccataatggcaaacaacaaggagcagctccctaaactcaactagagccagaggcagagccagacctaaattcgcttgatcactgctaaaagaacggattgatagtaataattaataaccaacaaaaaaaaagaccaaaaaaatgggatgatcccagtgggaatcgaacccacgacctttagattcggagtctaacgcgatatccactccgctatgggatcacattggagaacaagttgagaatttatgtaaaaacctaaaacgtgacacaatccgacaagagaatttggcagttctcgtcgacagagacggattcaaaggaccatcacacacagatggccgccacagagacaatctctatcgcgagaagaacagctaagagtctaagactaaccagatcataaatcaaacacacttgtcgtcgaatcagaagatcactcaagaagaaatgcatatatatacatagttttaaaattgagcgagatttaccgttttatcgggacggaatcggtgggaaaggatgagatctccagactccagggaccagaagcgatttgcagaacagaacaagtattggatctcactctcagggtttcgatgtctgagggtctttattttgcaggcctggcccaatagtagtatttaattactttttaacaattgatttatctgtggatcaaattggtaattgtatgtttctctcttgattttttgtttgtcaaattgattttaacaactgtaaacttcaactccttgtggcttctcagatcagatagtggcagccaaaataatgacaagaatttatattacaaacgcaccggttaggttcagtcacactaatcacataaccattttaaaagcaaaacattcgacacccaaaaggcccaaagcctctatctctagttctctacacaacacaatcctcctaattggttttgttcctgactgtacaaaagcagagctccaagaaaaataaaatttctagagctgcagcctaggttcatgatttgttttacacacacagctaagagaaaaaaaagcttcagtttgttagcccaaaaaatgacatgccggcaattatcagaaaccaacccactgtttctgtaagttccttaaagccgcaccattcccgcagaaaaaggagaaggcgggaccgagttatttcacatttctgttgatcccttcggcaactctttactatcaacacctttcttcagaaccttcagatctcaaccaaaattcaggaaggatttaatatcacaagagtgcaagatagccaaagtgatgtcacacacgtagccatatctgaattttgacttgccgactcccctgcttgctactttcagctacgagtccagtattctatgaattgtcattttctttcactaaattctcttccatctcttttcacggcaggaagcggataattagggtggtgctaaagtaactctctaagattctctgaaactgatgaacttacataagccatatataagaaactggaggcttatgagagccgcgagttcagagctcgtttgatagctgaagtataccacacatctgcagatatggattctctagcagtttctcattattgctctgcacaaaacaagaatacaatcaatgtggatcattattatacatgaaacaaaacaaagaaagctctttgattttgaggttctctttgatatttccggttctacgcatctacaccctgaattatgacgatagcaatacctgctgagccttaaagacaagcttctgaagcatgttttggtatttctctggttcctccgtcatcatcctctgaaataatccaaattttaaccggtgagccaaaaaatatttggaaacttattattctttcaatgatgtctttccaaaatcaaaatggtgaatttgaaaaatcctcttgccttcagaagaaatgctgaagagtaataagccacccttgaatcagtatcatccaggagttccctgcatagataaacataggttaatgccatgaaacatgttgcacagataaatcataaatcatctatggtttggaagcatggaaaagtcaatcaattacctaaagaactcctctccgccaacttcttgaaaagcaactgtatcggcggtgcatttaccaatcagaagtaatagcagggtggctcgaatatcagaggttgcccctggaatatttcctctacctttgcttccaacggcgacaccaagtgcaatgttgtcagttgctgcacctgctagttgaatcagtggccaataaaacaaagctgctggcacacgcgcaaccagctgcataggaacaatggcctgtccacgaagaagcatcgctgccattgacgctgtctcacacgttgaaacagagacgttattgtaccgaggcttggtgtcaccttcatccacactttctttatagctgttacgatgagaagtatcaaatttgctattcctatccgcagaattggggactgcatcctcgtcagtagacaaaactttcaagcacaattgcgagaaaagaatgtcacacatctgcttggaaacaacagagaaagacacaagtgaaatttaacttcatctgggtgaaaattccaataagaggtatagacagagttatcttctacgccaattattcgacatatagaacagcagttactatatatatcagcaagctttagagtggcttttggtaggatatttgacaaacagaaaggttctaaggaatgtacctttaagatgttaatccggtcagtttcatttatttgtgccatcaaagacaaagcactgctcattatgtctataacagcatttgctttctctagtcgtttgtctttatggtcctgagtagcaactccaccagttgatcgttgggtctcattctcgtctagtaagaacttggagcgcataagtagcctctccagaataaataggaaaccccatctgataacactgttccttgacttcaagagtccacataggagatgtatggaaataggtacatcagaagtaaccagagagtctgaggtaccacaatgggcaatcttttgttgcagatcttttatgctcagccatatacttccaccgctctcttcactaatttctgcaatcagaagatcccccaaccagatatacccattttgacggtatgtggtcctttctgaatgaagaagagagtgcaaagtagcccaagctagattcacggacatgcttatatcgtttcttaaatctaaaatgctttccatgaacttggaagatttggtaatctgtttgagatgcaggaactctttgtccaggtgagtaaacgaacctattattgtgtcaaacttttctgttatatttgccaaaagctgcaagaaggaaaaattaaagagttggaaaagagctttgactgacaagcaatttaagtttttttttccagatatcctcagaagatcatttgcaacatattctacaagtttaaacctacctggttaagtcgttcgctgttgctgaacccagacaatgctgcagcaattgatcttcgcaggatttctcctatgccttcaacaccaagcttaacagaaatgtagaaagcttcaggtgcatcagcaagagcaagccgaacagccaaaggttgaatctcatcatcagtgtactcagaaagaccagcagatgagcatgcctcattaatttgatgcagcacatagtcaaataaaaccgagtagagatttcttctttcctctctagtggttgccaaagagtactgtaccaataaaatgaatcccttaatatgctagaaaaccattggggatcgaagtgtctatttggataatgtttagaaagatcattcagtctaataaactatattttcttagtacctcaaagaaaatgtattctacaccaccaatcagatcgacctggtcgataagaaaatttgaggcacttgaaattgctttgttagagccttctggttctggagattgataaaacatattcgtcatgatacaaataagcttggaatgaacaacttctgaccaagaattccttttgctagttcccagaagagcttttataacctgattcaaggaaagtaactggctcatcagcaagtacaacttggctgagaaatggtaacatgcagctggaaacagaaatcatagttacgaaggtctaaaaacaaagagaaaggacagatccaaatgaaaataggaggagaattaaagaaggaataatccacatagcagagggcaaagattatattcagcctcgtaatactaacgtacccttatgtcaagaccatttagctggtttctccgtattttgcctctatcacagataaaatagagcaagcagctgagggcagaggcccaaacacattcttccttttcctcaacctacgtaaacaattttgaaggtataaaatcccaaacaagtctagtgtagacgtcaagcaaagaagcaagaagagagtaaaacacctgaactaggagaagaagtatttcaaataagatttttaatatccaagactcaaagttctcaatagccgaagaagtgcttgacatcttaggcaagtcttttgttcttgtcccttgtagcagaagcctattttcattgtcgatatatgtttcttgggcataatcttcttcaatggtagtcgcattatcacttatcattggctctaacaattgtgcatgaactcctaaattaagaattaaatcaaatacacgaatcctacaaggtgcttttgtggagcatagcatttcctgaaatacatttgcatgcatggctagaaaagttagtagcagtataaatatcatgaaaatatatctgagtgtcgaaagtcacacctcgagcatggataaagtaagaggagcagcaattctagcgtccaatacatacctaaaaaacaggttttgcaaaacggttgtgccataagcttgtcaacagttataaaggaagaatgattaaaaatcttaattaacatactacataagataagataacatattataaaacaaagagcttacatgtcgataacaagcttaattaggacgctcacagccacatccatcgacggctttccagtcttgctcgttaattggggtgatacagtcatttgatttgaaggggtggatgatgcctcagaacaaacagcagcgatcacttcacctacctcggcagggtttaggcgcagtggttgttgttcactgcaaaatcatgcaggaaggagagtgatttgttgttatgaaggtcaaagctaaaattgtgcatcagaaagatgctccaatgcagagaatcccctttcactcgcaacagatacagttatttatgcaaacgaggtgattaaacatccacatacacaatagtggaagagccactgaaaccacttatataagttagagtgaaataaaatataggtcgtatggagtttattcaattgcagttctttgtcagtttacataccgatgtgatacttagaaaggctagcattaggcattatggtaaatgttcaaaagggcaatcgtattgcaagctattaagtaaaaccttataaacattaaagctattaagatagacacagccaaaaaaaaatgagtgacattaaggaaatggagaaaacaatacctgtaatgacgatactgaaaaagcggtctggcacgtggacgaaatgtatttacagtggaatcatccctgcagatcatgcaaatcttcagtttaagaactcacattaactttcaaaatagatttttatgctttaatataagaatttgcacaaaagatcattctcattaggtacaatcatttcaaagtgcagtccctgtatcgattctaaattgcaccatttatgtgaaaaatctggaaatgacattctataagtggtagaacagtctctaacaatgcagaagggatcatcagcttttttctaatttccaaaacataaaagaacaagatgctatatgcaccaacacccagtgccattttagaaactgcccttagttaaaaaatgaaatccatattttttgcgtctactgctttaacacaattaacagatggcatctgatctagaggaaataattataagtttaacacttattcaaaatctaggagtccagtttcttggtggctaaaaaaaagccatgataaaacttacaaggcataaaaggcaagtataatcctaagccatcactttgcaaaatacttcagaaaaccacactagaatacataccagatctgctgagggccagccctggtgcgtttggaagctgtaattgctctcaagtgggagcgagctgaggctgagtttgttatcatcgtgactgaagctggctgcagcagttgttctaaataaggcatctctgcggtaccaaaatatttccagtgctgacccttcattttggcttccatatctcctacaagcaggccagcagcaccaacttccagaagattacaattgttcatgtcttggagattaacagggcgttcgctaagcatgcagagaaaatgttcaccgatagtcaagtactatagccatgcaatgaaggaattgcttaagatatgtattgaatgagtgtttgtttacgaaagtacaggagtgtacagtcaagaaaggaagcaaagatgcgtttgaacatttgtaggaaccgaaatcatgtacaatgtacctttcagaagaagctgatgataactgtagctccccaacccaacgccaattcagcaagtctgacgatatgtattcagtgtcttccatagcattaatttcttgtatatttgacaagtttgaaacagacagatttgcagcatcctttttctgtggagattctgcggcatttgctggacttaattgagaattgaatgatttgctcaacaaagaagatagagatggcaataactgtcttgacgcaagagtagctcctgcaaatgctgcaggttgaaaggatcgccttgggatatgtaaagccacaagggaacgcacataatgcaatgatttcaccagagctgcagaagcaaaactggacactggtaaaggagaagcacccgctggtgctgataaaacaggcaatgatttttgcttcaagctagcatcgcactcagcaatcaggttcacgcaaaatttatcgacctgcagaagtgtctcctcgccaggcttatatctgtagtgtaagaacaccttgggatcattattatgtaagatgtaatccatggaaaacatcggaagacatgtatacatattacagacaaacctcaaaatatagaaaaaatgcacattttatctctaggtttgaacaaccattatgttagcgttccccacaaacagagcacaaaattatgcttatcgtgagacagacgtacttaggacattgacaagtgaagagatgctagttcaaagaagtaaatgaaaacaattaagttacatccttcaattagaaattttaccttaagatataccgtttcagtagagccacacacctcgtaaccacagctgggctgcagaaaattgattgaacattagcaacaactaatatttaatccgtgctacttgagaaatatttagattatagcaatctgcatcctagctaaatcaggttatattcaacaatatgtccacctagcaataagccctcaagtactttaatagtcaacctgggctgatgatatatctataaagggacttttccgactttgtttgctttctgctaggagtccttccccacacaggcacacacttctacctaagacatctgttcagattatcatatattctacaaatacctttgattattattcttcatagttaatacaggtttcactatcagacttgcaagtgttaccaaagaaccaaaaatacatgtagccagtccaaactatgattcaaaaaagagtcaaagcttcacagtatgatgaaaaacatatgaagtacggatcaattacctgcgatctctctctgctatagtatgctctaacagcatgttgtaggccaggtcagtcgtggcagaggctgatagataatcctgtgatcatcaagcgattgtgtgagttcatgcaatgccctaaagacggagatcaaatatgtcccgtcaactaccaaggtcctaatacaatagataatgaaaacgggcttctccatcacatatctctctatccacatgaggcttcaaatgcaatggctactagaacaaaaggagtaatgtgtgggatattagcacaaaggtcttcacaaaactaaaacatggaaactaatagtactgatagaatagaaaattttcagctctaaaaatcaatcacgacgccaacactactcaaagaaagcgcaaatgtagacactgctctcttcatataccaatggaaatcaaaagccctagatactcaattcctctctttacacaatcatagaagatgatcaatttacctctaattaaacgcaaaaatggaaacacatggacgagagataatcccatttcacaataaggaaaataaagcaagcatagcgtaagtgttacacacccggagattcctgagagcttcagagggagccatggaagggatcgcgccatggtgcgaattaaccggaggaggagaggatgagaggcagtccgcaacggctcgacgaagtggctcaggcggcttcttggaggaagaagatctaagacgcgaggcagagccggcagcgcctagctgcagcaaccgggagcttccggggctttgaccggggctataagtagaagacatgaatcacaaatctcgccggagctgcgccactattgctgggaggagtaaaagactttttcgatttggggaatgttgctgctggctaacgttgtgtccttcacatcacacatcagatgagctgtcaaagcttcttcgttttgaatcccatggtggaatctaaatcacggagacatgttttttgcaatctcatcccccttgttctattatttcctagatacagcatcatatcttcatttagtactatataggtccataacatgtagggattgtcctatgttacaattggatttgagagaaaacggttcattcatacaatattatgttctgctcttacaattcagacatgaattatactaccgtacaaattcatgtatgtgctactataattggtcaattcatacagtatctaatgaattttatgctagaatctaaaatactgttcgactgtaacggtgttaaattaaggtgtaagcggttgattgaaagttaatggctcggatggcatgttagcccatagactatagagtaagagtagtagctgagctaacgtaaatacaaaatctttggagaatagaaagttcatctcaaatatccgaaactcgttaagattggttgttagatgtatcacttgaaatgcctaaaaaaaaatgtttgagtcttgataagctcacgaaccaatattaaaagtgggcccattaaaccgaaaaacaaaagaatgggcccaataagatgtcccataacccacgtgacatgctgactgtgccgatccgttcatcacgctcacggtttgctccttcccccaatggcccgaataaaagaaaatttattattacattttgtttttcgtcttctctgttctttgttgacccacccaacaaccaaaaaaaataaatacaaatctgtatctgcgtctttgatcctaaatagctatagacagacacacccaaaccctagatctaaccccagccgtcagatcagattgatcgggcaatcgcttctagaccgttggaatcaagcaatggtagaggtagaatcgtatttgtgggtatctagaagaggcgttaggattgtctccaagctgggtgttttttcatcttgatggccaactaatcgaatctcctactctaaagatatttttgtttatttctgtcatgtgtgatttggtcgcgcgtacgggtcgtctccagcagcggtacgaggatggctctcgtctcgtcgccgggtaccgtttttttatccatccttgttcctttttctttttattatgtctgcgtttgtatcgcctctttgaagctgacgttttggtttatgtaatgtgaatctttctcctttattcgaaaattgtggatgcgattgattataatgggtgtaactgttgggaatttgttttcatggatctctacgtatccctgtattgaagtgattgctttgatttattttgttatctgcttcgtgattaattgggcatttttttgtgttgaggtgttatgtctgtaattgcaaaacaagagtcacgtcaccttatcgaatcatgtttgaagatttttttgttttagagtcatgttttgaaaagaggattttgacatgtttagacttgttttgattgtatctgatcttggttgatgaccatgtctctttaattttgttttttggagatgatggaccttgcttaacaagttcaatgtcgggcatttataggtgtattccgtttaggtatgtaaattctgacaaagatggtaattctgaatctgggaaagtgattcaagtgttgatgatcagctcgtctagtggacctggacttttgtttcccaaggtacaaagcaaacgctgtttcttcttgcttttgcctttgtttggaaacaaagtaacatatccgatgattcatatagggaggatgggagaatgatgagacagtcagggaggctgcagcgagggaagcagtggaagaagcaggagtccgtgggattcttatggtaaaacccttcacgcataccgtgtaagtgcagccctttgttatttgtttaagcctggtgctgagaatgtcgaaaattttggaactttgcaggattttttggggaattatgagttcaagagcaaatcacaccaagatgagtttagcccagaaggtttatgtaaagcggcaatgtacgcgttgtatgtgaaagaagagctagcgacgtggccggaacatgagacgagaacacgtaaatggctgacaattgaagaagcggtagagagttgcaggcacccttggatgaaggacgcattggtggaaggattctgtaaatggcataaggagaagatggttaaaggagaggagataactggtgaacattgaagcaaatgtgcataaacctctgagcgttggtttcattcctttcgattttgtttttacctttttgtttttgtttttgaagtcttatgcatggataatctcttgtgactgcgaaacgtaatagtttcgaagatttaaagttcaattattgccctattttcacatagctgtcttcaccattttcaataattatggaaaatgacagctcttgagccttgacaatagcgatttataatagtgggttgagaaaatgttatctttcttgtgaaagaaattatttgtttgtaaactcagttttcatatttctattaagcggtattaacatgattcatatctcatatataactttgctatccttaagaaaatttgtgagaatcagaatggtatgggcattgtgtcggaatgtgaagtcatggccatttctagatcttgaaattaaattctataacattgcttttgattttacatccggattcattgtacatagaccgcaaaccatattggatcggtgtacctgtccgttgccagtaacatatcttagctttagaaactaaaatctgaaagacgaagaaatgaaaagcaaaatatcacaagtttgatacaacgaacaagagcaacagcaaaaagaataacccggttcagtaaaaccagaaaccatatccttgttattaacatgacgtcgtcaaagggccaccgcagagacattggttgtcactaaacgacgtagcttcaaggtgatcaaaaggaaaacccgttggaatacgcccacaaagcttgttatggctaatatccaaatgtcccacaaacttagctgacgacaacgaatccgggatccgacccgatagactattgtgtgacagatcaagcgaaactaaatacgtttttgacccgaaaacgtcgggtatagttccttccaacgcatttcggctcaaattggcaacatctaaaccggaattgctaagaagcgaaccggggattggaccggttaacgaattgcaatcgagattcaaaagtgagagtaccttcatgttacccatccattcgggtatcggaccttcgatatggtttttggatagatccagatccgctaaccgttccatacccgagatcgactctggaattgacccggttagttcgttacggcccagtaaaactctgctcaacatcttcaacgatccgaaatcggccgggatcacgccggtgattccattttccgtcaattcaagatgcttcaactcgatgagtgacgtcagtgacgccggaatctcgccggacatttgattctcggcgaggtttaaaacagcgagtttcgagagtttgccgatttccgcgggaatctccccggtgatcttgttgccggcgagatcgaggatacggagcgaagctagggaagtaatgcacggaggaatctctccggtgattcctttccagtcggcgagaacgagggaagtgagtgcggttaagtcacaaactgctggatcaatcgaaccggacatataaccggaccggcctgccttttggaaaatggcgtcttcagattctccccggagagaaatatcagtgacccgacccgaatcaggatcgcagctgataccgtaccattccttgcaacaatcagtgttttcagaccaagtgttgaagataccgaggtttggttcgctcagtgacgacttgaaagcattgagagccgtctgatctttaggagagcagcatctgacgacggagatgacggaaatgaaaacgacggcgagtaatgaactaaacggcgatgccaacaactttctcatttttaaaagaaatgtttgatatagagtggtgttgtgtaatgagtctttggattatatagaaacgtagaaaaggagagagagacatttgcatgtgcatggtatcatgggcatgtgcatgttactactattgttctatatattatcttacgaatgtattcttataccctttaatctattgtactaaagatgagtatcatgtgtgtatgtcagttttactttttaaaaaaatatttgattaatcgagtatccaaccatgatccggcaatatataagttaatcatgttgatttgtttcaacggtaaggatatatgttttgattttcatggacatttaactaatgcaaagagataatttacatggacattgaagtaatgcatattcttagacgtatttatacatagctctatgatcaataatgcacggattatggagcatggacttgctatttcctaagttttttttgccatattacagcaatgattatgatttcaagtttactgaaacgccaaaacttcacatcaataaaagcttagtatgactaattatgattgataatttaccaattattagagacagcatttaataaaccaaatatggttggtcctccataaatacttttacatgtgactcatgtggtcctactacagaactacagaagcatttaactaagcatctctctgtccaaagtccaaactttgatttttttgttttccttccctaatttcttatcccaaacgtatcgttgttaaaaatccttacatttgatttaattagtttaattataatatttgacatataacatttgtttctaactaattcacatataatcttgttgaagaaataatattatgatcaaaatcattagagcttattccagcatttatgattttcagtcgcgttgtcttggttaggacatgattcaacgcccatcacatgctcaggggtcaagatcccatttcctggagctgtctttatttatttattttagtattagtaaaaaatttccatgtccttgctcataaccaaaacataatttcaatcataacaacaatatacagtaatccatttgtaaaatgttagttttgtcgccatatctccaaatgaattcaaattcgatgaaatgcatgtgcgaacatatggatcattagattattttgttttcatttcgatttactattgcgtgaattattcgtgatctttcaaggtcttttagataactattctaaatattttggaactatagtcggatgatttttttactgagaactgtagtcaattatatttaaggtaactttaatttgtgactgacaagatcttttgaattcttaggccatgaaaagcaatgttgttttgtctttgacataaaagacgaacttgtagcagtatcggtctctactgcatcaattacacattcgcttatgtttttgtatatacactaaaaatgacaacataagcaaaaagtggtagatggaggtagtcagtagtagaaatctttccaacaagtgatatctctttatattatccataataaactcagtttgccaaaagacctatacattggatttcaactcttcatttttttttgggatgaataaaaaacagagttaagaggaaatttttatatatagagaaaaaaaaaaagaaggaacttgaattgcgttttgcaatgtgtttttatatatagtggataatgtatatataagatatatatagatgtggtgagagtagagtcaagtagaaggtccagctaaatcaccaccacctgagatggagaggagaggtcggcgtgaggtactgcgactgacgagatgtgaatcaagaaacacaactatgactgttatatcatcatgaaaatgtctccgcactcctctatcgatcttttttagatccgaatatctcatctctctcttctttgctgcctctcttagagctgtttttatgagcttccttgcaatcccctgcatacccacatgttctcaatcaatctttctatctatttgcacataaaacgagagagagtaagaaagagcaagtggcaatcttacattgcgcgggcatgtgttcacaatgtcaacagcttcttgattggacaagtgctcccacaagccgtctgatgcaaatataagaaactgatcttctggatggattttgtgtactgtaattgccggctctgctctaaggatgggcttatggaaaacctcagggaccctgaactttgccaacaatggttcccggttgaattctgctttctttaagtatgcatcaccaatcgaccgtgaaaccttcaagaaccagccacgggttatatctagcgaaaaatcctcttcttatacatgcatagggcttacttagttgtatctttcacagtcaagctacttgcaagaaaagagtctagaagtcagcaactcgcattaccgtgaaagtatttttacctgtataatacctttgacacgccaaactttgtgcttcaagaccacaatctgaggatcatttggatgcaacgagcgcaactcctctctcacagattcaagacttgcattatgctcagacgataactgaacggccttgacaattttaaacgctttttccagtcttcctagcacaacccgagaatctccagcgtttgcaatatacaacaatccactacatatgatccctaccagacaacaagctccaacagaagcaatctgtggtttaatctgccactgccgccggacaagagaaagaaaatcttcttccgtagctaaaaacgctttagttataacattggcagacattccatgattctctgatgtaaactctgcaatcagaaaatgtcaccaacttagaacatagatagtcccaaacacacacatatcaaatataacaaaaaagaaggaaacaacgtactcctgatgttgtcgaagaggtgtttattaacgaaacgggcagcttcaggaccaccatgaccatcataaacaccaacaaaagtagcttgaggaccagaatcaaacatactaacaggtccagactcaagcttgctatgatcttcgagaagattattagcttgaataacagacatagagaactctccagcaacatggttaccagaatctttataccaaagaagaccatcacatcgaccattagcgtctctagtagaatgatctcctttaacagaaggtcgcctccaacatggtgctaccatccgcaatatagttgccgatgataccataactcacataatcccctcaataatcaaaatttctttacttcatctaaaagatcactaacacccccaaaaaaacggaatcaaatcaaaatttgcttattcctccttccctaaacaatacaccaatacgaatgcatcaatacacatttgtcgcgcatatacaattacgaattttcttcaaggatcgagatcaattaccttaaaaaaaaaaagccgcgaaatgatttaccgttcggacaaaacaaaagtgaaaattggatcgagatcggaagcaggagttacgataagaaggaatcgtaactccggttgggattacagagaggaagagagatgacgagagagaaagaaaacaaatctagcaggcgactctgtcagaattccttatttgggggttcgatttctcttatttttctctctttttttttttcttttttttttgatgcttttttgttgtcatttggttttcgagtttagctgtttaggcattgacctcagaaacaacccgacgttttaggcagctttttctcccatagttagctacgtttctccatttttcaagattactaattttattaaaatattactataataaatagatttttatttacattttccataatctgaatgaaatcaaatatatgcaaatatcaaaagtatcacctgatcaccaattcctagttttgtccaatgatactgatgattcatcagccgattgattgaaggaacaaatttgaagttttccactgctagttgaattatggttagttcatttgacttatcaaaatcaaatgactaaaatattcgaattttcttacatgctgtagagattaatttcaattttaattcatcatcccattatctatataagaaaaaagtagaaacatttcgcgaaatacaatccaccttctgggttgttgtcttgttgaatatggtcaggaaaataagaccattaaagcttcaacctccaagccaaagagcaaataaaatactactgattaacgcaaaaacatggaaaaaaaataaagtctgcaaattggcatgttgacatgttgtacgcgtagctttacaacctcacaggtcgttttttttgtgtgacagttttaacccccaaaatctctttctttttgtttttccctaaagtaaaaaataaaaatctaacatgtccgaagtcgaaccaaacataaacatacaggtgttcgaaactagttaacacaataacacctctagatatatatatgattatggtattacttttctttggtgatttttttgttgggagagaaacataaataaacaagttggcccatattccagcgattttcctcacccttctttgatatctcagtttataaaagtcatgatactaataaattagagtatactcaaagaaaaatcagaaaatacacccaaaaaagcaaaaatgtgagaaagagaaacatgttgttgtccgctgtatggcgtcataagccattctagaatcattgaaatgcatatttaatcctctctggtaattccaaaaaagcgatgagggtattaacgtaaatccaccagaagacgagaaagtggggatggtggaaggagagatgataagagagatggaaacgcgtctctctatgaggcccatattccattcttacctctctctacctctctatctctctctcctcataatcgatccgtaaactcgccggaggagcagggagattcaataagacgatggctcagagaacggagaaggaagagaccgagttcaaagttctcgaaaccttgacgacaacaacaacgacgttatgtaccaataactgcggcgttacagcgaatcctgcgacgaacaacatgtgtcagaaatgtttcaacgcatctctcgtctcggcggccgcaggtgttgttgaatcaggttcgatcttgaagagatcggctagatctgtcaatcttcgttcgtcaccagctaaagtcgtgattcgtccaagagagatcgatgcggtgaagaagagagatcaacagatcgtaaaccgatgttctggttgtcggaagaaagttgggttgaccggattcaggtgccgatgcggtgagcttttctgctcagagcaccgttactccgatcgtcatgattgtagctacgactacaaaaccgctggtcgtgaggcgatcgctagagaaaatccggtggtcaaggctgcgaaaatggtcaaagtttaaaaaattaaaaattcgatctcaaccgttgaaaaacttgtggtggttcaaaagctccgatcggaagagagattggtcggagagacatggatttgatttggtgatgtgttgtaaaagaagatcagagagattattcctctcctcaaatcaaaatctgaacctcaatttttttttttacgtttttttttcatcttttaatttatatattagtgaatgattattaatattattattgtgtggcttacggattcatgaatttgcttcttgatcatcgagaaatggtgtatgtaagagacgaaggggttgtttggtaatttaggaacatgtctttctggtttcgtttcgtttcgtgtggtagatgtacttatcacgatactactagtccattgtgcgtcacaactcacaaagccaatttctatcagacaagtttgcttggcgtataaaatagcaaagccaataacgtgtttgagtttgtatgggttatcatcttcttgtgttccattatttttatagatttgtatattttaaagcataacatattaaactatacattagacttttgttttcttttaataatattaacatgagcttactcattctacgagttttttatgtgaattattttcaacgcatacaaaaatatcttgcatatatcttaaaagtccaacaaaatactgttctttcatgcaactatcattgtagccagactatagttatatctacttaataaaatgtgtaaaaaagtaagttcattgggacaattttcaattgtcatctaaaaattgcaacaaaatactgtactttcatgcaactatgattatttataactctagtcagaaaaaaaaaactgacggaaaaaaaaaaaagtcagaaaaaaaaactaaaagttggagcacctaattaggcccaacccaatagtgaaaatataaatgtgttgttttaaattgaaacacaaaacgcaccgtttataattaaaagaaattcagagaggcttttcatatctaatttgttccgtcccttagacattaatcaggatttcaatcgtctgggttgctgctttctggatttctccgacagaaacccaaaccctagtaccaccaccttgaagctccttaattctatccgttctcgaattgaatcgtgcataggttagggttttagtggcgtgtatatatatattccaatttgttgattccttgggctctctcattgcggtggcaacaagttaaggtctttgataataatctcgtaaaggaattttcagtgaagatgggaagcgccgatctagtcgatgatcggacctttaacggtgatttcagtgtggaaggagttgctaagttgaaagagatggtcaaggataaactcaaggagtatatgggcgattacacggatgacattcttgtggtacgattttatcgattctccatctttttcagaaaattggaatatccgcttttggggtttattattcgtgttccttgtagctagaattgctgagttttggaattgaactttagttgttcttattgtggtgctaagaagtctctttagaattcaaatgacaacaaagtcttttgcttgcaggaatatgtgatcgtcttgcttagaaatgggagaagaaaagaggaagcaaataatgaattgaagatatttcttggagatgatagcgactcttttgtggcctggtatttatatatttcttatctttgtgtaacaaagtttattgcttttttagaaattcatattcactaggaggatatatgcaggttgtgggatcatctggctgaaagtgtagatgagtactttagttctaatgtggagggaactaccataaaaagctcattgataagcagtcatgaggataaagcacttgttcctctggattctgaatatgataagggac

SEQ ID NO: 1292 - DNA, 7141 bp, Arabidopsis thaliana
ggcatctgaatcaacaaagagcttgaatcaaggaaggaaatatagaacacaagtttagaagtaaaagaacataaaccacaatgacctgtgtaacttgaagcaaagttcttccgtccagtccggccccttccttgtgtatttggcactaaattctacaacaggtaatacacataaaggcataagagaaacgagatgatgtaagctaaacagagaactcaagaccacacttaaaatgcaaagtaaggattcaaaagaacataggaaagctacctctttctttctctcccgtttgcttctcacctcatgaaatgtatctgaaagatcagtaataatatatgagtacatgtctgctatcaaagtacatgattatgttgatcttgaaacagtagacagaatcaaaacttaacccagatgcccaatctcaatcaaagctaaacagaaattccctttccacattccagctagattggtaaagatttaaaacgacagtttcttagtcatgaacccaaattctacatattccatttcagtaaaaaagattccttatttgaacatccccagacatattataccaattagaaatctaaataaacaaaacataagattctaagcataacacacagattctaagacaagaccaaaatcgacaaagggcattaaatagcaaaatccaaaacaaaaccctaggagaagcacacgctcaatacaacaaaaaggaagtaaaaacactaaaacaaaaacaaatgctgaagctttctcagtaaaacaacctaaatagagaagcttctgagtggtctcatgtggatcactgaaacactccttaaagacagagaagatatcctcgtcggaatgttgtttaccggtaacctctctgatgttttgaatggtttgaagcagatcagccggaatagaaaccctagagccgccatcgccgctgatcctgctcatgttggttacagagagaaagagaagcggagggaggaggagagaggaaatatgggttgaacataaagacttcgtatatagtactattatttatttccgtacaatctaccgcttaatgtctctctctacgtatatttatacgctgacgtcactgtttatcaatttcctcctcattatttgattgagtactattatttatttccgtacaatctaccgcttaatgtctctctctacgtatatttatacgctgacgtcactgtttatcgatttcctcctcattatttgattgttttgtacgcgtttaatggaaggagagacaacaaagttgatatggccgagttggtctaaggcgccagattaaggttctggtccgaaagggcgtgggttcaaatcccactgtcaacaatttactttttttttttttgtctttttacaagaataggaaaaatagacagctgtgtaaaaaaatattaactttgttttgtttccacaagtcgatgtccaaatttaagaatatatatatattacacgatttagctatctcctctaattagatgaagagacatcagatcttatcaaaaccctagctttcggtgtctctctcgatcctttagctcaatcgaaaactgaatttaggagctgcgatgggttccagatctcgtaatgataatttccagtccggcgatggcgctagtcctgggtacgtttacttctcctacctcttgcatgtttgattccacaggattaagggaaatatctcataatctgttggctttgtaactctttttatattgttggttaaggtttaatttatgttttgcttggaatttttgtgttgcaggaaaatattcattggaggattgcacaaagacacgactaatagtaagtttcttcctcttgttttgttctagaaattgcgtttctaagttttgttatgttatggattcttgtgtgtgtttctgatgttagacctgttggaatgttgattctacttgctcactttggttttgattgcagctgtgttcaataagcactttggcaagtacggggagattacagattctgtcattatgcgagatcgacatactggacaacctaggggtttcggtttcatcaccttcgctgacccttctgttgttgacaaagttatcgaagatactcatgtcatcaatggcaaacaggtcggccacttctcttttcttccttcactagcttatagtgttcatttttagtagggtgttgggtcttgatcaatacttttttccttgttttgatggaacaggttgagatcaaaaggactattccgaaaggtgctggtggcaatcagtcaaaggacatcaaaacaaagaagattttcgttggtggtataccctcaacggttacagaaggtagacctccctcttggcatgatatttttttgctttccatgagaatgctggtttcctgtccttattgaagttggtttctttttctgttgatcagatgaacttaaggacttctttgccaagtatgggaacgtggtggagcaccaggttattcgagaccatgaaacaaacaggtccagaggttttggttttgtaatttttgatagcgaagaagtcgtagatgaattattgtccaaaggaaacatgatcgatatggcagacactcaggtaagcttgtacaaatggggattagaattttggttcatgatgacatatttatcttggtttcaatttgatattttctccttgttcctttcattatacacgtttaacttagttagaattctacccactagcttaccaaatgtaaggagcttgtcacagtaagataggaaatccctgctatagtttgggtccttagcatagctaggttaattaagttgctttgttgtaggtggagatcaagaaagctgaaccaaagaaatctctaaaccgttcacctccttcttacggtagtcaccctagaggtcgttcttctaacgatagttatgcaagttatggtggaccttacggaggttttgatggagggtatggtcatcctccaggtcccattaggtcacatggaggtcctgctagtagatatgctgggggatatgggtatggtcgtggcagtgtaggccctgaatttggaggaggttataataattatgggggtggtagtttaggaggttaccggaatgaaccaccccttggctattctagtcgttttggaccctatgggagtgggtttggtggtgagggatatggccgtggaggagaaggagcctatttgggatatcctcgtggaggaggggaaggctatgggggatatggtgggcctggttacggcggtgcatatgaatctggtggcccaggtggcagttatgaaggagcaggtggtccatatgggaggggttatagtagcagtagtcgataccatccgtatgcaaggtagggtcgaggtaatagcaatcagttggagctatagaagcttctctcacaggttcctctagattgttccaattgctctaggtgcattctagagttatcatgtagcgccaacatcaggaagggttgctaaggacaggaagagcatcaaaaagcttttattagtcatcttttagttgtgtgtttacctaatttaagtgttgtcttatctctataacttagattgtgttatgtagactttagcatatttgggcttggagtttgtttctcactggcacaagaatgatttatcatttggtagtcttgttagatgatcaattactcgcttagcttagttttcacaatcatacgaattagcttaagaagctctgcaaaatgtgcactcatctattctttagagctcaagttgaatgctttatgtggtctcttgtatctctgtacattttgttgtgctgaacaaaggtttgacggcagttagtgcatgtgtaagtaggcatatttttgtcagctgcatacgtaggttctagctacaaattggaattgtatgtgtttgaaaacgtaaaatcaattataaatgtttttgaaaatcatctatacaagcatggttatttggttcttgtttccttattttttcgggtaagggccacggataattggttagacattggttctaataatgtgggttttgttatctgtaatttctcgtcaaaatgatgtactgtatcattaaatgaatatcacttattgtacatgcttttataagttaattgaaatccaaactcttttacgttttaagtgcaaggattgaatgatacaaacagcaaagagacaattctaagacaaagttttcaaaaatttatgacgacgaatgtgtcacacgtacgacacattaaaaagagttgacaaaaatacataatacataaaaggtctacccaatcatagttgataatcttaattagtgattaaaacgaaggtgtaaagtgtaaacatgattttaatctcaatgctttaaggccgatcttagcagtagagtaaagtgtaaacgaacgtattgtttttacacctagaattttaagttctgaaatccattctatctatttttgaaatgcaaaaacgattttccaaaatctccatatattttgtttggtcgattccaaatctctctatttaattgacgattttactgcaaagaaaacgacaacctcggatattcagaaccgcaaagaaaggacacaaaggaaaatcactatttttagatacataatgtttacattaacttctcttttataactctacaaatctttttttctttcaccagtttcacaattccgactattttttagagttttctctattcgtaaaaaggtagagaaagaaacacagaagaaggggaaggaaaaagaaaaaacacaaatggaagggaaagaggaagaagcaaagaggaggatgatgatgaagatcaaacttaaggagacagaagcagacgtaagccaagacgacattaaaagacaagaagcttacaacatgtctccacgcgtacgtcgtggtggtggtggtggcggtggctcggtaggtatgagcaagtcatcgagcgtgaggcaaaactgtttatgcgcaccaactacacaccctggctccttcaggtgccgttaccaccgtcgtaacgctggactcgggatgtctcgtggcacatccgttccctctaacctttccatgttggctggtggagactctaattctcccaagtgatgattaatatatattatgtgtttcttctcatcaatttaaaattctcgtatgtgtctgtgtatatacaaaaatgcataagtcgagaaatctctggatattcactttgctgtttgcacaaatgaaataaattcaaatgatcgtgatttttgtttgcatcggttaaaagtacaaaatgcgccaagacccgcctagacgagaatgctagagaacaaatcataaaccatatagttcagccggcaaggttggatttgtacaacgtctatgagcacctagtcggcgctactcggtcgttttaaacattgtgtttggacatatggagaaattgagtttccaaatcttgtcactcaatacaagtcacgttagggaataggattaagggaacaaattatagtattacgttagcattgggaaatggtaaaatgatattttcttgatttagctttgtctatatgtcaccaacactagctctgtaataaatttacataaaggtaagattagagaatctaaaacaaatgtatcacagaagaaattgtaaaaaatgtgagacgagaaagcaattgaggttcaggtagtgggtcgtgtccaactggtttgagatgtactcgtattcccatagtaaacttttttggtagattcgtcccaatatgcctacaagagagatagtcaagtgacaatgttttagcaactgcgtactcatttacaaatcaaacgctagtggaatggtgaaacttaatacctgccattccgacgggagatttgctgagagttttgttagatcaggtttttgctgcttttcggggtctttcttctgagacttctcagctcgttctctcttccgtttcactttctcacgcctaatcacatcatacaaccagatttaactaattaaatcatgttttactgggagaggagataaataaatgttggcattacagagagagtaactaaccagtcaccacccaggggttggaaatttgcgttgtctttagcctctccacttgcgatttgtcgagatttccattcttcgatttctcgttttctttttctatctaggatttcggaatcatcttcttcttcttcgctatcgtttagctcctctttcgcagctttccactgagcacaagtggagacacctttaagttttggatctaagagaatctagaaaaagggttgtttgacgagattcaagaaataacataccttgtcaaccaaactggaaacctttttatttgacctcaatgtagatgtagcagctactgttttcttttttgtccgtttcactgttaccaaagccaagtaagaactcagaaccctcaaactatgaatgtgataaacaaaaatgaaaccaagattagagattcatgaagaatttctcatacctttagtttgaccttttgctaatagagacgatccacttgtaacatctgtggatttagaagcagttgctgaagatccaacctcagtagagtcattggatctcgaactaggcactgcagctgtagaagagttgtttgggatgtggtgattagcagaaccaactccactgtgatgtagagatgactcacccgagctaatgacaggaaacagtggagctgcaccattgaaatcgtaataagcttcaccagcactggctgctgcaggaacaacttcagttgtaccaggaacagtttcataataaaatgtggattggggaagagaaacttgagatccatccacatggccatagaactgagtattaggagctagagtaacagcattggtatattgataattggactctggataggataagttgtattgtgtcgcataatcagcagattgatgcatatatgattgaggtacggtatagggaactccgagagagtcactggacaaagatgaagcgacatggccattgtcaggtggtggaggaattggttcgctataactgtctggtggcggtggaggaacatcttcactctcagacggcggtggtggaatccattcctcacccggaggtggtggaacatctgtatgaaggttggatggctctgttt

SEQ ID NO: 1293 - DNA, 26759 bp, Arabidopsis thaliana
atagtcttttagaattgcctaattaagttttcgtatatatttattttatgggatcattaaaatagcaaacaattgtttccaaatttctccaaaacgaagaaagaattgattatcgacattatcgccgtgcatttcgatccaagcttaagtgctctacgggaaaactgaaaattcaaaaacctgcgacgaccaagacttttgtcggatcgagagactcagacaagtcaacagaagaaaaaatttctggctaaaagaacagaatcgttagtaacactcatataccatatgaccacttgtaattaataacttgacttgtctcagggtttggattttggaataaaacttccaatgttaagagaaaaaactaaaaagtaagaaaccgttaatcttggcattttgtttgaaagaaagaaacaaagttttttttttcttagatgctttttggaaaaagaaagcagaagaaaatagctggaaagtgttcaaatgccgattcaaaacaaaaggagccttacgtcaaaaagctcccataataggaccatctttttcaccataacaatgttagatgagatctaaaaagataagatgacaaataacacatgctaattcaaaatactgtctcaagatcatccatggatcaaacataaagcaaaataccaatagcactacaaatatctgtctaagtagggaaatatcaatctgaggcaaacaaaatatctgatcaaacagaacaagactgaaaaactgaagagtagagagatatatggtgtaatcataaatcactggcttggagaacggtctccattttgtgctccacgagggactggggtcgggctcctgctctgcctagggacagggctttggctccttgcttgttctggcgtgtagctcctgttttttcttgggctcacgcttcttcttgggcttctgctgtggctcttcactctcccaggacttccactgcgaacccttgagccattatggggtggtgagcgagagtatgacctctccttctcatatcgtctatcctgaggtgagacagacctgccataagacagagttggagagtagagggtggtttaatccatcagttaactgtaagaatatctgtcagtatgaatttcacaggcatgcagagctagttacctagattgatgtcttttagcgggaggagaattatagccgcggctacgtgatcgtgatctacgaccacggcgaggaggaggagaccgagagtaccgaggaggagaacgtcttctgtcctggaatctgttgctcctacaaacatgaaaagatacaagttgagatcaagtcatctcattgtatagacaaactaatgcttttttctaggaagaatgtcaattcaccttccacctcgatcccttgttctcatctcagttggcttcttccggttttcttcagcaaatacgacagtcaactcacgaccaagaagaagataaccatccatttgatgtttagcctcagcagcatcagcaggatccataaactgaatgaatccaaacccccttggatctctgcaacaaatccaacaaacaaacaaaaaatctcagcctagaaccaaaaacacaataagcaagaaagatgtacagctttgacgagaagcctgtagaaaaagttggcattacaatctcctgcaatagaagccatcgttataaacatgaaaaagcaagcacttgcctgcaaaccttgcaagtttcagtataaagatgacttctccaagacttgatatctcttcaaattgaattcaaacccaacttccttccaaccttcactaccatttagaacatcttccaaagaactctaattacttcattggtctcttcaactctctagattcactgttaaacctcaacaactttaataaacagactcgaagtgtgaccgaacatggaacatatcactgtattctttccctaaagtgactcgaagagggcgaagttttaggtgtactagacttaagctgaaaacctaagtgtagataaaacaaacgtttcaaggctccaaatgtgattttgggaagattggatataaaaccggacatgtttgacatagacctttcagaaaattcttataaatctaacaaattcatgagctgcatacgatggaatgtaggattcacaaaaggtggtttacgaagcaaaagaaaacaataagaaagagacatagtctaattgaagtaatgtaaaattatgccctggatgtataaacattcaatgtcttatctacagagcatcctcacccagtatagtaatccctaggaaggtagatgtccttgacgggaccaaactgctcaaatggcctcctgaggtcttcttgcctggagaaaaggtcaagagaaaacagagtcaaccaattgtaaacaactgtgattttctagtaatatggatacacaagtttatgcatgcgctatctaaaaataatgaaatatacgttttacatgcttctaaatcagtttttgccacacaaaaaaatccaccaaaccaatctttgatgatgagtcatacatcagctttaggaaagccttttagacaaggctaaacaagtaatggactcacgaaaacttacaaggaaacaaaatcattgaaaagaaatatataattttgtgtaagagagaaaagagtagtatacacatgcagtagtaaagaatatacctgcaatcatgacgtaagttgcgaaccaagagactggttgggagatcactgtcacgactcccaccaaaccggccccgagggctagggctccggcccctccttccataaccccttggtggtgatggcgtgtagctccttcctctcattgtgtctagactttaatatctatatcaatcaagtaaccaacagaaattgagtcagagaatgtgctagatatgattgaatgattaagaaatagaagaaccaccgcagaagcttacacacatctagagaagacttcaaaaaagtataaaaccaaatttgaattctacaaattccaagccataaaacaattactgaatgtggatatacatctagctaataatgagtttcaaactaagaactaagctatcggagaacatctcaagtaacaacaagaaagatcgatcctaaacaagaatacaaatttgagatcaattcaatagaccttaattaaccactgccgataagataagacgacgaagaagaagaaaggagaacagattaagcatcaagagacttaccgcagctaaggagttgaaaagaacgacggacggcgaagaaaaacacaggggaagcggcgggatatgtatcggagaaaagagacagtgtttagagagaaagtgtgaaacctagttttatggttttggatcttatggtctgaagcgaacgggtcattagggttttttctgcaattttttattttatttcctttcttatgtattgtctacaaatcctttcgtttttccctttgtcaacttttgccccaaattccttccaaacgtttagttttacgcaccatactttcttatattacatgtagacccagttaatgtagtttttttttttaaaatcaacagatccattaaatgtagttaatttcttaacttaattgtaaagtttgaatcttgttcttatgagagtaatttagaggaatttaagtattggttcaatctaactcttgtgatagaatatgaggatatatcttatattaagccggtttattttgatcgtttatcattgaaattatgtttggttgattaaaaaatgaaaatatctaactttttttgttatgtattctacactaaaatttgaaatcacttgttactcttacaattttatgttttccgtatgtgtgtttcgacaacttctccaatcaaaatgcataataataaattaatcgatttagttttattccaatcactttgttactaacaaaatgtgttcttggcattcaagagacattagccatacatttttcttttttttcaaagagaaataatagtaaagttcatatcaacgatttaaatatatggtcaaattgaatgatatatctaagataccaatttgaaagaaaataaactaaaaaactgttaaactattttagtcgagtggttcattcatctttgaatttaagaaacaaaaaagttgataagaaaagtttttgaaagttaaaaaacatgtgaagagagtagaaaatataaaccaagggtctgtttgtaaagccgaattatctgagtcaaaacaaaaaatatcgcaactctaatagggtaaaagcgaaatcataaaaacataacgaagccctagtccaaaaatttctcatactataaaatgatttttttttttgcttcgctccctctttttcacttcgttaacggccccgcctccactctatcctaccgccgacgtccgtgatcgccggttagtcttcttctttctcttcgccctctcaacatacatcgttgcagaaatcaatcgtgtttcgagctgcgcgattgcattggtcaggtttaggaaagctatgtgtgttttggtagtggttcggctttatttggcctaaacaaatctagctattggttcagaagaaggtggaatcctgagaaagctctctaaacaacgcatgtgatctagcaattggattactttacaaaaattaagagtctttaaggtgcataacctgtgtgatagaatgtaattggatctatgacttgtggaccatttcctaggttttttaaaagattttttctgatatgtatgacaacagacacgaggattatgctagtaattgcctgaaagtattgatttttggagcctaaaaccttttgtatcattttggtgaaaggttatgtttcactcgtgtaacacaattccatttcacttgttacatttttatatatgttttcacttgcattatctaagaagctggaattcttgctttgattttattagcagtagcatctaattttgtttgtttttcagtttctctcttcaggaaaagtgtagttaaacgattgagtattccaattttgttctttggctatgtaatttacagaaatgactgaagcagagtccaagactgttgttcctgagtcagtgttgaagaagagaaagagggaggaagaatgggcacttgccaagaaacaggagcttgaggctgccaaaaagcagaatgctgagaagaggaaactcatatttaaccgggctaaacagtactccaaggagtaccaggagaaagtatttttctacaagcttagtttgcaattttttctaatgtgagaaatgcaaattcattgagcgtttctgctacttgttttcttcaggaaagggaattaatccagctgaagcgtgaggcaaaattgaaaggaggcttttatgttgacccagaagctaaactgcttttcattatccgtatccgtgggtaatatgatctactattactatctcccaagtataaggatgatgtgttacttctataactgttttctcatttttctatctatttgtttctatcatcagtatcaatgccattgacccaaagacaaagaagattttgcaacttttgcgtttaagacaggtaacaatcttatgatgagaactttgtaatatgttaaccaatgatacaaaaggatcgtatctgacacttaaaatcatttattgcagattttcaatggtgtgttcttgaaggtcaacaaggcaaccattaacatgcttcgccgtgttgaaccctatgtaacctatgggtacccctcttcgtgcttacatttcaaaactttcttttcttatttaacctcattagtaagtggtagtcttaccatggacgactcttgttttcctcagatacccgaacttaaaaagtgtgaaggaattgatttacaaacgaggttttggaaagcttaaccaccagaggactgccttaacagacaattctattgtagatcaggtgcatatcatcaacctatctccttcatcaagtctggttcagttcctaaagtcaatattattgccgttatccctgtcctagaaaaaatgatgtattatcatcaatgttggattcaatttgtctaacagatatggattgtcatttatcatcaaaactctatgtcttctctatatttacatatcctttgctgttgaatcaggggctaggaaagcatggcatcatctgcgttgaggatctgatccatgagatcatgacggttgggccacatttcaaggaagccaataactttttgtggccattccagttgaaggctccattgggagggatgaagaagaagaggaaccattacgtggaaggaggagatgctggaaaccgcgagaacttcatcaacgagctcgttaggagaatgaactgaagcgtaagcgttattgctctgaaactccctaggaaacgttttgctataggtggaaaacttctgttcgcttgcttgtgttgccattgaggcgaagtaaacatttacggtgaaagactttgatattttataagtttgaaattgtaagaacacatcatttatttccttccacattacatcgtcacttgcattgcatttttatacaggactcatttggtagaatgaatacacttgatagaacaaaaatatacatcatcttttccattaaatttttttttgtcttggcaaatacggtgacatgtatgacacaccggccgagaaacaccattgtttgaagcaatctcgacctccaaaccactaactttgatcctatggccagacttcaaataagggtatttccctaagatgcattcaacatgtagagtcgtgcagcattcatggcaggtgtagaaaagtttctttttgtttatattttcttcgcaaatctcacaccaccactcaagctgaaaactcttcgagtaatatttatcactgtatagagtgagtgagtgcgagtcatacttgtattttaccagttttggtaaattcaagcatttgaactccaagggaaaccagcatcctttgtaacattttgctgcaaatcttgaagattgagtgcaaccttcacacctgtaaataaattcatcaaagtatatagccagataaagaggatgtttatgcatactatggtcgaatggttcggcaaaagaagcacacttcacatctattttaaactcacaatcttcttggcaacacttgtacatgaatccgcaagaatgttggttacatacagagcaagtgaagaacccattttcgttgttcatcgcgtcaacatgtatggtaagcggatgaatatgtatcccatgttccatcttccgaggaagactcgcacacacgtcgtgaagagcaaagtcgcattgcttgcaacccaagaaactaccaaattcaattggaaggacacaggcttgacatacttgtccactttcttctttttcgcccatatcgagtctcaataaatcatgttcatggctaaaatggcgtactgattttccatctatttccaccaacgcagcaagatcaacttgagagtcaatctcctctggttcaggctcttcttcaagatctttgccatcccacacatcaaaacgaattatacagcttgaatggacaacataattacatgtcttctcaatacaagaatatcctccatatctaacatcaacttggctccggcaaactccacaaatgttatcaccatcagagatacgaaaaacgtgagagagacgctgtgagtgacgtgtgagctttataacctttggtaggaatatacactgtctatgtacaaagaaatcgcattgtaaacatccgtacatatccatacctttatcatccctcccacaaacatcacaagggaacggattctctctacgaatgaaagttagtgtatgctcatgaatctttgcattgattattgtgagacaatccttatggaaatgggatctacattcacgacaataatatgcgaaagattcaaaagaaaccgtacttttacacaatttgcaaattgcatctctagaatcgcgtggagattcttcaaatatgtgtctagcgtgatcagatgggaaatacattatggtgatgtgattttgttaaggactataatcgtataaatagatatattgttattctccttctttaggtacaagtacaacaaagacgaggatatcttcggttttacgatgcttggagaaaaagctaagtccataacaatactttgtttgtgaggtcttgatttggttagcacaaagtaaagaacaataatgttattttgtaatcgtatctgattactttctttgtatgtaaaactcgtaaaggtttaagccagatgctaatcttggaatttgggcttcaaattgtcgtaggcccattttgtgctaaggttttgattgggccaaaataaaataaagagcttagatagcccatgatcagttgcatgttcctctgcttgatctctcccctgtttctgagtcccttggatttagtaataactgctaatatcgagcaagtaaattctatcaaaacacatttactagatgttcctctagatacgaaaaccaaacagaaccagtcttcgtcttcgaagatctcttagacagagtcatcatgtttctagtgcctaacagattcatgcacgcaacaagattttcgaaactgaatcgttgaagagattattgtgtcaaaggagtagtgttatatccagctaatattctgcctagttagccatatcatggaaactttgtctccaaaacttatcacaaaacccatgtgacttcaatagtgggtcatttattaactaaataattcccagatcttagtttccgtagtaccttgttgctgcaattagtctcccaaacctgttaacatttatgacatttaatctttttttatgactccaattccaagtacagctagttgtacttgtctctgtacattcatggtaaggaggaatcagaaaagaaatgttattattttcaaaactacatcttcctttttatttcactattttcatatccatcttaatttattttgttaatttgtaacgtgaagatataatcatctccaaagagaattgtaatcttgattttttggttataaatcaatatttaaaaatagtagtatggtaggtgagaatgagatatcagtgcatcctaattgcttgatttcgtttaggtgacaggtatgtagcggatgatgacaggtgagctatggtataccagaaatggctcatgatttgaaactttgttcgaacttctcatgaaccaatgaaaactcttgttatcatagagactcaaacacatgaatcacatataataaaggaaatctggatgataaagatcagattgaaagagacagaggatcagacttttgtcaatggaaggtattcattgcattgaatctatagatatggctcttcttgtttatatcttggggttgttgttgtgcaagccagctttgtttcattatgatttatgtctcttaattgtttgtttacttaatatgtttgtttcatgcaatttttgaaatttcgatatggtgaacttaacaaatacaagcacatggtctggatatttagtatactaacgaaccaatttatttctcatgaatatgattaccttacttctcttttaaatatccttattttatttcattcagtcccggattgttgtagtccaaaggttttgcattattgtgatgaaattttgtagatacaactaaaatcttaacggaagaaactatggcatgatcatctataattagcgggaacataacggcatgatatatacagttgactttgagaagggaaaatgtgatttctttatcaaaacaatgttaaaacatgtgtataataatatatattggtgtttaattagtaaccaaatgtgatatatcggggaaaaaataaatttcatgaacccatgttattatttgcctaattaaaaggctaaaccagaccataatttgaattttaaattggtacaactactgaacatgtttcacataatctgaattattaatatcgattagctgtagtacttatgtatttctgtggtctttaaacaaatcaagtctcttaattaaattttggatgtatatgattatcttctagatctgatcaccttgtggtttttgaattgaaaggcatggattgtgcatggtcgtacctatcctaactaagattatgtttcattcatttataatcatgattatctaataattacacgattatgtgtacaaactgaattttagtattatactaaaaataccaagtacgtggttggtctggtgatcatcaccataaataacacatatgtcttcgtggataattagctttcggtagctgaaagggaacagatgatttgactatgtaaattgtaaaagggtaagattacaaagtttagcttttactttgaaatttcgtttattttgttctttctaaaatcatctttatggttgacttgaccgtaattttcttgggatacactctatcgttttgacttcatatactaacttgttttaagagtacttttcatagactaacttgccgttcaagttctacaaatactgggatcaagcgactgaccttatcaaaatgttaaaagtcttgatgttgacattttttgcccaagatagagacattaaaattaaaatcccatgattatgagaacatctaattctctatagcttcacctagttttttttttttttgagtaataataaaatattataacattggcgttaaatatataaaataacaatattttgagtaatagatttgtataattctttagatcacatatatatgtattaggaggctagaccaagctttcaaacagaagctggaaaagaaaaaactaaccttataaagctggcctccaagtgatacaaattcacatattaaaactatatattgatatgcttggcaaaaaaaaaaatatcttaatatgacatatatattccaaagtagatagctattaataacttaaaatactatttgacctaatgaaagcatctcactaattaagatattcgatagatgacattttttattttgaactcctttttttttgataaaatgtttgggccccatgttgaaatggacggcaatgaacatgaactgatgatggcgatagtcgatagatgacatatatagtttgaaactttcatttatgggacgcaagttttagtttcacttcatatttaatttcctcaagaacaattaaaataaaaaaattttaaaaagatttgaaccagtaaaagtgtaaatgtatgatatcacctaatttggttgagatgtatgaactgactctttcaaaactagtagaccaaaacttgtttgtagcttagaccttaattttaacaagtaaaaatactttttttggtccatatagaaaataataacattgacattttcgccattggcaattactagctactgagatagtatattgtatggacaaaatgaataggtcaacaagaaaacaattaaaaaaaaaattcctcggaaatgctagtgacgttagaatatagaaaaagtcaattgttgcaagtaaaaccgtgtgaaaaaggtcaacgggccatatagacaatttaattttagattgttaaagtatgatgtagttaaaagaaaaataaaggaaaaaaaaactgaaggtaagcgatttcaaaagtaaaattaaattgtctatatatatgtaaaactttgaatttatacttcactataagatttaagttattatatagtatgtgcttacattttgttaaattttatgaatttagaataagacaactaatagattaatcaatgtctagttctaattagggatttgagtatttgtaacgtaaatcttaacactatccctcccctccgaaatgatgaccttttgatctcatttcgtaccaaatttactatatggtcaaactcggactacaataagcatgttaaatttgatggatttttcgatcataatcaaccggcaattaatataataacacatctcttcttacattatttcagattcgtaataacatgtttacatattctaaacataaccattaatgtctaaataataaacataaaacatttttacatgtaaaaacataagttactaaaataacgaaaccataaatatctgtcatcaatatataataagaggtagatggatgagtaatgaagtattaaatgatatccatagtccacaactaaaaccataaatcactttttttgggtttactccttggtccttttcttctaccgtccaataaatgggaacattttcatcatcacaacaaagttttactttttggactcacaatatttgttatatccattccacacgttgagacagaagagcaattagtgactactgtagatgagttttgaacgagccagtcaacaagagactataaaatccagcaatggtcaacaaagcaaaagtggccgtactctcttggaaaaaaagataagcaacaataatagagagtacgagacggtgcaccgcaacacaggtggttcgtttcactcctacttgtcgtcgcgtcggtgcactttttctcctttttactgaaccaaccccgcgtcttcttttggaacctagcggcttcgttcttttggtctctcatatttctttattttagtattgtctcaaacgatttattgaatcttcactggcattctttaattcgtccttgtgcttcccagctggcttttcgctgttacgctatcactctctcatcctttgaccttatctctcgctaacctatatgtaaacatttattcataaaaaaaaaaaaagattatctctttagattattaacggtaattaccttttaatataggccgtgttaatctagtagagttccaaaagttgttacttgggcaataatttcaataatagaaagtttagccaacttgtatacgtattttttttccgtaagcaagttgggtattattactacaaataaatagttaaatcattgaattggggaccaatgaactttacagaagccactatgattagatgatatcaatcatatttaaacggttctgtaactatattattggtccttcgtaaattaaaaagacataaaattggctttagttaccaattaacagatctaaagattcttgaagacatgaaaagtgtcataaatttgggtgccgtcaaaaagatacggttgtctccacgttaggtacggtgtggtacttgaagcgacatcaccctcgtggttcaatgtgaactcaacacgtggcgagcttaccgatatcctgtacggtcctaagtttgtttacgtcaaactattatgtcattttctaataagtagagtattatattgtgtataatgaattgattcaaaaacagtttcattatatgctaagaacaaaatctaagatgcttggttttaaattgtttcgtgaatgaatatggtctaaataaagagaactaaatccaagttcacgattttgtcatttggaaaccatctactattagtgaattgtattaattgttgattgttttttcaaacggtttacatatggattatatttataaatatatatagtttcatacatgtatcttgtttctttagtaatagtatttgggaattgggattggtcttgtcacgttaataaaatttgtaacaagtttgtaaaattctcttaaattcacgcatttattattaccaggatccacgcattgagatctgagccgacagttgtattcacttatttgtatacttcaaaatactgatgaacgttaatgctcaatgaagggaataaaatcgatgagatccaagcttaatctagctattgattttatgattcttgttatgcggacacatatatcaaatatttttagttcattattttcgaaggattcttcaacctatttttaaaagtttgtttttcttctgataaagcctattattaaaaatttacacaatgatttctttctacgtcatcgattctaatgtataacatttaaaacgcgagtacaaataattgttgtacacttttctcagtgttacgcgtaccggcgtacgtaggcaactttaggttaaaccgtctatcattttatccatagtatatacgtatgtatctcattacatacgtatcatgtgtaaagttacgcgtatatgacctcatgttcaaacttacttttctaagttttcttcatcgtatcactttttcagtacatgctactaaaatatactactaggatacgcaaaggttttcatatggcttttaaagtactttaagaagcttttaacaattaagaacataatggtttgattaattatgtcaattttttttccttgagatctatcaatattttgacctatctccgtgaccgtttgatcacttttaggtaattgattaacaaataataacttaacatcgtagtctatatatacatgttaagttgttacttgttaccacaaaaaagaaaagaaaatgcgttgttaattaggaatatcttgttaccaccggtgtaaccaatgcagtcgtgttttgattaatatcgatatattagcaatattcgattgaagtttgtgtttaatattaaatactaaacgacgtacgaaatatggttattttgactatacatgttgctgaataatggtgcattctgattataaggtgttgatatgtaagtttgttagagggacatatgaggagacaagtcgctatcgacctaattcttaagaaaaaagagtgcatatgcatgtattatgtggtactcagtacctcttaatcattatttaaatcctatttctaagtagattgatcgatgtttacaaaaaatcttatacctccatgtttgttgtgctggttttttttttttttttgttcatatacatcctgttaaacttcgtatagctatagtatggggagatgctgattaattcgacagtcatttcaatgatcttgtatgttttttactatgatacattgacaatatatttcacgttagtgtgtcgatcttgttacaatatatattaacgtatatatgtcgatgatgaaaaattcaaaataaaatatttagaaagacataatgaattataaattatgcaataaagcgtcgccatgattaaaaaaatgtaaatcaaaacaccctattttatgcttatttaattccataattcttgttcttattaacccaccaaaacacttttgattgaatagactagtaatctgttggtcgccacgaaaggaagaaggaactttcattaaatcttagtatatagtatgattgagaaattaatattgattttttttgttcttcacagatacggataaaatgcaaaactttcaacgatagtagtattcacctaattaaattccacgtctgcaaatacgtcactttattatactggctttgaaattctactccagaaaatgggttgagtcaaacactattctttatttagttttgggtgaccatttaaaaagactattataacttgtcagtcacgcgttcccgtaattaatcaaaacaatgtcaatcgacaaaaaaaaaaaacattaatcctaacaatctttgtatgaatacgaatatttaagaaaattacttttttttttttggtaaggttagtaaattatttatattagtccacactatctttaggtatattattatttatttatgatgatatcgttttttgtaatagtatgaagtaaaatttgaatataacttttgagttttgacctcgtatgtaagaatattctgcagctacaaacacgtggatggaaatatcgacgcttctctctctctctctctcttgtcgctctggagttgaacggtagtatttattatatatatataataaactccattgctgaagagtttgtaataacttgcgatttctgagctgaaagaaacaaagaacaaagaaaccttttcgaagaaccttggttttcaagaacagaaagagaatcaaaacaagattcaagaagaacttataatctaaagtttcaatcaagattcctcaaagaccttttctgcttgaggaataaatcaaccaaactgcatatcgtatattcgagaggtacttattcatctccaccaccactcattcttctctgtctcaataatttcatctttctgaggatttgtcttgctgtgacccaagtggtttctatcaatcttttcattttatttcattagtagagcttattggtattaagttaaaacttcaaaatgtgtattttctactgggtttaaaaataccggagaaaatgtgtttcaccaaacgaattaataattccgggatactctgttttccagatccgaaatgttctgatttttacgtttctttcttcaaaacgcgttttgttctctttataacagaatcctgatgttttttcacttctcaggttccgatttgggatctgttgaatgggtgtatcattctcctgtccgttcgcagagcaagacgacgtggaagctgctctagactctgtcacggttaagtccataagctttggcgatgacgacgaatgcaaaactcctaagagatctgttaatttcaatgacggtactttagagcccacgattttgaaatctatgggatctggtaaaatggttgttgagaaatctgttagcttgaaagggatgcagctagagagaatgatctcacttaacaggtctgttaaagacaatggctttgagattgctaaagagttctcagttcttgatccgaggaatccgaaacacgaagctgctattaagttgcagaaggtttataagagctttcgtactagacgaaagctcgctgattgcgctgtgcttgttgagcagagctggttagtttgacaactcaaaactctcaaaacgttccatttgtagaaacttttgtgttgtgatctgatgttgttgttgttttgtttctattcttaggtggaaacttttggattttgctgagttgaagagaagttctatatctttctttgatattgagaaacacgaaaccgcgatctcaaggtggtctagagcaagaactagagcagctaaagttggtaaaggtttgtcaaagaatggaaaagctcaaaagcttgctttacaacactggcttgaagcggtaagttaaacattattctcattctgttttttatttttgttacagatgttttggattgaacgtaatctgatcttggtttggtttaacagattgacccgagacatcggtatggacacaacctgcacttttactacaacaaatggctccattgtcagagtagagaacctttcttctactggtaattacttctcacagactcattatctcattcctgcaaattcttttgtcctaaatcaagaaactaaagttatatatacgtttgattcaaatgttgcaggcttgatatcggcgaggggaaagaggtaaatcttgtggagaaatgtccgcggttgaaacttcaacaacagtgtatcaaataccttggtccggttagtatccatccctttatctcttctcatcaagtgtatttacgaaattagaacttatttcttattgttttcatgtttatgtatagatggaaagaaaagcttatgaggtggttgtggaagacggcaaattcttctacaagcatagtggagagattcttcaaacttctgatatggaagatagtgaatccaaatggatttttgtgctaagcacatcgaaagtgttatacgtcgggaagaagaagaagggtacgtttcaacattcaagcttcttagctggaggagctactgttgctgcagggagattagttgttgagaatggtgttcttaaggctgtttggccacatagcggacattatcaacctacagaagagaatttcatggactttctctctttcctccgcgagaatgatgtcgatatcaccgatgtaaaggtaagaggaagagatttgattgaatgactcattcattgttagtttttggctatgtttaggattatgttctaataagtgttcttttgctgttttcagatgagtcctacagatgaagatgaattctctatttacaaacagagaagcactcatatgagaaaccattctttagaagaggatttggaggctgagaagaccatttcctttcaagataaggttgatccaagtggagaagaacaaactctgatgagaaatgagtccatctcaagaaagcaaagcgatctcgagacaccggaaaagatggaatcatttagcacatttggcgatgaaatccaatccgtgggatcgaagtctacaaaagtatctgaagactacgattcaggtgacgatgaagaggaagaagaagagatgtttgagttagaacaagaatcaatgccttcagagcaaagctcacctagaggagaagaaaaagaagaaggagaaaccaaggagagtgaagtagtgaagataacagaagaatcaatcctaaaaaggatcaattcaaagaaggaaactaaatctttccaacttgggaaacaactatcatgcaaatggacaacaggtgcaggaccaagaatcggttgtgtaagagattatccatcagagcttcagtttcaagcactggaacaagtgaacttgtctccgagaagtgcttctgtttcaagactctgtttctcttcttcatcgcaaacgcaaacgcctcaaatgtcaccgttatggcgaggaatgtcactacctacagatatcacactcacgaattcataacagattcacattcataagttctttttttcgatctgatctattctttttgcgtgaatagagaagatgatgacttagaaattcttttgtattcttttttccccttttctttttactgtaacagagcagcatttcgtttttttatttggtttcttgtttaacaagaaataacaaaagtaaaagtgttagattctttaggctttttggttttgacaaaagcctgtactagtagtagtaatacacacaagttattcaagattctctgattctcctccgtacattacattctttaggctttacttttgtggggcttcacgtgggttatttgatcaatgggcttttaagatgccccattttacctagatgaagaaaaaggcccgttatattgctggccaaccatgcctagtctcacgcttctccaccaaccatgcctagtcagttagtagtcactaactattttttttacaaaagtaaacatgtagatgatgtatgagtagactattggatttctaaaataattgatttattactagtagtatcaagaaccgaaaaaaagaaagactagtattgttgttatatgaactcaccaaccagttcaatccaaaaataacctaccaaatcaatagatgatttttggcattttattcatttgagtcatgaccttccttagttagtgctaattattgcaataaaatacattttatactcaatttaaatactgcccgcttcctcaaattatgtttctctacaacattaattattatgaaaacaatgaaacgggaatatgtggttgttgaatgcattaaactatctgcacatgagtctaagttttgaccaatgtttgatacaaatggcatttacaaaaatattggaatcaatttcgagaacagaatttagacatgaaccatactccatattaatcacatcgtgtagaccatttctaactcatcttcatttcatctccaaaataaaatttggagtaaaatttcttccaactcatttttattttcaatttcaaaataaaaatctccatatacggatatttttcatttttaatttacagtaaaatttagaaaatctctatttttgactctaaaatagagtagaattagagaaaacctcaactccaaattaaaattactatattttgaagaaaaaaatagaaaaataagttggaaatgctcctaataataattagcttttaacctttatctttctagttttaaatgtttttccaaattatttttggttgggttgagatctttcatccaaacagtaaatttttttatctttgctagatgtctttttcactttgatttctaagatcatctctagctatttcaacaaccaaatattcccgatgagctaatgtacttgcatgcactatttggaaatacaacatacaatttcacaaacaacatcacgtggaattgtatcacattcctgttgctgtggaagagaagtgcaaattctcttcaatctctctgtggaattgtatcacattcataacaaacattgatttttcaaagatcaggattccacagggaaattgcacttcgctttaagaagactaaaactcgtcccaatcccattaatttgcataagtcgcctccaaaaaatcaaactttgatcaaatcaagagtaaaatcattaaaaaaaacaattggtcaaccaataagattcaactgattaaggttacgtatatgtgtaatcaaattttctcgtctatgctaagtataataacaacatgtacaattttttatgtatctaaaatatcttagtaataaccatatgatagttgactatactaaaaccaaataatttgttgaaagccaatattaattaatacaaattgatatttttaaattgaggaataaacgcgggaagaagaaaaaaacagtataagcatggtgagagccatagtggttgttcggtcatcagctgattgcattctcctcttttaaatactgtttcctctctgtaacaaatcttcacaacacaatcaaaatccctaaagtctcaatctttaagcaaataaacaaaaaagctcctatcttttttattccaatggctccaacactcttgacaacccaattctcaaatccagctgaagtaaccgactttgtagtctacaaaggaaatggtgttaagggtttatcagaaacaggaatcaaagctcttccagaacaatacattcagccacttgaagaacgactcatcaacaaattcgtcaacgaaacagatgaagccattccagttatcgatatgtcgaaccctgatgaggacagagtcgctgaagctgtttgtgatgctgctgagaaatgggggttctttcaagtgatcaatcatggagttcctttggaagttcttgatgacgtcaaggctgcgactcacaagttcttcaatctccctgttgaagagaagcgcaagttcactaaagagaattcgctgtcgacgactgttaggtttgggacgagttttagtcctcttgcagagcaagcgcttgagtggaaagattatctcagcctcttctttgtctctgaagctgaagctgaacagttctggcctgatatctgcaggtaagtttcacattcatgatttcaaaatcaaatctttcttctgttgtactcgttgactttatcaagattatttggttttgcaggaatgaaacgttagagtacattaacaagtcaaagaagatggtgaggaggcttctagagtatttgggaaagaatctcaatgttaaagagcttgacgagacgaaagaatcactctttatgggctcgattcgagtcaaccttaactactaccccatctgccctaatccggacctaacagttggtgttggtcgccactcagacgtctcttctctcaccattctcttacaagaccagatcggtggtctacacgtgcgttctctggcttcagggaactgggttcacgtgcctccggttgctggatcttttgtgatcaacatcggagatgcgatgcagatcatgagcaatggtctgtacaagagcgtggagcatcgtgtcttagccaatggttacaataatagaatctctgttcctatctttgtgaacccaaaaccagagtcagttattggtcctctacctgaggtgattgcaaacggagaggaaccgatttacagagacgtcctgtactctgattacgtcaagtatttcttcaggaaggcacacgatggaaagaaaaccgtcgattacgccaagatctgatcataaataacctcaaggagttcgatttctttttttttttttggttttgtttcctgtttgtgttgtgttagtgaataaaagaagagagaagagagacatatgtgatgtcttcttgaaccagtttctctgttcagaattgtgttgtataaattgctatcattgatcaatacagtttctcttttatcagactaaaatgttacagaagcaaggaacttacattgaattgaaaaacctgtctcaggttgataatatcctctgttttggtaagatcctctgtttaactcttatcatgaattgtgatcatcgactttgggatgttctccgttgacattgttgtcaagatcatcgataacttcgttgaattcgaagatcttcgtctttctgaagtagttgatcaagaagtaccaaccgattgctcctatggtcattacaccgcaaataaggtacacaatcttagtagcaaacactaaaatcagcactagaaacgccgaaggtatcaagcacataaccaccagccccggtattttcagcggaactcggtaaggtctctttagctgaggtagttttcttcttaaccaaatgaaagatgcaaactctagaaacatccctagagtgtacaagaaattcgccgaggatatgatgtctgtgaagttcatgtacgataacccgagcgacatgagagctgagattagaatcccgacccaaggagtgttgaaccatttcgaccgtaccccaaagaatttaggcaagaaccctaattccgccatcccctccagctgataagcactactgcttaactgagcttcgaaaagtccaatgctcgataagacagcaccaatctcaatccatattttcaaccatttccctgcaatcatctcagctgcttctgcgtgaaacccgttttcccatctgctctgatctaccgagaccgcacccgtgacagcgaaaagaggaatcaagtaagctacacaagtgaagatcacagcgataagaagcgccaaagggaacgtcttttgaggctcgtccacttcccctgcaagagtactgacattgtcccagaaattcaagttccagaagagtgtgttgaagtagagattccaatcctttttcttggttcctaaactaccccaacggtgaggtttgatcttagggatagccatagccgacatgacaaggaaaggcgagagagacaccagaccgagcacaacagctgcgtaacctacaatggctaagccagtatagtttaagaaagacaagaccaccgtcgaggcgaatatgcagacatttcgaggccatccggattcaagaacagggaagagcttatccaagtaagtgacacagagaacaggaaacgaagcaacgttaatcaccccactaaggaacttcaacgaacccatcattgagcccacgaaagagccaaatgctcgatgcgcccatatcacaaaccctccgttgcctaatacaccaaaatcatgaattttgaaatcaaatcagaaaagtttcaggctttgatccaaattacaaccctaattcttgaagaaagtgtaacaaatcagaaagtagcttccttccactaaaatctctaatagataagcagtggtgttcttagtgatgtcgtctacacatataaagttacgatctttgtgtgatttggatttgaattgagaaatacctggaaacgcagtggagagctctgcagtgattagggcttcagggatactccaaatgaaagggaagataaggaaaccgagaatcgctaaaagcggtccagccgcttgaaccgccggttcttcaccaaatggaccaccagcgacctcaaagtaaataaggaaaaccaaagggattaaagtcagtttctttgcggttgctttcttcccgctggattcggctgttgttactgggagctcgtggctcgatttcgatgcctctgagattgccatttttgtgttttgttttgtttttacctgagatagtggaagagattgagaatgtatataaaggatgatgttgaaggttgtttcattgagaaacgtggaagtaatgggttggtcgtatcagaacagaatctttctttttttttttttttttttttgtgtgtgttctgatttggttttatcagaacagaatctttgcagaagatttggagccattagatttcaatgtgttgttgatggtatccttttgattatttattagtcaatgtattatgattttagtatttggtttttttctatataaatttctgtctttttatggagtgatgataattcaatactccttacctatggacagtaagagattaaatagaggtcaaacaaacaaaaagaaaaaaagagaaagaaactaaaagaaaggattagagttctttagcctacttggacttggattagtctttaaatatcttaattgtgcaaaacatgttccactttataaacattttaaaagaaacccaaaatttctatacagaaatattttctttaatttgggcggtattggattttttgcataatctactaacagcccatcaagctattttaatggaagataagttgacggttttcgattcaatgtaatctcttctagataacattaaaagatattgtatagtactatttttattgtcaatgatccattttttagcgttagcacgaattgcaacgggggatattgttcggtacgatgattggctacgaatgagttagagaatctgaattgaaaagtttttctagtactttggttttggagaacttggtggaataattctcttgtactttggtttatactagctaatgcataaataaaatacttgaatttggtgattttaggggatgtattactatactagtatttaagactcaaacaatccctttgataaagttatgatgacgatatggtatgttatttcctgataaattacttgaaattccaaatttaaagcatcaaacattagaggagaacatactcattcttttttttttttagtgtcatgagtccatccatggaactcgaacatacattttttttttttttgtcagtcagattctttctctatatgtcgttcacatcattttccctaatttcaaaccctcattgaggaaacatatataactttgttaaaccattttttccatttacaaagaaagacaaaaattgtagttacaaaacccattaggaaaaaatgatttagcgtgtgctttatttaatgttacccccactttacttaccccagtcattaccttcctttcgtttttacattttcacttttgtcatcgattagtgttagttttccaaaagattggtcaattctttattatagcaaactatctttgcagaactttaaacgaaattacatagctgccaaaagacattatacccatgcatggtcatcaaacattcataatttattcaaacatttactattcttaaggaatcatattcattgtcacatacaattcctctattagccaaattcatttgatcaaataactagttgtgatgacaaatcaagaattcttcctacattctcttaaagtatctctctagttccacatgaactctcctacatttaccacatagtatgattcaaccagaaaaaggactaattaatcatcgctttctttccttgtgtctggttggttgatttggagcggcactaagcttggaacataagaagagcacacaagtgggcgacaatatatgtgtggagcatatttctcaggtcttccgagattcggagcctccccaatattcacagatttgaagtattcatcttgtccgataatgtaagctgtttggttgcgacatgtctcactccctttatattcgtcaagatcgaaaaccacagccacttgattctcctcgttaatgaagaaactcccagcttggatactaattcgacaacaagagatggatctcaaaaacttggtccacgagacaacaccgggatcaatcttattcgtaatccaaatctccagttcgccagaaaccatccagctttgatgtaataccacgagctgctcttctctgacacaagataaagagaacaaatcttgtggataataaaagccaaacggaagctgcaaccgcggtccaaatctctcagttgtaaaatcaaacgagagtaaaatagcctcaatcttccatctactatccactcttattttcccttgagccaagatgtatgtatttcccttgaaagacacgccacgtttattagaccctatataccagtcggaagtgagatcaaaactctttcatgaattagaacgaaaattgtatgtgtggagcataagaagagcacacaagtgggcgacaatatatgtgtggagcatatttctcaggtcttccgagattcggagcctccccaatattcacagatttgaagtattcatcttgtccgataatgtaagctgtttggttgcgacatgtctcactccctttatattcgtcaagatcgaaaaccacagccacttgattctcctcgttaatgaagaaactcccagcttggatactaattcgacaacaagagatggatctcaaaaacttggtccacgagacaacaccgggatcaatcttattcgtaatccaaatctccagttcgccagaaaccatccagctttgatgtaataccacgagctgctcttctctgacacaagataaagagaacaaatcttgtggataataaaagccaaacggaagctgcaaccgcggtccaaatctctcagttgtaaaatcaaacgagagtaaaatagcctcaatcttccatctactatccactcttattttcccttgagccaagatgtatgtatttcccttgaaagacacgccacgtttattagaccctatataccagtcggaagtgagatcaaaactctttcatgaattagaacgaaaattgtagatttcataaccagagcttccataatcactg

SEQ ID NO: 1294 - DNA, 80733 bp, Arabidopsis thaliana
gatctcaaaaacttggtccacgagacaacaccgggatcaatcttattcgtaatccaaatctccagttcgccagaaaccatccagctttgatgtaataccacgagctgctcttctctgacacaagataaagagaacaaatcttgtggataataaaagccaaacggaagctgcaaccgcggtccaaatctctcagttgtaaaatcaaacgagagtaaaatagcctcaatcttccatctactatccactcttattttcccttgagccaagatgtatgtatttcccttgaaagacacgccacgtttattagaccctatataccagtcggaagtgagatcaaaactctttcatgaattagaacgaaaattgtagatttcataaccagagcttccataatcactgaaattcctcaagattttgaggttacggttattgtcatatccgatagcatagcggtctgaacagtggaaattgttactgggttgtatcaacctcgtttgccccaaatagggattccataccacaagacttgagttgtccttagtgacgaaaaggagtaagccgtcacaatgtaagacttcagatatctcgatttgatcaagtatacctacttgctttatagatagatcatcaaccaagtctcctccctcgtcgtttcggagatggaatttcatggagcaaaccctataatccatcataatgaatcccaaaaactgtttctttactgccgctttacaaagaacacgattcttggacaaagtattccacgttttgcaaatggatcgcactgcgctcagagatgtcaatggaaccctagggagtatctcctctaccacatcctcaggaagatcagaaattgtcgtcattctaagccaacgaaagacggaggagattcacggccgtgaggaggcggattagggtttgtgttctttggttttctcctctagcgttttttgtttcttttctttctgatcttttattgtagaccaaaataataatattaaaaagtgttgactccaaaaccgaagtccaaagtaataataatactgataacaatttattttacttgtcaacaatttatcttacttggtatgcaaataatttaatgttttttttacaaagagacctaatgcaatccgtgtcaatctatttgctatccatggaactagaacatacattttcaaaacatggataaaaagcaacaaattcccaaagctttttttttttttcttttccatcgaaaatacgtttgtatttttgtatagctgtttgtcagtcagattctttctctatatgtcgtttacttttgttgttttcgccgcttcttcttccctaaattcaaaccctcattgaggaaacatcaaactttgttaaagcattttttccatttgcaaacaaagacaaaaattgcagttacaaaacccattagaaaagatgatttagcgtgtgctttagttcatattaccactttatttgccccagtcaccaccttctcctttcgtttttacatttttacctttgtcatcgattagtattcgtttttcaaaaaaggtcttattatagcaaattatctttgcagagcttttaacgaaattacatagctgccaaaagatattaaacacatggtcatcaaatattcataatttcttcagaaaattactattgttgaagtatcatcgtcacatataattccttatattagccaaatttattttatcaaataactatttatttcaaatatatatctttagtgtgttatagatgtcgatttttctatcaacaacttctcacctttttaactttgctgtaaattttcccctataaaataagcaccaagaagacgatgagaagatcataaaatcttgtttgtgtctttgttgtactagaaagaaaatggaaggtggcgctgaggatctgagtgctgaggtataagattgatatactaaaatttcatgacatgttgtttttgtattgttatcatatccctatagtttatcaactaatgtttttacattttgtttctttgtagattgttggtctattagaaactgcttatgagaggagtgactcgatggacaaaatccgtaatcagcttgaaagaatgtcggagactttggccgaatctgtgcctcactcaaaatacgcggaggccattgtgaagggaatgcttcttgctgttcgaagacgtgtaaacctaaacggtaattaattaactaggttctcttttgcatcttctcttctgagttatatcaactctcattgtcaaaaactgtttcagagcgccttagcatccaagaaaccatcgatttggtttttgatgcatatggtcctatccttattccatatgccaccagcaacactacacaagtgagtaaattaattgataacaatatgatgctttgttataagtaaacaattacaacctctagtctatttgacgagtacttgttctacacacaaacaatagatccaaatcatagagtctgtggagaagatatgtcttgaacctcagtcacctttttcccccgtttttggtattgtgagtaaaaatatattttgctaaaaaaatttagtcttatttcattattttgatgttaatcaaccttgttttttttttcccctatgacagataatccagaccttgtcacgccattgtgtaaatgtggaagccattgttgattgggaaaagcgtaggaaagcagcaagagaggaaggaactctgtctcaacaagagatgactcttctgtggaatatggaacatacccaaattggtcccaccggtggcatccttgaaggatatgagattggaaaaggaagccaggatgctcgagacatgggcctctaagtccattcacgttcatgactctctctccctatgatcacctatatatctatctattttagttatcgtatgtgtgttttcaaacaaaactcttggtttgtttgactaaaatcaaacaaagtatatacaaaataagtttgatggatccaaaaaacatatataattagaatattttagtggcatacgattgattcatgcaaacagtattatatatttatatgatagaaaaagcttctcatatagctttatcggaagaaaaaaaactattatatgtttgaagtgtaagaaatagccacaaaaaaaaacacattcttatgaaacaatcaccaaaagaacattgattatttagcgtaagtggttcagaaatcaaagaagacaatacaagttttgacaaaataaaagcaggacaatacgacaaagataacacgagttttgacagaatcaaaaagagaacaaaacgacaaatattatattggaataagacaaccggaatcaatccttttcataagaaaagattatcataattccatgtaccttttaaatcctataactttctttcttgccaaattctatctctaatgtttgaatgcttaaatttctaggtaagtggccatgaaccaacttacgctttagtcacaactttaagcagagggagtctcgaaatacaaacagaataatcaaagggactgtttacgtcttaatatactagttcactttccgaagatttaggtatgcataagcgccatctctctctgaccgatcaatcaatcgtctaagtagtagtatgatcctgcagtcttttgctccttgtccttgatggactctagtttgtttatccttggcctgaagttagtcggatcccgtctgaatgtgatgttcaagtgctgcaaaggacaacaagttagttggctttatagaggagattgatccctttataataactcaaacatcttaaaagtgttagattaccgataggaagtggttcattccactgagcagcgactgtggagaatgagcaatacacttgacagctggctgtccttcgtacacaatgactcggtccgcaagataggttgccattatgaagtcatgctccacaataaacgcggttttctttgcgtgcaggatgaaccgttttatgacctttgaagctgtgatccgctgctctgagtccaaatgcgcacttggctcgtcaatcagatagatatcagcaggcttcccaaggcatagagtaatggcaaccctctgcttctctccaccagacagagtttttaccacttggtccatcaactgctcaatctgaagcggtcttattacatctgacataaactgaggatgtgcgcatgcatcacgaatcttgtcatgtagcaactgtctcactgtacactcgcgcttcgaatcattcccttgcggtttgtacgacacattaaactctggaatctccgattgtacaccctcttcacgtgggaatgcgcctgcctgcattaagatacaaatttcaatccttcaacatctaaccacaacgagctgagaaaacaaaggagaggaatcttaccagcatccggatgaaggtcgttttccctgtaccattctctccaagcattacgataatctgagagtctgtgaactccccttccatcacttccagcttgaaatctccaagttgcttagtcatatttgggtatttgtatcttgcataggacttcacttccccatcattctcttgtgtagtctcagaaaccttggaaagagaagaaaaaacgatatcagtcacaaatgaaaaccacttctcttggaggccactggaaaaggaaaagctttaccctgaaggtcagggattcatccctaaaacgcaagttttctgtggggataaatccagccaagaacacgttgattccttctctgacagaaaaggggagagtcacgacaccatatgctcctggtttcccatacaaacagcaaacgaaatccgagagatagtcaaggacgctgaggtcgtgctccacaacaattacgtagctacaacaacaaaaaggtaaagcccatgtcagcaacatgtatcctatttgggaagataaactcaataccaaggagttcagaagatgagaaaatcagacctgtcatgcctgaggagtgatcgtataacttgagcagccttgagtctctgcctcacatcgaggtaactagatggttcatcaaacatgtatatatcagccttcttcacgaaaactgcggcaatggcaaacctctgcagctctccaccagatacttgtcttgcttcacgctccaggacctggttcaactccatatcagcacaaatctcttccatcagtcctctctcgtccagcttctcaagcatcttcccaagattaccacgaacaacttcttttatgtagtcaacatgttgtggctttatagcagtctgtcatacaaacaaggggcatcagactcacttcatgagctgcttccttagaataaatatcaagaatagtttggaccctaacctttagattttcctctactactcggatgaaatagctttgaagttctgacccgcggaagtgagtcaaaatttcttcccagtcaggaggagtctgcgcaagaggtagtagaataatcaatcatacataaactacagaatagacacattaaacgtaaaaggtagagaaaattcagagagtctatagttacattaaatctgccaagatttggtttgagttttccagccaagattttgagagcagtagattttccaataccatttgttccaaccaacccaaggacttgccccggccgtggaattggaagcctgcaagccgagaaacatatcagagccctaaagaaagattatcaatcagattccacaaggcaaaaacttttgattagctaacctgtgcaacttaaaaccattagccccatatcgatgggttgtatctttggctaagtccttaggaagattgataatctgaatagcttcaaacgggcatttctgcaaaattgtacaccaaaaatcattctcactcaatgtccaccaacaagaggaagacaaattcattcaatgtaaaaagatataagtaccttaacacatataccacatccgatacacagctcctctgatatgaaagcactcttggaagtagaaccaacctcgatacaaagtttccctagagaaacaaaacaaggcataaaaaaacgttctttatgaacaaaatttcaaaaactcagaaaaagtaccagtcttgacaacaggacaactcttcttgcactcctggcgacatttcttaggcttgcaccggtcttcactcacgatagcaatccgcgtcaatcgatctgacatctctcttgagaatattacatacaagatacacaagtcaacaattaggctcacgaggtaatcaaaagagaagtctttaaaggatgttgggttttggcaaaatcatgaatggagattaaacctagtagacagacgcatataataacagagctaattgacaagtaaaacagctatacaattaagggtaccaacatgcaacaactcataaactagaatcgaacaatttcatccacaacatacgagtgtatcggaatcaacccatctcgaaagacgattaagaagagaaacaagagaggataagaagaagaaaaggatctcgtaccacactatatgggagctcggcgagggagatgcagagtatacgacggtgaaggtggggttttcgacagcgacggtggtggtgaatgttgaagtgatgatgaataggcaatggcactaagtatatgatgctgattattaggcctagattttaaaccttatagggattggtcttttttctatacaataaataaatatcaaattttgtggactccaaaacatgtgttaaaaggaaactttggatttttttctgactaattttatgcacttctcagccaatgagaatagagaataaaatccacattgcaattcgtgctgaagagggaccattcatgatagaaacaaattacatctgaagtgggccaggcccaagggaagtatgctaatgtggcccaaaatgaatattgattgatgttaacccatatggattgattttcaaatttatgtatcacaattcacaaatgtcattgtttgatagcaactttcaaactacacccaaacactttgaaagggactagctaaccaatacatgtaacgttgacatcatgtcttattcatcaatatatattatgattgtcaattataacgggttgattaagaaaagactttggaagatggtctacaccaaacactttgaatttttttgtatcaaaaagaaacatgaaagtatgaacgagacccattgaccgcgacaaaaggaaaactttcggtataccgtgtcaacaaaataatattctgccgccattggcgcagtgccatgttgccaattcaaatatggcaaatctctagctcaaaataaagcaatggattatggatatattgtctacttgctcacaaaatatcataattcaatagttgttgtttaacctaaataaattccactcataagaaaatttagtgaaagtaattttacctttttcatatattaactgcaataactgctaaatctaaaaatagttcattaccattttttcaatgtataaacgaaagagcaaactgtaatcaaactaaattagtaaattcggtatcaacatctttaaaatattttccaaaaaaagtatgaagtatgaacatctttaaaaggtctttaattatttcttgttacagtgtaataatagactacaagtcttggtctttttttgaataattagtacggccgagagaaaagtaagaatatcaaaagtaatagagaaaagttattatttaaaaaatcatttgtttaagcttaattgcatgtacaattattggtttatggctcgaataatacgacgacttgtaataataataccgcccatgttttcgtggcacaaatatttaatatttcggtacctacgccatcgtcttcttctactatatatagtctagacatagacaccatcaagaagaagaaaaaaaacacataccacattctccactcatggcaaaactcatcctcatcatcgtcacccaaatcctcctcatcgcagccgttgtttccgcccgtaaaggcgaaaactttgcaaaaaccattgacaaaaaacattttggcctccgtaaggagaaactcactcatttccgtgtctactggcacgacattttaagcggctcaaaccctagttcggtcgtgatcaaccctcctatctccaactcttccttcttcggatcggtcactgtgatcgataaccgattaactacggaggtcgcggtgaattcgactttagtgggacaagcgcaagggatctacgctgctactggtcaacgtgatgcatctgcgcttatggtgatgaactttgcgttcaagacagggaagtataacggaagttcgatcgcgattcttggccggaacgctgtgttgaccaaggttagggagatgccggtgattggaggaagtggactcttccggtttgctagaggttatgtcgaggctcggaccatgtggtttgatcaaaagtcaggagatgctactgttgagtacagctgttatgtcttgcattattgatgatagtgatgaattattatgcctctcttttttaatgtttgataaaatactttttgttggattttgtctgcttaaagtgatggatgatttttgggggactatgtcttttaatagattttgatacttcttttttttttgacgtgatttttgtttttgtatttgctacatctcacactaccgtttggtcttaatctaatggccaagcgagtattgaaagaggcaattcctttttaaaatatcttaatggccttaaatgaacatcatcggcccattgttttcctttttaacgagcatatgtatatgtaacgtaggtgattgtgagatacaactatattaagcccatcagacaaaataagacttggaacttggaagtatcatcaaataaaatagtcaacaaataaaagaactctgccaattacatcctgccacgttgttggtaggcaacttaactcaattagataatttgttttcgaactactataatatactgtataacgcgctctacaatattcaataacatgctaaatgggttcaaattcaaatagtggccgaggaaaaaggacggagaagaagtctcctcaaaagaaaaaaacaaatcaaaagttgagtatgaacaaaaaaaagaaaaagaaatgacttccaagttacaacgaatagaaaattgcttttcttttcataaatttagtatcaagtatcgaaatttggttgaaattaccgactaaaaatggaagtgagtatgcctttaggtaagaaatttcccataaatttttattggtaaagcactaaagcatataaaccaaaacccaaataattaagtgattaataggcaaatatgcataaagtataatcaaacatgaagttattatcaccaattgcgtaaattcgtaattacttgtgtaccactatgcacatgcggattgcttatacatagtttatattataagctttatttagtgtaatatttttgaaatttagttcattcgttgtcaatcataagaaaattaataatacttttgcccaccattaagaaatcttatattatcaagattatcccctccaaaatcaagtaattcaaacttgaaattattttctaacatagaagattttttttcttaaatagcacacgcttttacttctataaatacaagcaaatgttatcttttctttctcttttttcacactcatgatcacatctatatataaacttgctatatatagcacacatcctcatctatatatatacactcccattttaacctgaactaaaaacaagaaagaaacatattacacgagaaaattagagaaacaaccaagtaaataaaataattaggtaaccaaacatgccaaacctcatcctcatcctcgccgctcaaatcctcctctttaccaccgttgcctccgttggagattttgctaaagaaatgaacccgaaaaggttccacaagaaggagaaactcacccatctccgagtctattggcacgacatcttaagcggtcaaaaccctagctactgccatcatgattcagaaggcggtttcaaactcctcaacctccttcggatcaatcacaatgacggacaacgcactaacatctgatgtgcccgttaactcgactgtggtaggccagtcccaaggtttttacgctggagcggcccaacgtgagctaggcttcttgatggcgatgaatttcgctttcaaaacagggaagtacaatgggagtacgatcacaattcttggccggaacacggtgttctcgaaggttagggaaatgacggtggtcggaggaagtggaatcttccggttagctagaggttatgtcgaggctaggactaagtggttcgatcctaagacaggagacgccactgttgaatacaattgttatgtcttgcattactgatataagagaaatagatatgtcctctgtgtaatgttaacttgatttaaatgcataagagagacattaatacttaataataccttaattgggtgttcttttgttggtgagactattcgttcagagaattgttttgtcttttgataaacttgtataacaacgtagtttaattacaaggatctctgatggattaacgatgaattagcccattcacttactaaccaaagcttggaacatatatttgtttagtttattattcacttgctaatatgatgtagttagtcctaatacaaaataatattatctgatcaaaatatgaggaagtttagttgcattgctgtttattatttacgtcttatacagttatacgttacctaattcactctataattaacacatgctcatcatgcagtacttcgttttagtaggcaaagacttacatacccaccagccaccattatttattgtactggtaatgtgatgcattattttgcttttcaggatttgatttttgtaaaagcatgtaaggtacacatatgtcgacaccccactcatgtgattttttaaaaagcatgtaagttccattctttgtaatgatctagaacgtcatttgtataaaagcgtcaagtgtttcctatgaagttcacaatcagatttatattcccctccggatattatcttcaagggcatagatcgagaaacaagaaacatcatcacgggaagaccaaagtgcaaacgattccacaacttgatgaagtaatggatacgatgaaactattttatccaagttcctaattgtattatctctttgttctatttttttttgccaaggattcaaatccaaaggttcctactatgtaaagccacacttttttcatttataatgatattgacattcatagcaaaaagaaaaagtcaaatattttgtgtaagaaaaaaaacatattgatctcccaattcaccacttgcatccttccacgttgataagagtcaaccaaactccattaaacaaagaaagcttacgactaattgacgagagttgatggcctagtgatctttaaaacttcgataactgagactacgatggagtagattgtaatctatagtgtgctacacttcaaccacaatactaatgagtaacgtagatataacctagcgtacgtagtttcatttgcatacctttaaaatttctaatcttgaaatgaaatgaaaccgctatcaagaaagaaagaaaaactaacttgatcgaactatagaaattctcaatatatagcatcctataaaatccttggaataatactttcgaaaaagtactggtatccactatcaaactatgcagagtacgaactaataatatacatcgattggtctttatcacacgtttataaaaaaaaagaatccaacaaatcccaatattgtgtgttttaactgatcacaactcacaatatccaatggatcaatcatattttatggagaaatctcaaaagaaaacgtgccttatttcatctctatttatacacacacaaaacactcgtttatttatagcacaaaccttcatctagagacacaaaaaccacaacatgactaacctcatccttatcttcgccgcacaaatcctccttttctatgccgttgcttccgtcggagatgaattgggaagaaccatgaacgggaaacaccttggcccttacaaaaaggagaaactcactcatctccgagtctattggcacaactctgtaaacggtagaaaccctagctccgtgatgatccaacagccggtcttgaactcttccttatccggatcgatcaccatgatggacgatccactaacattcgatgtgccaaggaatgcgactgtggtgggccaagcccaagggatgtacgtagcagcggcccaaggagagataggcttcttgatggtgatgaactttgctttcactacggggaagtacaatgggagtacgataacgattcttgggcggaacgtggtgatgtcgaaggttagggaaatgccggtggtcggaggtagtggaatctttcgatttgctagaggttatgtcgaggctcgcaccaagtcgtttgatctcaaggccggtgttgccaatctacatatacatttttgcagccattttaacaaataaatcttagagttgaacttatttacaacccaatgccattagcattaaatttttttttcaaaataattaattttacattaaattcttaatttaaattgtcaatcacattatcaatcaaatttaatccaaacaaactgcacatcaatcctttaaaattagcataaaagtattttgttaacaatattttaaaacaaagttttttgtttaaataaatattgttcttactaaacgttttttgtttaaataaacaaatcatgtatttgaacttatttacaatgtcatgctactgacattaattattcaggcatgaaaatatttaattaaagatttaaatcttctaaattcttgcttttagaattattatatcattacctaaaaggcaaaaaatattaattttttaattattattatttatatatttaaaattcataaaacactattaatatttaaatttataaaaagtttaatatatcaaaaaaattaacatcattatataatatatagagtttaaaaaatctcaaaaaaaaaatcgtcatattttgtgattcaaaattttaagaatgaacatatattaactaattggcgaaaaatgtatggattcaacgtcccgcaacgaataaaatattttgacaatgattcataaatatattataaataagatcaacattaataaaataaataaattttttttgtggacgggtttggcgggacgagtttgacaggatgttacttagtaacaattgtaaactataaaataatttacaaatttttacatatattaattttaaaaaatgaattgtctccgcggtgaatctagtgttgaatataattgttatattctgcattactgaaataattaagtttggaatattgttcatttgatttcattacttatttgtttttatgtctcgttttgttatgagagtgttattgtcttttcccaagttaaataatgtattttatcttgtaatggtttgattttattcatctaaaaaataaataaataagtagttgtttatatatacattaaacatacattttttggtcaaattaagtggcacaaaggctctactccgcgttaatttggaaaatcatcaactgattagcgaataaattatttgaaattttgatagaaaataaatgttcaaataaatataatgattagttagcccaatcacgagctaatcaaaccttaaaaaaaaaacaccaaatcaaacctatttattgtctaaaaccaattttgatattacacggagaaattaaataatacatttagctacttttttgtttgaaatagaaaagacattcaaaatagtaaacatataaaaccattgtaagaaaagaaatcaaattttttatttcttaacaaaaacgtgaaacgtttgtttccaaattagtcgcaagtcacggaccgtgtgacgcaaaaaaagtccattcacatcattattacataatttttgtcataaggaaaattaatttgatttttccaaatttttttggttcttcctcttcagaatatctgacgtggcataaatatcgcctttttcacatcgcctgtcttcttttctctctccattttgggaactttcatccataaacttctatttttctcatcgcaaacttgaaccgtcgtaaccctaaatcgccatcttcatcatcggcaaatcgaatctccgattatatatcaaatagcttaccaaatccgacatgacccaggccctcgttttcggaggactataatgatcggactcttcgtgtcccgtctcgattgcatggggtttgagctatgccggagcttcgccgtggagtccgccgtggccgtgttactgatgctgtagctcccaatcagcttccgcaaacacctacagaaaagaaaccgaagaagagtaccgttaaagctccaaaaccggttgccggcggagttacaggagttgcagagaggccgaggactagattagcggcgaggaaattaaaggaggaagataaagagatacctcaggagattccggttgttgtgccgtctaaggatagcgatatcgataaaaacaagggtaaagaggtagtcgttgaagaagagaagaaagatatggctattggtaatgatagtggtggctctaacaaggcggctgctcaggaagaagaaggaaatactgctcctttccctgagagggtataattgatttgcatagtttttgtgttgtttggggttattgaacttttcattgtaggcttgcttatcatctttctatggtaatgactaacgattccgtatcaggttcaagttggaggatcaccactatataaagttgagagaaagctggggaagggtggttttggacaagtatttgtcggacgtcgtattagtggcggtaatgatcgtagtgcaggagctagcatcttggaggtaatataactcagtctgcgtttactgctgtggaggattgtcaccataaatatcattctattagcttagttatgcttacagtgtctcacatcttcactttcttatataggttgctctaaagtttgagcataggagcagcaagggttgcaactatggtcctccacatgagtggcaggtttacaagtgggtgtttcgattctcctgtctttctttcaatgtttcttaaattcatttacctggattgtaggtgcttccttgacttgaaatgtgaaattgacattttacttttattgtgaacagcaccttgggtggtagccatggagtccctagagtacatttcaaaggcaggcaaggagactattatgtcatggtactggattccccctttctcctatttctgtttttttctcctgtctgtatcattgaagttagatcctctcttctttgttttggcctcaggttatggacatgcttgggcctagcttatgggatttatggaatacttcagggcaagcgtgagtctccattacacatccttggggagctcttgtctctttttcaattagcgttgtttccatacatgagtatcctaagttaatttggattcttttggaattgtgacttgaaatgtggtgttactccctgtttttaaaaaaatacataagtccatactgagtaacattttgcttttaaaaaatcgacttccctaacaattcttctccccctttttgctttgcagaatgtcctcggaaatggtagcttgcattgcggttgaatcactttccatccttgaaaagatgcatgcaaaagggtttgtaattgaactttatttttgtttttgtatttaattaggttgtccgaggtttcttctgatatcctgtttggagtctcggcacctctaagttcttatgttttctctctattaactagcctaacaggtcatgttttacttcggtttcagttatgtgcatggggatgttaagccagaaaatttcttactcggccagccttcaacgtctcaagagaaaaaactgtttcttgttgatttgggactaggttgatttcattctctttgttattcttgctaggttcttctttacctttctcatttttcaaccaacttttcagctacaaagtggagagaaggtggtagcggacaacatgttgaatatgatcaacgtcctgatatgtttaggtaatatattttctactgttacctaatataatttgttttatactcgctcttaccttttgttgaatctctctcttcttaatttttatagagggacagttagatacgcaagtgcacatgctcatttagggagaactgctagcagaagggatgatctggaatcattagcatatacactgatctttcttcaccgaggtagattgccatggcaaggatatcaggtactgcagacctatcattttgttttgtagaatcatgttgttgcatgattctttctctgctaatcctgtctcttactcaattttcagggagataacaagtcattccttgtttgcaaaaagaagatggcaacatcgccggatatgctttgttgtttttgtccccctcctttcaaacaatttcttgagatcgtggtaaatatgaaatttgatgaagaacccaactatggaaagttagtatctctgtttcaagacctcttgggcgaaaatccggcaattaggcctataaacacagagggtgctcaaaaggtgacattttcatgctgtatatctttccctttcgttcctatttggatatctaggagttgttgtttaacatcttgtaattgttttcttttgtgctagatcatattccaagttggccagaagcgaggtaggttgagcattggggaggaagaagaagatgcccctaggaaaaaggtccgtctaggagtccctgcaacgcaatggatatcgatttacaatgccaggcaaccaatgaagcagaggtaaaaaaattcatggttaattatttatacagtcagttaactgctgggactgcgtttgtgtctcattttttctcttggttatattataatcttggatttttggccttaatgtgtctaaaactatttttggactcacaatttatgtgtttaaccaggtatcattataatgtggctgatataagactggcacagcatattgagagaggtattgcagatggtttgttgataagctgtgtatcatcatgttcgaatctctgggcattgataatggatgctggaactggcttcacgcaccaagtctatgaactctctcctgtattcttgcacaaggttgtctgatgtttctctgttagttatttttatatctgtgttctgtcaagatgatcttacctgagagtgaattctgttttgaatcaggaatggattatggagcagtgggagaagaactactacattagttctattgctggtgcaagcaatggaagctccttagttgtcatgtcaaaaggtatctacacttttcatgaatacttttgaacactttcgtcattatggtattttactagtctctgaatttgtggcttattctatgtttggttttcaaatgaattatgaaggtacgcagtatacacagcagtcttacaaagtaagcgattcattcccgttcaagtggataaacaagaaatggagagaaggcttccatgtaacctcaatggcaacagctggaaatcgatggggtgttgttatgtcccgcaattctggctacagtgaacaggttagacttcaccgatatagatgaatttcttccgtttccttcagttttggatctgtcgcgttgatttctaattctcctgttttcgcttatatctcctctacaggttgtggaacttgattttctgtatccaagtgaaggcatccacaggcgttgggatggtggattcagaatcacatcaacagcagccacaaccgatcaagctgctctcatcctaagcatcccacgtcgtagacttgttgatgagacacaagagacgttacgtacctctcaattccccagcacacacgtcaaggtgagtagagcagctataaaagattactaatcaatatcttgaactctttttctcccttcccatgaacaataccggagatgcaattttctgttgtgcaggaaaaatggggaaagaatctctaccttgcatcgttaagctatggccgaactgtatcttgagacttattagtaaaaactgttgaaggacgagagaaatatgtttctaagtctcggctcctattccttatccaaccctatggcctctcaggctctgttgtgcttcttcttttttttcagttgaattgtgaagcaaaaatgtggtgattgtgttgtttattccccccttgtgaaggggattgagccataatcaccagtttacctacacatttccctcgaaattgctatatttaatttttaaatcaagaaaagatatttttgtcaccaaatattctatagttgtccaattctgtaacctaattatcgaattcatatcgaaacaggctgttctctccatacacgacctgaaaccttcaacttcagctccttgtcggtggtgttgttgtcggtagagaagaacaaagccaatttgcgagtgatgattaagccatcttgactatcacgaaccgtcttgtgactgtcacgaatgctcctcggcacgccttgccatgtcagctttctgccattccctccgacctgcaaactatagctgaagctcattgcctcttcttcatctcccataaactgcatgaaggccatgtacattggtgttttcctcaggtgaaacgcttcgaagtacaagcagaattttcgaccacaacaatcgagaagctgcatcgtttcaagtgggttaaaacttaaaaattcacaaagttgcagaaacagagcaagataatcagttatataacttactgttaacatccaagtagcatgatgaagatgtttaggatcatgatgaacatatctgtgactgaaactacgcccatcactcatttcaacattgtgatcattccttagatgcagtagtagcctttgaatatctcctgtgacatcacacttggctcctgagtgtggacaattgtacggtttcttcttagggttttcgatgtggtcgttgggacactgcaataggatctgtatattacttgttgtgttcttattgtagtagtatcaatatgatatgatatacatacctcgtagattgcagaggatatctggtttgtatgaaccggaaaatcgagcaactcatgaacccgagattccacctgaaggtcattgattcgaggttccatttcgcaggaattaatgaattcacaagccaagtgatgaagtgaaagaggagaaaggtgtacgtttgtacatatgtacatacaatcaaccacatagatacgtttacgttgtgtcaagtttcaacgtccaataattggagacaacgtggagtaaatggtggatataggagttggttccggagattacgtacgtcaaagagcttaattgtaggagagaaaataatacaaacaaaaaaacatatagtaacatgacttgggattgaaattacaaattagtcaaggttcttagttacacgacactcttgagttggagttgtcatagcaagtatccaattgggtcttgcaagttgtaaccatccaaatcaagatgccaagtggacaaatgtctcttagccaaatcaaatcattgctactgattgatcttttagtcactcatggtcaagctaaagaaattgcatgagaaaaaaataaatttccaaagatgaaagatctagcctgcaacattacattgattactctgtttctgattaactcaaaaccgcaagataacagaatctaaactacaggactttcggatgtgaataaaagctaaaaagaacgatacaatccgagcttcgtttatgtctctatcctcctggaaacttgttgtaagatgagaaaagaaaactgtcataaaggcaatgaaagacctgcaattccaaagaaaagattcatgtcaatctattgaactaactaagcaacgaaactctatcaaaaccaaacttagaagtaatgtgtgattttatcagttcagatccatacacaaacataaaagggttcaacttcatcagatttacaaatgatgatgctatatgatcacatacttctgttgctgtcaagtttatcaaaggaacttatgtacatccttatccgtagagctaactatcggattcaaattgatgcatcatcacatttatcgccatatacacagtacaaaggatacaaattgcaacacagagaaacaacagaatgtgttgtgtgctgatacacctatgtaaagtaaacccaaatggtaattccagtgctcaagaacaaaacaaaaactgaccttgaggaactaatccccagattttggattcaacggacaaacttgagacgagcctggacgatgctatagcactgtgcagaggtatcatcgagctcaactccactggtaatctgaaaacaaccatccaacaagttcatcaaatttgtaattttgcttagaaagattttgactttgttgattcagatttcaaaattatcagcaagtaatctacattgttgcagacccattgatagtgaggaaaaaagaaggtttttgtcttctccatttgatagtgtgaaatgatacaaaagacaaaccttgaagatcgattgagacgacaactagttgctgaggaaggtgatgcagatttgatgggagaggggagtgatgaaacattggcattcttgttgctgagattttgacatagagactttaatcgagacgagaatctgcctaacactcttgaagatgccattgccaggaagaagcaaaattcagatgtgatcggagattttagggcttaaagggttcttagtgagctaggtcccgggtcgggttacaggttagtttacgggtcgggtaagtaaataactgaaaaagccaaaattatttgataagaagaccggtgtcgaatttagggctggaagacaattctcgatcacttcttttcgcaaattctcttgagtgtgacaaaatcggaaactgcgagctctgaattcgtaacccttgatgtaaaaactcaatctttcttcccactgttctgttttgttctattttcgatcgaacacaaagttgttatttttcgagccctttatctttgtaataactgattccgttttcattgtatatgtctgtttattgaagtttcagctgaggaatcagttacgaaatgggaagcagaggtaatcgtgtgggagaaagatggaatgagatggattgtgatgagaaatcgagtgtgattcaggaagagatcaaaagggtttgtaaacttccatcaaacagtgtttatgcagttcatcgtctcaaggttctcaacaaaatcaacgaccttttatctgtccaagtaagtcaatcctcttcttcttcacattactactctatatgaaacacctttgaaactaactaacttatgtttctttgttggacagagaacattgtctcaagagaaggagttggaattgctattcacacagctctccttgtaaaatccagattttgatgtataaggaactaatgtaatataactttttactcgagattgcttgttgattaatgacatggcaacaagctagtttcttaagaagttggtgtttattggttttaattgtatgttttagttttccctttgtattgatcaattggatgaggatgcaatgaaacggtttgagtttgaagttgagaataatataccacagtttgtgggatgagtttcctttaggccgtaacatatttcccgatagtgacactcggatgatgaaaacccacaagtcgctcaaattggaagtaaatggcacattcagagaagaagtgagacgcccattaatcgttaggaatggagttgtatattggtcttgcattcaaagaagctatgttttgaagtgcgagagatgggagcaatccaagctaagctataagcgtggcatgggtggaattgtccttggcgcgaatgtgggagaaggtttgtgaatggttgcatttgtgtactccaaatgggtaaattcaagatgttaaaaaggttgttcaaggataaagctgagggaagactcaaaatttatgcctaatttcattcaagagtttaagaaaccaaaacacagaacacgatgcatcagaccaccaaaccatcaaacaaatgaaacatttccaatacctcgagtgtttttttataaacagaggcagtaaatgattctcttaacttatctatctatttccatatggactcctacatctaaacaactagtatgattttagttaaaggccgagctgattgtatcacaaaaccccccacttctttataagcagataaatagcaaaacacaagttaatgatcgttcaaaagaacatcaaagtcaatggaatgaaacaaaagaagatgatgcaagaaaaatataaaaagtagtgtaaatggaactagttactttctttccttttgcccggtttgttgatttgtagttgaactaagcttggaacataggaagaagagcacacaagtggaacacagtaagcttggtacgagttcttcgcgatatttggggcaactcccatgttgacagatttgaagtattcatcttgtccaataatataaactatttggtagcgacaggtctcagtcggtttatatctatctaaatcaaaaaccacagcaactttcttctcctcatcaatgaaaaagctcccagaaaaagtgtcaaccggaaaaccagtggacgttatcaaaaacttgctccacgaaaccgtattgggatcaatcttatttgtaacacaaatctcgattgtctcaaatgccccccagcgttgatataacacagcgagctgctcttccctaacacaagctagagacacaaaaaagtctgcattgtaagagtgaaacggcagtggcagaggcggtccaaatctctcccttgtaaaatcgaaacaaagtagaacatcttcaatatttattgtctttattcctcccactgtttctttcttttgcgcaggaaaataagcattccctttcaaagacgcgccacgaaaatgagactgtatatcccactcaggaatgacatcaagaaccttccatgaattagagctaaaatcgtagacttcgtacccaaaaacgcggttgctgcttggatacaaatcgaaaatcctcaatattttgtggttacggttgttatcatatccaagagcatacctatcttctatctggtaattgtttctcggatggatccacctagtttgccccaaataagggttccataccaagagccctgtgttgtccttaatgatgcataggactaaaccgtcacagtgaaaaacttgagagacctcgatttgatcgagtttacttacttgctttatagatggctcaaccaactccccgtcgtcgtttctgattccttggagatcaaatttcattgaacaaacccttgaatccttcatcataaaccccagaaacttattctctgctgctgttgcttttctaccacaaatctgacttttcgataaagagttccacttttggcaagtagatcgtatagccctcagagatgtcagcggaaccctagagagtatctcctctaccaaatcgcctggaagatcgcccatggtcgtcattctttcaagcttcagcaatttaggtgtggacgttcttaaaaaaggctgttctattatgtggatgaagaagctctattaacaaaaaacctaaagttccttgagacttgagagacactctacttaatcccgaagcttccatttttatctttagagcccatattactggagtttggttggtttcggttgttgctggttagtgttggtttatatctggttcactaattgcagcatattccaaacgtcatcatcgattccatacacagaaacattcttccattgtttgtataaattacgcagttttagaaacataaaaataacgcccccaaaaatgacaacaaaaaaattagaaaagagaagaatttatgtgatggttagtggagaatctgaacttctctcttgacatgttcagatttctctgcaaaaatgagttaccaaaaacagtaacaaggaaccttttgagggggcaattggtcaattaaaatgcagggggtttaaggggaggttacattgccctgcaaccacgtgggacctgcttctgcctctgcgtgcgttagctatgacactgatcaacgcaccacctgtgtctagtactgagttggcacccattagctttaatccaagagtattcatcagacacgatagtttgctctcattactattttcgtccaattctttgatcttgttagcttgctcccgggaaagaatagtgtaaagctgaagacgattggttggatcttcttcaaagttgtcaaaacaaactctgactaatccaaacgatttcggatcgtcggttaatgggttgaagacaaatgacaacttccctattgctatgtcgggtcttttgaacatatcttcaagaacgtttatgttaactccactatatctttgaacaggtttctttagattactgcgaagataattcgcaacatgtagaatctttgaggcttctcttaaaccacttaagtaggcaccgtgcattgtggctggatgttgccttgtcgtggcctcaccagcgaagaatagacggttactaacactttcagcaagaatgtcatagtccacaccagatgaaccaacccttacatgagaatatgacccatatgacaaaggatcacttccccatctagtgcaaaccgtctgtattgggtcaggcacaacaacacctttaggaccatatatgcctacaattatgtcaaaaacattgttatggcgagaacttggaagcagcaaaaggttcatgacgttatcaaatattacctctgagtttttttaaaacacggtgaagtaaaacagatggttctgtgcactcaaatcgttgagcagcttctccagcaactaaggcaaccaaggcagggccaccagagactgtatggtaggcatagaatagaaaaaactctcctcggttgatgctactctcgttgaggcatccaaacgtgtctaactcatcaccccaaaagacagatgggaaaagcatggcaactttgttcagaaggccaaaccccaacctgtcaattgctgcttgttttcttctaggtaactccggctcaaacttgatagatctcttcttcaagaccccaagcggcacagtgcaaagaatcatgtcagcttgaaatatctggctaccagaaatgacttcaactcctccgtctccatacttgatagtgtcaacgcttttcccatagattatgggtagcccttcagctaatgcatttatcagtctccagtttccaccagcaagaaaacaatgatccccacccatttcgtaaggatcatcctgatcccagtaagcagctgaaagattcgaaagacacccagcgttagcatattccaagttagcaaggtgccagtcaaaaagttttctttcctctgaatctttagctacaccatacagtaccctaagagtctccaagacttctcccaaagaaatcttcttagctgccccttccatcatctcccttacttctgtgaccttgtcaagcagtttgttgaaaccaaactcaacattggagtcagctactttatcgacaagtactccctctgaattatacaaaggacagttgtctctaaccttgtgaagaggaatagaaagctgtctcgcaagaactccaagtgggttcgcatgtaaacccgtgattacactaccaccgagttcaacagctgcaaatctatccttacctcccatcttctgagtgtacactcgtccaccaggacgactcctaccttctaaaacaagaaccttgaacccaaatgacaaaagctgtctagcagcagccaaaccagcaagtccagcaccaacaacaatgactgatccctcagtaccctcttcaggaatataaggagcaaacaatggagaaaccccaaaattgatgtatccattaaacaagagaaaatcataagcagctgaaatcaaatgctcaaagtcactactaacagtttctctaatctgatctttgagtagccaaattccaacattacccctccacctagctactatatgattccgaacaacaatgtaatcgttctgctctttcccgcctaattctcttacaactccagctcgaatctcttcctcaagcaattcgtcgattgggaaacctacggacagagctatcagagcctcggtctcagtctctttctccaaatcttgcttcgtcctgtactttttcttcgcctttccacctaattgcttctcaatcaattcatccatcgcattctcatcgtagttcttcctacttacttttctcctgttcctcctcggagccgtttcatccgacgccggagaattcatttctggtcaattaagtcaccaaatcacctccgcttcgttttacttagaaactaatcgaccctaatctcttcgtcgtttcgtttcacacctgagtttcacaatcgtgtccaatctacctcaagttacttcaacaccttcgaagattaataaccaaaaaatcgtcgtcgccaaattgatcggagaaatcttccggattcgtgaggttacttttcccgatctacggttacgattttcgaatctgcgtctgcgtggtttgcagaaaaaataaaggtttatgggcctaaatgaataaaatatattaaagcccattgggcctgtaaggtgatattaatttagtctattacacaattgtggatgataagagtggagaagatagttacatgtcattgttgacataaccaaagcggcccatacatgaaatgatgtatggtaatgttaaagataaagagaacatgcaatttaatagtgtagggtcattgtctcttctcttcatcacattatgatgaataaaaattgacatttcgcccccaatgcatataatatctcacacatggcctttccacatctcttccattgattcacatgtcatgtacttctttttgtgatccaaattctgggatcactcaaaacataaaagatcttaattaaaccttatccatcttaatatcttatggttatataccatacaaaaggtaaattagcttggtttgattaacacaatatttctagtaacgtgtgtgtgtgcatgtgtgtttcatgagcatacacacatagatcatacatgatgattagacaatatgtgcaggtacctgtataaaggtgcaattattgatgtgcggaagttgaaagtatatttgtaatgatggttgaataaaaatacaagtatcttttttcatgctaatagtggtacactttggacctgcatgggtaataataaaaacgatattgcaataaggagaagctcgaaaatggcatgtagtggaccatattattcattgtttcggcagtggttttgcatgattattgtctatacatatggccacgttacgtgtgttcaaattttcttgttttatgcaaacaattgttgtgttcgaatttttttgattaatattttatttacaagattgttactattgttttgcattactccattttatagcgaccggaaaattaattgtggaagtacctggtacaataattaattacacttacatttatttgtttagttttactcaaaatgataataaatgtatgttaccgttctggactgatttaatgcaatttctacctcgaaattgataaccgcattataactaaattaatacgcaacgtcgaaaaaaaaaaaaaaagtatttaagaggcaagggacagttcactgtatcattatcattatgaagacacaaataaccattggagtagaattcagactgctcgagtgtttttagtggcgcttgcaaaaataaatgcgtatagttgtggtttactccactataactttgaaaaattatggttactagttcagtgtccaaatgcaaagtatacgactagtgggtcgctactcgctagcctactaaaacgtaggttacgagataagtgattaaatttagggtcattgtttctaaacaattgatgtatgaccgattagctaaagtatgcacataatctaataacgaatatgaggaaacagagtccttaaaaacgtgcatgtgattttcttaatgaaaaatggcccgcacgatgcaattgtattttatattaattcatgtttcaaattattgcaatgtatgtcgttagagaaaccgacgtatgaagaattctataaaacttcgttatttctacatacaaccaattagaataattttggcagcgttacggtatcctatttgcgaattcattgtgaaattgggaatttttgtatcaaatttatctcaacaaacgttgagtttttgttgtaaccattcatcgtggcagttttagctgtctcgacaacagaagacaatggacagctttgaaacttaatgaactaattcacatatttttgttccgtgataaaattcaaatcgttttttgaatatatatgaagtgcatgaagctttgattcaaacgaaaactataaaatatgtataatgtatatagactattccttaaattaaatattcaccacaaactgattagaaatatatgtattgtttttttttacgtcggtgtggttactactataaaacattatacatgctagctcatgccggcacctaccccagcaaaaaacgccattcaacgttgtcgttattatagacttttggtttttaattagttttgaagaattattaattcatgaatgatcaacttaattgtatatttatacccaaatagtgttacaataacgtctattgttgagaaggaaaaaaaaaaaaagtgtatagttaatgtgtgtgacaggaggagactgatagcagctgtgacagcattggccgccgttgaagatgtgtcccgtgacggtgacagagctaacgtcaaaggacgttcgggacctacaataattaagccctaacttagattaattatctcaactcttttaacactaatcagattcaaacacaaaccaacatattgaagtattgaactatattcacagataaaagaatatataacttgttccaaattctaaaatagacaaataatgaaacttgatttaagagagatcgtgggatcatgcgtcgtggaaatttgcatagaggaggaccacatgatctaaggattttagtttttaaaatttttgtagtaataatgagagaaagtaaaaaaagaaaagaaaagagagtgaaattagagagataatgattaggggatggaatcggaccccacggaggtttactagatgacaccgaacctgaactactcacctgtgattgtgctctgttctatacttacacattttggaccatttcctctttattttgtgtcttacacattattctaattgtaattaacttccatatcttatactaataatccgatctcatttattctactttgtttgatttcatgcaaagccaatcacgggttcttgttaaagaatttgttttttttatataattaacaataagtaatggtgcgtcgtttagtcttgaatgattcttaatcaatagattattgtaaattacaagaacaaaactatgcatttcaagtattttaatgcaactttcaaaatttgatcagatgtgtcggctgtgactatacgtacttgtttttttttaattgtcaactttgaaaattttatttaaaatctaagtacttgtttagaaaatcacgtttatgagatggagactgcgtttgattcaaatttgtcatatattacaacgttgcttatcgtttcccgaggtaacaacggacggtatgtcagcttggaggattttggtgatcgagagggtatttatgtgaaactaaaatatggtgtcataaagctacaaaattttaaatttcaaactaaagagttttactacattattaaactacttctgctaaaggagaaaagtagaaagaacaaaacaggctatctttcagttcaagcaatttttgagctaagcaagcaatttcaaatgtcttgttattaccaatagattgtaaacaaaaaataattacaccaccccaagtaataacatgacattttcttatggtatttaagtaagcattttaacgaatttaatttcatttacatcacataattagttttattttagaaaaagtagtagacaaaactatacaaaattctaaggagattgagttatgaccctaagcctattcaagctgtacataaattgttagtcacaaaatttgagtctttcacttttcagattgtagtccctcccatattcaaaactgggacctataaaggtaaagtttggcttccccaaagcctaaactaaatctctccaaagtcaaaaactaataatattttaaatctgagattagtatttgtttattctccaaatgcatgttttgctaaagaattagcagctgatcaaagcttaaaaaaaatatgtaaaggaaacactttggtgggtatcataaccaaatgtgttggactatggattaaaagttcaaactagatattattataagattaattatttgaaaaggcccaaaacatattctactatattttttttttatgaaatcatgaagagtagcattggaaaagacacaacagataatagtaataaccagaagatggtaattttgttgttactacaaagcaacacagaagcaaagagagactagtagactagagaagaaaaaccaaaaaccctaaaaaaagaaaaagagagagattgttttcacattttcgcggttttcttcttctccttgtatttatctctgaagtcgtgcttttgatgtgaaaggagaagaagcttgaagacagacaactttaaagttgacgaaaccaatgcttctggtaatatcattttcttcacaattgtttgtgttcttcttcttcgtctggtctcactcctatagttttgtttaatcgttttcgtggcggtgaaattcatgagagcttaactggtgaatcttttttttggttctgtaataattttataatcttctttctctggcagtttgcgacgaaactaatttaatatataaatgtaaatctagcagccattcttattggtttattgttgaaatctctacgaaaattcctttttattcgatttcgtggttttaatcttcaccattacgatttttcttcagctccttctctctttcaattcaatttttactctttttgtatattgcaggtgaagttttgagcttttgagcgatcttttgggtcttgctcttgctcttgaggcagagaacccatagacagttgttttgtctgtttgttggtgtcagatccaaaatcaagaggctgttatagctttgacttggaagtgatttgacacaatgaaggaagaagattcaaaaaaaataagagggtaggaatctatttggtcgcttttgcttcctcctattctggggagaatttgggatcttggagttgaatccgttgtgagaagaaggatctttttgagcttgtgtactgtgtcctctcagttgattcatcgcagagagaagaggtcctgtcatgtctatgagttttgtattcatctgaaaggtcttactggaatgacttatcaaaggggagagtctttggttcctgtcttgatttccaacttggtgggggcataggccaaataatgcaaacctaaaatccttgtttcttccagaatcttgtgagctttttaatctctccaacaaagtacaatttctctgaggattgtgttattacacagagaaaacaaaaagagggtccaagaaaatctcttgcattctcttctcctctctctggtattggtatcttcaaatgagtcgactacagaagcgagggaaacaggaaaagcctgttgtatctgatggagctcaaaaggttattgttgctgttaaagcatctagggagattccaaagactgccttgatttgggctttgactcatgttgttcagcctggggattgcattacccttattgttgttgtcccttctcacaactccggtacttttcctgcgtctgtttcgttgatctttagttgtttgttctggtcttgtgttgtggtggttgattcttatctcatttgctttctgatgaatttgtaggacgaaaactttggggtttcactaagagtttccctatgtttgctggggattgtgcaagtggtcatcggaaatcacattctgaagcactaccggagattaaaagtgatctcactgacacttgttcccaaatgattctccagcttcatgatgtctatgacccgaataaggttagctctttatgtatctatgtttagctatgatgatctcgtgaaatcatctcatgtttctcatgctcttttgttgttctttgtgattgctttgaagataaatgtcaagattaagattgtttctggatcaccctgtggagcagttgctgctgagtcgaagaaagcgcaagcgaactgggtagtaatggacaagtaataatctctactttcatatatatcctgttattttcctttagttttgtgaacattttaaagttgaaatctcttaatgatgggttacacaattatatttactttcaccaatttacactggtgttgtgtggtttgttttgcagacacctcaagcaggaagagaaacggtgtatggatgaattgcaatgcaacattgtggtgatgaagcgttcgcaggcaaaagttctacgcttaaaccttgttggatctcctaagaaagatgctggaaaagagtgtcccttaccatctggaccagaagcagcatctgagaaacactcaaagaacactaaaggattgttagatgctgatagaggactacctgtcactcctactagcagccctgagctggggacaccgttcacaagtacagaagccgggacttcatctgtgtcgagctccgacctgggaacttcacctttcttcacattgggaatgaacggatacatgaagaaggatggagcattggtgatcaaggagaatgatggtcttgatgattctggctctgaaacagagagtgaaaaccaatcattagcgtcaacgagtatgagattccagccatggatatcagaatatattggcacccatcgccactcatcccaggaggccgaagaaagcttattatggaaaaatgatgacagggcacaaatatccactacaaaggctttgcttgaaaagttctctaaacttgatgttgaagttgggttgtcgtctagtcgaaggatggatttagagtttagtggaaacgtaagagatgcaatatcactctctcgaagtgctcctcctggtccacctcctctctgttcaatttgccagcacaaggcgccagtatttgggaaacccccaaggctgtttacatacgctgaattagagcttgcaacgggtgggttttcacaggctaacttcttggctgagggtggttatggatctgttcatcggggtgtgctaccagaaggccaggtagttgcagtaaagcaacacaaattggccagttctcaaggagatgtagagttttgctccgaagtggaagttctcagctgtgctcagcacagaaacgtcgttatgctaattggtttctgcattgaagacagcagacggctcttggtctatgaatacatttgcaatggttcacttgactctcatctatacggtaatatttgcttaaaattcacatgtgccttggtaatactaattcatattttatccaaaaaaaaaatgttgcttaaaatttccattgaagctcttgtggtgaaaaatgtttgctcagtatcaagctcttttctaggtcgtcaaaaggaaactctggaatggccagcacggcaaaagattgctgttggagctgcaagaggtcttcggtatcttcacgaagagtgcagagttggctgtattgtccacagagacatgcgtcctaacaacatcctcatcactcatgataatgagccactggtatgtataaatatggtcttgctcattcatcgtaacagcagatatccactgtttcatatgctttttcgtcctgagtcaactttgataatatcatcaggttggagattttggtctagcaagatggcagcctgatggggaaatgggtgtagatacacgagtgataggaaccttcgggtgagacacctactaaagctatcattttgctcctgaaacttaacaatttgtctgttgctaaaagaaattgcttggttggtgtgcagctatctagctcccgaatatgctcaaagcgggcaaatcacagaaaaagctgatgtctactcgttcggggttgttctagttgagctagtcactggccgcaaagccattgatatcaccaggccgaaaggccagcaatgcctgactgaatgggtaatgatttcatatctttagttttcagcaaagtaacagaactgactctccttttgtggcttgtgatctcaggcacgtcctctactggaagaatatgcgatagatgaacttatcgatccgaggcttgggaaccgttttgtagaaagtgaggtcatttgtatgcttcatgcagcttcgttgtgcatacgtagagatccacatttgaggccacgcatgtctcaggtaaccaaaagctcttcttgaaatcactcttcagtctcagtctcaggatcattcagtttaagtttctgatgatactaaaacttctggtaaataatgaaggtgttgcgtatactggaaggagatatgataatggatggaaactacgcatcaactccaggttcagaggcaggcaaccgaagcgggaggttctgggcggatcattacagcggtcagctaacgaatgatggctcggataggttcagtgaaaggctgtctgttgaaacgccaagactagctttgagggagagggaaagaagccagaggtttgaactaaaccataacaagcaatactaatcacactactttgctttatgataagtttagttgatagggtatttagtaaagtcctctgttttaagtgatgtggtccaaagctggcaacacagctttttttgtttgtatagtggggtaagatgcaaaaacagttgctaaatatgttatcaaggaatttaaaattgtttttggtaaaggagtattaaaagaacaaaacaacaagagaggctttttctccttttttcgaatttgaattattggtttaggagagtcaatagaattgttctgcagaagaaaacaaaacaatgagagggcttccttctccttacgacatcgacattggaagtcttcaaaattgtaataatggtgcatgagagagaagtcatgtttgaatctgactttgcctgtcaatacagtgatgcgttggtcctcagtatcttttctacttatccgcatcaccaattatcaaaaaatttcaaaattgaacacacaagaaaagcccaaagatggcgaggactttggtggggcagtacgttcagaggttccatggattttactcactggatcatgacaaatatctgattgtctctttctatcaacgtgctcataacaacataagattttggagatcttattagtaaatcttgaataaatatattcatatgtatctcttaagtcagtgtcagcatagaaggattcatcttcatgacaacaaatagtaagtgaagatttaaaataagaaatacagctttcatttgcttatgatctctatatatcttgttttcataagagactaccattggcatatggtacattatccaccacattcttcatttgagaagtgaggctttgtggttatgataatcttttactgtttcctcatctttgatcttgcatatctggaagaaccaaaaaccagggtgtgacattggggtagctgtaatgactatgagagtaataatctggcaaaatttgaattttaaactaattgttgaacaagtgtaagaaaaactactcttactctatatgcatgccgcctcggtctgaagaggataagaggttcccttgaagatgattcatggcatcagtagcttgctcgatttcctgcaattggtgagagtgggtatatagactacaaagacaaaatcaaaagcatgtataacaacttatacctcaaaatcagcaaatgcaaccggcattccgcctctagctcggatttttaaaatgtggaaaccaggatatctgtaagcaaatggatcagatcaatcgactttcggaaaggcaaaaaccaatgattgtttgaagaaacattcaaaccctaatgctgtaggtttcagtcattgtacaaggttacctagataggagttgtttgagttcatcttctgtacaattaggccctagattagctataaacaaggtcgaacaagctcgagcaccagaacctccttcagatgctttctctaagtgcccctgtagaaatctatcagtaagctactgaaccataaggaagtctatatggaagtatcttacagtaagtaacaaataagattttattaatcttcaacgaacttgagaaatagagatatctcaactggttaaaaagattagatttttggcttggacttacattagcagatggtgctttactatctggctcagaatccgcttcgctgtaaatttgcaaagaaatcagaatacattagtcttcttcttttgacctaaaaaactacaaaaccaagcttctaattgtcattttcaaccttttggtagtatcgttttcctttggagaatcgctatttccaggttcctgcacctcatctggatcgctatcccctagatgcatcaacaatgatcaagcagaaacataaagcattcatacatttaaataattaggagtccacaaggtaaccagaacattaccttcatcactctggtcatcctgagacttagaaatttccttgtttctgttatcaatcacaacataaggtccacttcctatccacatagactgttcattactcattgatcgatttaccaaccacactaactcaatagtaagaagagagtaaagtctagaaaatacctggcctttcttttcttctagagtttgatctagctagttctatatgtagatttgatcctgtttgaggatcaaatttcacaccctaaaagaaatgcttcaccacaatcaaataacacaatgtaacaatagagtcacacaattcgatcaaagtgaatcttacatttagctcattcattgcagccaaggcgaatctatgactcgtgaatgttgcaaatgccacaacctgaagataggtaacttcagaaagcttaaacatcgatagaatcacaaagtatacagcttttctaaaaatgggaataaaaaaaaacagaaattggagatttttacaaacctggtcaccgcgtccagtgtacttgagctgacaagattcgaatccatgacgacgacggaagagattgtggatctcacgagccttaacgtcattaggcaagccagagacaaagagagtgttaatcgccccaggttcgtcggcgagcagtggcagctgcggcggaagatgatgaggatgagaatgaagttgatagacgtagaaaggatcgtacggttggtgatacgccattttcctctagccggcggcgaggttgacggttgtattaagcgccggcgaagagagctgacgtgtaaatggaagtgtgagacacactgtttaaatgtaaaaatatgttcctttttgaattttatgggctgatactattgggccttaatgaatggcccaataaggcgccaaaaagtgataaaagtaagcagcccgccaaaaacaagaagcgaagactttgacattattaagtttgttcatacttcaaaacttaaaaacagagagagaatcaaaccaaacttacacggttacaccataaactataattacacataagatgatcaaaaacaatagaatatacataaaaatggagatcaatcgttttaagacgaagggtgtgacgtcagtcctgaagtctcagtcgtcgccgcttcttcatccaaaaaaagatcatccgtcttcctaatcaccgcatggatcagaaccaacacagctccggccatcaacgccgcaacaatattaaacgtcgcgttggtcaatagaagtagaacgatggtaatcaccgatagaccaatcaagaccgcacgatcgtcgatttgaaacctgaacaccttgagaggcacatcacggagaaaataaaggaagatccataggaaaaccaaaccggtaaagacgatgagcgaggtcggatgccaaatcaagctgaagaatatgacgttcaagattacgattgcgtaattactacggaagtaagcaagatttgtcttgattcttgagaaaacatcggagacgccgtgaggtagtcccgtggagtgtaaatcgaacatcaccctccaggagcggcgcgtggctagtccgtctttgatacgttgcttagcgcgtgagatagactcgtgattcactgccggagatgcatgagacgacgtggtaatctcgtcgttgttcgccattagtgaataagatgacttgattgaaataatgtaaaactgttctgatttattgttttatctctctgtgtataatatatgaagaaggtctcttgaatttgcatatggaataaaaccaaataaattagatggtgtgttaaaacattagaccgagtttttttccgtagaaattttgtgatattattacaataatgtagcgtgatgttatatatatataaaaggatgtagcgttatgatctgattcaatttggtcaatgtctgaaagtcgatcgagttcctggaatatgaagttggaagaattaaatagaaaaacttggtctgccacgtccagtgtacttgagtcttgagtggataagattatggggatgaggatgatgtcgatagacgtagttaagatcgtaatgttggtgatacgccactttaaaccggtttgcttctaattggcggcaagtgtggcggtggtattaagcgccggcgaagggagctgacgcgtacaaagatgtgtatgctcaatactgttagaccatctccatcagtaaggaaagtttttcaaaaaattaaaatattaatattttaattaagacagatatattaattgttatttaatagttaaactaataataggataacagctgtccaaattgaatgagaatagtttctcaaagtttctcctccaagaaacttaattctccttctctcctactttttcttccttctctcttactttttccttttttattatattttttttattgggtatctcattgaaagactactgatgaagatgctcttacatatctaatggcgtccgtttagaattacatgggctagaatatttgtgccttttgaaagacctaattatatataaggatttttgcttcaaatctttacattggaaatttgaataaggcctgcatatatatcaaggatttttgcttcaaattgctcatttgtgtgacccaaatgaaaaaagaacttaaatcaagaccaaactttttttcctactttgaaggtgaaccaacctgaataaactttacaacaaaaattgattatttttttgttacggaatgcaaaaagggaatattcattacaacccattttgaatttataatgtttgacttattaatttgattatttattatgtatttcagattaaatcattttaaatatttcagattaataaatcattccaagaaattattcctgagttttgcgaatataaaatactccctccgtcccactaagatgaattttttagaaattgcacattttttaagaaatattgtataaacataattttaacctcttaatatattttaaaaataataataaatatttatctaattatttagtaagggtaaaacgggaaaacaattttaaaatttgcattgcaaatataaaatttctatctttgtaagacaaatatttttcctaaaaaatttatcttttatggacagagggagtaataaaaattataacaaattagaattgttcaaacttcagacagagctcaaaactcagaaaacaaaagagagagagaaagtctcaaaccaaactcacaccaataaaaattgattacgcataattaaaaaaacaagataatatacaaaaatagaaaagatacacaaatttcgagatgaaacgatttaagtcgacgggtatgacgtcagcccagaagtctcagtcgtcgccgcttcttcatccaagaaaagatcctccgtcttcctaaccaccgaatggatcaaaaccaacacagctccggtcacaagcgctccaacaatattaaacgtcgcgttggtcaacaggagtaaaacgacggttaacaccgataaaacaatcaagaccgtccgatcatcgatctgaaaccggaacagcttgataggctcatcacggagaaaatacagaaagatccaaacaacgaccaagacggtgaagacgatgagcgatgtcggatgccagatcaagctgaagaagataacgatcaagacaacgattgcgtagttcatacggaagtaagcaagattggtcttgattcttgtgaacgcatcggagacaccgtgaggcagtcccatggagtggaaatcgaacatcactctccaagcacggcgcgtggctagcccggctttgatacggtgtttagcgcgtgagagagactcgacatccaccaacggagatgcatgagacgacgtcggaatcgcaccgtagttcgtcattagtaatatcgggttatggtttagcgcgtgtgagattgaatagagaaagtaaatgaaaagactgtttgttatgtgtatatatgaattctgaaaggtcccaagaattaggtgatacacatttgcatatggcgttttctaaactaatctatgtttatgaaataaaacaaaatttaattagatcgtgttttaaaaagattacaatatagtgtaacgtgaggatttgattcactacttggtcaatgtctgaaaagtataagttttagatactcgagatttgggtaacagcaatttataagtagatgaattactacatgttgaaggactatatagttaatttgaaagactaatgataaagtaagagacacggtgtcaccgagcgagagtggcattattgaatagtcgatacaggctacacgtgaccccattttagaggagtctctctggcatataactactctttcgccacgtgtaatgtcggcaggaacaatgagtaaattatttatagtctccctcggactttatcatgatttttagtcagcccaattacaaaagatattggcccaatacaacgaaggtttcatgtcacatgctctctctccattggacgatccacatcgataggcttctttagcgagccagactcatggctgctttagaattgatcccgctctgtgaaacaagaaaatagttagcttgtgtcaaagcacaatacatataagatcaaaactataccaaaatgtatgatggattacaaaaatcttaagtttttctccataagaaccagagaaacctattcaacaagattgcttaaatcaaaggtatattatataatgtagctttcgttacaagtaagcagagaagcaaatacatatatgtaaatcaagtagtaccagatccacatcacctattttcaaaataattctacatttttgtatatctcaaggtcttccaacagtctctagtgtctgccgcagcaaacaaaggttctctcacgactgttcagggagactaattaatcccaatagatgggggatatgtttcactgttaccattaccaatcttatatgatcaccacccactagaactaaatggtgatatactcattatatactcttattgttccaatggttagtgatcatacaagattcgtgattgtaaaacgtatccgccatctcttggattagtatctctgaaattgtctacttacatgaaaaaaaaagttagtgttctccatggccatgcaaacttcaccaaaaaaaagctataacaacggaatttcgggctggacttatcatcagccaaacgagaaataactaacaataaatgaaaatcaaggtcttgaaaaactcaaaatagggaataaaaacaagaaaaggctcaacggcggcgataacataagaaatacctatttgcctaaacagttgcccgtctttgccaatatataggcttttctattatgcaacttttgggcctttaacaggcttaacggatggatctcttaaaagtgaagccctcttatccaaatcaattctaaaggctattgtgttaacataaacaactcgtagttacaatagtgagaaaaatgtaatatagtacaattagtggttagatctggttgttagtgatgttcagttgaaacaacacaactttcttgtcttgtcacgttgtttaaatcaatttcagtgggttgttatgttaattacatcatatcatataagtggaggagaaataatatgactttgcttaatcattcattattacatctaaaactattagagactattcagaaaagagaaaaccatcacccagttaaaaattaaaaaaataactagtaactgtaaaattgcttaggaagcgttggcgtaagctaatgcttctctggatccgttaatgtcttcaaaaatttcctaaatctattgtagctttgtttttactttttttgccaaagttgcttttgtactggttttctttgtaacgccacaacttcattattaatgatattaacatatttagcaaaaaaactgtaaaattgcttgaaatagatgtagactatcataatatctttattagaccattcttttggaaatatataaatgattgaaccagaattataacttttctgtaatgattttcttagttaataatttaatatacgaagaggaatagtcgtccttaacatttaaaaaaaaaaaagagagagaggaaatagtcatgaaaattaggattctatatcatatgcataattatcatacacctttgtacttcaaaaaaaaaatatatatatatatatatatatacggtcaacaaaaaggttttgtgattctgtccttatttgccttgtgaaggaatacgacaaaatagttggcatgtgtgctatcgtcttccacacgtgtgaatcattttttgtctccaaactccatcatgttctctttttttcttaccttttgctgtctcactatctttttcacttcccacttacaaaacactcgtgtgacttctttaaccttttagagtttgataatgcaaaactgattctccatttttcacttaagaaaaatgatttatattcttttgatccaaatgggtaatttgttcttcatatgcaccgttgggaagtttatgattgtgtcttcttctgctatccatctgcatatcataatcaccaacatattttcaaataagtctctgtatatcgtttaagagttaagtccaacttgtcaaaaagagattagacatttagatttatttggtccgaacgtaccattttgtctaaagtgtagagcactaattaccacaccctcttgtttgttttgaaatttaaagattacaacaaatattaaataattttgtatccatgtaactgatagttacctgaagcgagtgacaagatggtgaagaaaaactgaagtttcaagacgagccaaatcgagaccagggcacaatctctgaccacctccaaaaggactgaaactactcgtgttcatgtccctttcctattttgtgaagaaatgaattaaatatataattcgtattaagtaaaagattatatgttaaatatattttggtgatcttacgtacttgccatctccagggattaaatttgtagggagactcataataaagcttatcaagatgaactgatctgagataggccaagaaacaccatccttttggtatcacatatccttttatttcaacatctttcatcgcctttctcatcactccaattataacatttcccattctcagtgtctctgtaatcacctgatgataattaaaaatttaattaatcaccttgttgagtattaactaatgaatagggaaaagaagaaattatataccttttgtgtaaaaggtaacgacaagtagtcattccaatatagtggctctcctgtcaattccttcaaacttttcagcttcatgttttcttcctaatgaaaaaaaaagaaattcataaagtaagattagcttatagatttttagtggccaatcatataaagccacgaggtaatatcagcttatcactaatttatttgaatggctgatttttacacaattttcatactaattaatcggaatttatagtcatctacaatatataatggcaacaaaaaccatatgatacaaatcgatatgtagctactaattgactactatactattatcacttgattatggtttaaagttaattaattaccgttaggagattgagggcagcaggagaatcagagaggaatttgacggcaagggtaatgaggacagggacagaatcgtggccagggatcatcatgtcgatcatattgttagcaatcaaattgtgagttaaatgttcacttgagtccttaagcaacacatccacaacatcctttgcaataacatcatcttcctccttgttctttgttttcctaattttgccttctatgattctttcaacttgcttcaccatattcttcttagcttggagagatctatggagttgcgttccagggaagttaattggtaatgacatgagtcctgatatgaaattttcaaactctctctttagctcttctaaatcttctcctttctctacacttatcaatgccttggcaagtactttgaatgcaacctaccagttaaaataaaataaattaaattattaaatgccaggaaggaaaaaaaaaactgaaagggtaatgattagtatttgttaaacaaattagaaagagaatatttgtaatcattatatcaaatgtaatcattgtaaccatgttctataaaatagattaatatttctatggtaacattattatgattgtcccttttaatttcttaatcaatgctttaactcatatataaaagggattattggattatttagaacttttgtaagaaaatattaaattaagggataagtatactgacagtcttggagacgtcttggaggagcacaggttggtcctcggaccatagatccatggattccgacaaaaacttgtgcatgtctctaacgatttgagctttgagaagtggcgactttaagaaagaaccgactaatccatggaaccgtctatgtaaactcccgttgataagaagtatcgacgattttcccattagctcccttaccgtttttgggtaaaacggcacgaaagctgtcgagtcgctctgtaaaacggctctgttcacttcagcatccgtcgacacgatcgtcgccgttccaaaaatatgcgacttaaacactctcccatacctttacatacataaacacgtatatttaatttattagttttagattaaggaacacgtatagaaagagggataagagttgttacatgagacgacgcttgtccatgaaactctcaggacggtctgagtaagcagaagagacgaactcgatggtttcaccgatgacgggccatcccaagcttccgtgtggaaactttggtccgtgactctgggatgtaacatgatgatcattaagttttttctttgaagctggggatgatctgagaccgttgatcttgttgaagatgacgatgatgataaagaagaagaaggagaagaacaaaagtgaagaagaagtgtccattagtgttttaacttaattagccagagacgcacgaatgggtttgtgttttttaaaattggttttttgtttttgggactttctttcactttgaatctgtcttggtatctctttatataactttaatcatggtgcggtgtggcaacaaatcatgtggctggtacttattttattttatcttagattttttgatataaatcttatatctaaaaaagtttttattgttactttgttagagcttctccataagaccataaggtatctcaccaaatatgatatccttattttagttcaatttagtttgagaaatttgtctaaaattttgcctccattggtgagatacaaggtatctcatcaatatcttttgacatttctatgttttaatttttaaaaatttgtatgttttttttcctgttaaaagtatatttttcattcaatcttaaattttatgataaatttaacaaaatttcaaaatataatttctaatttttcaaatttcatttttctcagtattaatgcattaactaaaaatactataatttagtattgttatattaaccttaataaatattaattaaactaataatgtaacttaataaataggtatttattattatatgatttctaacataacaaaaaaaagggaaaataacaatatagaaaattagaaactatttatcattatccattatttgatcaaactggcactagtatatcgattatttgagccaaacatatatcaattattttgttcaaaaagtctaactaattgaagaggtaaggttgtataaggaaattttggtatagaaaatagacaaataatatatcgaagaaaagtgtgctaagtgtcttttggcttgtggggtattttgggtgcgccttcgtgcgaaattccattaggccacctttcttatttcacatatatttacacatttttgtcatgattatacaggatacatgcatgcccatatatatcatgtaaagatatgcatgagaagacatgtacttgtatacaaatgtgtgtacacatgccaatacgtagctatagttgtgacttgtgaaaatcagttgattattctattttagatgtcgtcgaatcaaatgaccttttgaaattcggtataattagatatctacaacaatatatagtgtagtaattaatggctacgatactatatatacgtacgcggatcagaacggtttcttgggactttgaaaaaatatggtttgcttttgatttggttggtatgagaacagaaattagttagccaaaatgtattttgttctattttatttggaaataaaccaaaactaagtctatagaattgaggctgacccgggccagcaacctaaataaacagagtcaattataggaccggctctatacattaatgttaaccttggagtacattacgtaatgaaacgaagctctacaagaaaagtatgatacacttatctaatgctaattcaatctcctcatgattagaccacaagcgcatcttctcactttcatataaacgtatgtcatattaaatagtgtgtgtatgactatgagcggtataatatattagaatccaaggaagtgagattctttagccgcttgaatactttggcgatcgttgattgtattgagcctaaaaagctaatcttttcattttgtaattatagatcaaaccttttgactaatgccaaacaagataatttcccattctctttttattcactttataatagtgttgtcaaaaatattaattcttttgggaaacctatgattcttttatcatatctattaacgccatttttaagcttttcatacaagcaatacctaacacgggagctatcttattaccttatgatgatcgtcacttttaattgtataatcaatttgataaagaaaaaagggatagatacaatacaaattagtgctttgatcatatctaattattgcatgagtgtctttaatttaaggtcgtgaatctttggaaatccgagaggttttttgacttaagtaattgaaagcttttatttatctattattttatttgtagctttttgtaaaaaattgaaacttgtaaaatctgtatagtatttgtttgctcaaaaaagtcaccaagattgagaattgacagaaatagaataataaaatgaacaatttgaaatcaacaagagccaaataatatgcatatataattttgggaattgtggtgttgttttcatttggaccatatctccatgtgaagaaccacttgaccaggagaatatttttgtcccaattgatttcacaatctctagggttttggatagctgagaacatgatcctttgtcctctttacgaaattgatgcaaaaccacttaacaatttgtcccttcgttgaaatttatgctttcgatttttatttgggggggttaggggagggggtgaaatttatggacaatgtgtaaagtataaggaacaacgacacatatatatgctgttagttaggaaatgttaaaattgaacaaactttatagcaatcaaatctttataagtactcagtatttcattaatgcccacatgaccattgactgaagccaacatcaacaagagggtatgcttcaaaatcaaactcaaatctatcaaaagctataaaatatattcacaagtgagttaatgcataattttggtaaatataatctgcataattggtttctctaccaatgatttgcttctttgtttggcgttagatttcgcctccaacattctcacaaagatctctcattgttgcttctataataatagtggctcatcagccccaaaccagctttgcagctactacagaacaacaaaaacatagcactctttgatagttagatagttagattaccagggaatgtcatgaaggtggttctctgataaaaaaacattgtcactttaaaatggagataaagtttctaactttaatcttatgcaaaagaagaggtaaaaccagcagggtcctctcataggtgtcgacaagtgatattacacactgtagaggagattcatggaccaccaaatgcaagtcttaggtcttctcacatggagatattgcaatcatttactcaccagaaatatataagtcgaaaagacaaccgaaatgctatatctgtaagcaatgacccctgctcactaaggagtgagtgagaggtagttgagtgtgaaattgagaaagacacacatagatgacaatgccgatcaggtttacgcaataataataaaaaggcccaacccactaaaatctattagcaaaagcccaatttcagtccatatatgacgaaacgttaaccgtcagggttttactacttgggagaagacggaggcctcttaaatcttaatgctaacagacgaataataatacgccacgtgtataattgaaccgtcaccgccttatcgttaccgctgtcataaacgaatagctattttcgtgctcggaaaaagcagagtaaagctttaaaaaatggtgattttatcggcgagctccactgtgagagctgccttagatacacaacctagacttccctacaaccctaatgcgccgcgaaaagttaagaaaatccctaacggtaattcattcttaccgccgccgtcacctgcaccgtctccaggaatcagcatctccgtcgccgatttgctcaagcgtccttcaagtaaaggtagacactttaactcggaattgattcaattgcaatgtttggttattcaagaaaactctaatcaaaagctctctccttttcttcctatggtaatgaattgttgaagacttctcaaattttcgattcctggttctattagatactaaattttgtttgtaaatgtagagataactgttgacgttgatgatacttatatgggatatgagacatggtctccaagtccaccaaagttggagaaaccaagatcagtcttcaatcctgcttctttagcctttataggcgattccatttatgaggtttttttttttacattacactgtgagctttgtgtttcaagcttttgctcttaattcttgttggatcaatcaatcatgatagactttagtgttgttaggttgtcaatatgtcaaatgcagatcttttacattgttttacgaaagcttactatctcgaacgtcattaatagtttctcttggttgtgcagctatatgctcgtaggcattttcttttccctccgcttagtattgaagattataacgatcgtgttagagctgtggtgcgctgtgaagctcaggtttggtatcttttgacctccttgttttccaattttgaagagacagtgtattgttcggtatcatgattttgctgagtagttttatttatttcatcttatgacactcttactttgagaattcattttcgatgttaactgtcagcttttctcgtaattttatacagtatgctttgctgaataaacttgttgatgatgactttctaacaaaggaagagaggtcagtacacaaaaaccactatttcatcatccaacttttctctgccgccacactttgataattgagaatcctgtgattgagctgagatacatgattcacttctcattggattttatccatctgatgaatttgtatttgctccagggatattcttaggtggggaaagaatctaggttctgctagaacacgtacaagaaggcgtgcaggtaatgcggtttataacaaggcatcatcattggaaacactagtaagtaacaccagtatctaaacttacactgcgttcttctttgtgctcttaactctgttttgaatgtaaatcttcttgttgtcacttatctgtgcaatttccagattggttatctgtatctgacaaacgggaaaagattagaaaaaataatggagaagctaggattctcaagtgattcttcaactgagatcgtgattgaagaaaccaaccctaaaccatcagaatcatccaacctgccaaacttcatactcagtgagttaaatctacctcctccattaaattcgatcataaacttcatcatttggtggattcgctggaagctacacaagtcataaactcatataaccatcttctccttcgttaatttgtagacgagcaagtggtgtcattttagttgtaggaaaaggtctttactcggatcatggaaaagctgaagaatcaaagttgtcttaaatggccggtgtagcaagcataacagtgctcacttaaccggagaagacgttttttcgtatatgtacatacgtatgtatgaatgtccaactcctactggatatcaaatcaaaatgcccatttttgtcttctgaccatgatagttgtcctcatgggttgattcttaagcaagtctattagtgttgtactaaacatatgatatttaaacaaaaaataatcaaaagaaatgtaatatctatagctactaggcattttgtacatgattctgctactagcattgaatcatttgatcttatcatataaattcgaatcttcagcaagttgagccactgctacttgactaatacatatttcaatgatggacgaaatatgacgttcgtgatttgatctaatccagctcggcaacatccttatccagagataaaagcaaaactagtagtagtctaaatttaatagacgagagattccgtggtcattagtgactttttctttatgagtaggcccatttgtaacaatcgggcccataattgtccaacgaaaacttgttactattgcaatagattacaatggaccgaccaaatcaatcaatgtaagaagatttcgtatataaaaatatcaccaattttttatcttttcctttacgaagaaaggtatagcataaattatgcattttcgttttttttttttatcgaatgtcttcgagaagggactgctaaaaaagataaaaagatcgatattgatgtgaatggttttaaattgaatatgtggcagtctcatcgatatattttattgtgcgaataagataattcatactatcatatttttgtagctcatatcttttactcttttagccactcattttgattgtaacgtcgatacggttttgtcctataacatgcacattatccagttgatgatcatgggtcctaacgacaaggttgacgtgtcatcatatagcgccacacttattgtggttcccactcttttcttgcttacatgtcatcctaatccctcgttctttgatcatcaccattgcatatcgaagttaatacaattcggatcagactcaaattttgtttctgccacgtatataaaagattaaaggatatttcgtctccttttggtgttcaaatttcaattattatctcgaaaattatgtaatgcatacatgatatccttaaaacgttaaaaaaaggctcgttgttagtatcattatgtcgttgttgtgttttctttcttatttgataatgctgtataagaatgttggataaaaattttggtttattttagagaaataagagatcaaaatatatgtagatagagcgaagaagaaacgaggcctttcatataagataagataaggcagtcgtggaaaaggaaagcaagagctagccaaacctagatattaattaagctgtcgaaataaatgtaccctaatatataaactatttaggaacctctccttgttatatatggataagtttaataatctgttgatttattctatatttgtctcgatatttttttttcgattgtgaacggtatcttaatgtgacgcataaaattggaactgatattgtatgcacaataattctacgtaactgcgaatatgagtgcattgttcaattacagaaaaagttaaactacgttttcgtatgcatgtatcacaagtttacaatgttggagctcaatacttttttcctgagaaggaattaggattctcattttagtgtactgattattgattagtgattatgctgcaacatggatgcatgcagcatgcctgtccatcgagcaaaaatatatacagatttattaaatatgtcgtcatcatcaaataataatatctttgcaagtggtatcctatgagttcataaatcataatacagacaaaacattgtgtgattcaattttggataataacttatgctgatagtactttattggatttaattttggattcgaattccttgttattgactcattagtggcaaaacaattccattcacgttctaattatcatgaccacacgtggtttctatgatacgttgactcatggaatgtaaaaactaaaaagaaatggagaatccaagtcatggatcttttacatctttagcgactcttatgagttatgagttaccaaagcttataaactaacattttactttacacactctttacgtatttcagttgtttaacgtaccatatatagtttttcacattttcttgggtaattttttttttgtaacggcttaggtaaaaaaattacatcatcttgctgttgtagcggtaattaaggataaatatatatttttattggactggatataggtaataggtccatgaattttctctaatgaggctagatatcatgattaattttaaaaccagcatttagctttctaatttttttgttcggatcctatcagtcgatgaaaatataacgtgatgtgttgaaattaggatgagctagcattgtgaaatataatccctaactacgaatatttgtattagtatagctctctttaactatgaatattagagcagttttgtggttgactgcagtaataaagatttattgacagagaagctcggatctaaatctacatgaccttcgtcgttatcttctctttctttgtggagctatattattttcttgttgttcttcatagttaatctgaacataagggaatacattaattaggatatatgataataaaattaaaacaaccacccgtacaagattttccttgacggccgtaagatccggaactagaaagtcaaactctgttgcagttcaaattccgtgtactttactcgccgcgcgcgcgtgacaaaaaaataactatgtgagtgggaaaggaataaactaatgaagaagaagagaaagcaaaagaaactcgaacgcggagaaattgttgttgtcgtcgcagttaacgggttttattttctctattgtcttaaattttcttgctcgttccattttcactttaattgctccacgcatctcaaatcaatgacaaaaaaaaaaaatgtaccagtgtgaatgtgtcataagatctctttaccaaacaaaaaaaatgtgtcataagatctaaaacattatacggatctaaataacatacaaaattcagatcgatgcatgcgcagatgccttgtaagcgtgttggttatattttgaggagtataactttggatatgaaaaatgttaactaaacttaaaaccgaaaaaaaatatgttaaactctcttcttcttttttttttttgacaaaatgttaaactctcttattcacaagttttctacaccagttcaatttgttttttttattcaataaaaaactacttcatcggggtatgtgttatcaagtatttcattgtagttgttaattggtctatgtgaaaatatataaatttgaaatctaattaacataatcacgacaaaataaatatgcttttaaaataaagaaaaataaatatgattgttagttatttacattttttaataccggccagtagtatatgctgcggctagctctttgccatatatgatacgtgccggtgcatctttgttttgcttgactactaattttatagttctgtgtttattcataactcgaatatttgtctctatataacagatgatagaaagcatggttttattcaaatgtaatcgattgcgttttactttaatgatgctttacatacacgatatctccctttttcgacacattatctcttcgattagaacaattattgtgtatgtttgcgtgttttgatgagtatcttatagtactacttatttgaaattaataacttatacaaacctttaaccaaacacattttttgttttatcaatattaataaagatttatagttccccaattccataaatatgaatacgacacatcaacgaaaattatgaaaaacagccatatatagtttgcaatgtcgaatctcgatatctccgatggtggtcacagctattgataaacaataattgaacaaatcatgatcatacttaataatataaatggccatttaataagctgttagaagttctatcaattaaatagctagatatttaaattaagcaatttagtaaattttccacaataaaacaagacgaagtttatgtaaagtcttaaacatgtatagttttaggtagagaatcgaagacaattttttttttttttcaaaagtttgcatgtgttcagtggttgagaacttgagataacgattggtttatctaacgaacacgctctttcatatcttacaattaacgtttcaatcagacaaaggaaaagttaaatagatgtgtagtaaaaaaaaaacatattttgtttgtagtctttgtcttgtaaaagtcttagaatttgtggtggctaaacttaacccgtgacactttgcaagtattgttgggccatttactacaacgtgcagcaaaacgcgtgaaaaatcacgtagcattaaaacaaagagccagacaatctggagattattatgaagattttttttttatctcgtaccgatttcagccaaaccaaaaaatcggattccataaaaccaatcagaaaaaggagatgtggcatttgaatttgttgcaaatgttttcactcaatatttattgaaaaagcaaaactccatattaaatcatactctaacatttttttttcctactatgaatgctactacaaatatggtggaaaactagttatttgttttctctagaaacttacactttattcgtctaaatttgcttgcaatagaactatactaatgaacattcaaatcacaaatgaccttttttactacaatcctaaaaaaatcttaaggtattcaattatttaaatgaacaataagaaaaagacacaaacacggtgggacccaaaaaggtctctcaaggtaggtcccacgagaataccctccattgctgagtgctttaaaaacagctgcaaagcatctacgttttagcatccgaacaaaaaaaaaaacaagttttcttctttttacactcaagaatataaattccctgttctccagatcttttctcaagaaaatttaaagctttaacttaagaaagcttgaacctttctcttccaaccacatcttccttctttttatcctctagctcaacttagaaagaatagaataaagtggcaaaaccgaaagtgaaccaacttgtagtaaattaatagttatgggttcgaaacctaatgccatgaagaatgtggtggctatggcggcagtttctgctctgttccttctagggtttcttgtttgctctgtttctggttctgtctcttacgatagcagagccattaccatcaatggcaaaagaagaatccttatctctggatctattcactaccccagaagtactcctgaggtttgtttgcttgctttttagttgcaatgtagttagatttatttcaaagtttgaatctttcgttccccattgtttgagtaaaatcaaaatctagggtttcgtttcttatctctggatgtgtgcttttgtgtagatgtggccagatctaattcggaaagcaaaggaaggaggcttagatgtgattcagacttatgtgttctggaatgggcatgagccatctcctggaaaagtaagaaaaatcttatttttgatctttttatgtttgtgaataaagtactgattcattggattccatttttatgtgtgttttggcttcatctgcagtattatttcgagggcaactatgatttggttaagtttgtcaagttggtccaacaatctggactctatcttcatctaaggattggtccttatgtctgtgctgaatggaacttcgggtaattatagctaatttattgtaccttaaacctataaatagaaagtttaaaaggtgaagaattttcctagaaattctaatatgattgttttgtttctgtttaaatttctcagaggatttcctgtttggcttaagtacattccagggattagcttcagaacagataacggtcctttcaaggttagacatgttcttaaagactaatctatcttcattttgaagttatgaaacttcacacttgttcattgaccattgtttgactcctgggattaaaaacattgattgttttttgtttcttccatttgaaggctcaaatgcaaagattcaccacgaagattgttaacatgatgaaagctgagaggctttttgaatctcaaggcggtcctataattctctctcaggtaaaaaccaatcaagtgaattgtgtgttttaacaatcccacaaaagagtgacagtgagactcactagacaccttgtctgtatcaaatggaatgttatgtgacagattgaaaatgaatatggaccaatggagtatgagcttggtgcaccgggccggtcatacaccaactgggcagctaagatggcggtggggctaggcactggtgtcccttgggtcatgtgcaaacaagacgatgctcccgaccccattgtgagttcttttgtctcttctttaggacatcttttcttcattatctgtatgttcttgtcactcttcattctctctgttgaaatcatttcattaaatattagtattcatttataatgcacatgcgttgattggtgttacttcttttcatgatctttttttgtttgattattttactctgttctgactcttagaatagtattcaatcatataagcaattcttcaatgtgttctgttgctgaagtcaacgacaaaccatgtggatcatttatgtgttcagtcactttctttttgcattttgataacttgtttaatttatggtttgctctttgctagatcaatgcttgcaatggcttctactgtgattacttctccccaaacaaggcttacaagcctaaaatgtggaccgaagcctggactggatggtaagcagaaactcaaagtgaatatctgctaatgttgttgtttctcagtgatctcagtctgagttcttgatgtttcaacaggtttacaaagtttggaggcccagttccttaccgcccagctgaagatatggccttttccgttgcaaggtttatccaaaagggtggatctttcatcaactactatatggtaaagctaaagttgtggtcttttttgttttttccatgttcacaaagtaaattaaattgctatttcgagcttgtctaattctcatacatggtttgtcgtgctcagtatcatggtggaacaaactttggtcgaactgctggtggtccgtttatcgcaactagctatgattatgatgctcctcttgacgaatatggtaagcttgctaaaacttaagtttttcattttcctaaagataaagattgttgtcttctttctaactattgtcatgtgttttcaaacaggacttgaaaggcagcctaagtgggggcacttgaaagatttgcatagagcaattaagctgtgtgaaccagctttagtatcaggagagcccacaagaatgcctctcggaaactatcaagaggtctcaactcacacgctttcattttttgttattagttttttgctgtggtcaacttggtaaactttcgttcatttgtaattttgcaggctcatgtgtacaaatcaaaatctggagcttgttctgcattcttagcaaattataatccaaaatcttacgccaaagtttctttcgggaacaatcactacaatctccctccgtggtctataagtattctcccagactgcaaaaacacagtttacaacacagccagggtaagaataatcaatattcgcttcaagttgatataatgatatgagcaaaagatggactttttgttcttcttggtttttcctgagtactgacaaagattatactggttttggctgtaggttggtgctcaaacttctaggatgaaaatggttcgggttcctgttcatggtggtttatcttggcaagcatacaatgaagacccatcaacttacatcgatgagtcattcacaatggtcggattagtggagcagataaacactacacgagacacttcggattacctgtggtacatgactgagtaagtatccattgaacttgcaaatatgtttctatcatcaccgaatgcatgtggaagacttctctgaatgcattgtgacttcttcactaattgtctctttcttttgttttacagtgttaaagttgatgccaatgaaggatttttgaggaatggagatttgccgactcttactgttctatcagctggccatgctatgcatgtgtttatcaatggtcaattatctggtaagaacagtttttgatattgctaagaacagtttgctgtcaacatttttttcacctcattttaacatcttttcgttgtctctatccaggatctgcatatggtagtttagactctcctaagctaacttttcggaaaggtgtgaatctaagagctggtttcaacaaaattgcgatactaagcattgctgttggtctcccggttagtcatcaatattcttcataatcaatctttttaccaaacattaagttcaagctagagatgttcttaatctatgtgtttatacaatgcagaatgtgggtccacattttgagacatggaatgctggagttttgggtccagtttcattgaacggtctcaatgggggacggagagatctatcatggcagaaatggacttataaggtacagacacaaagatcacaacacgttttcatcaatatataattgtgtcactatactgattatccgattttgtattttgatttttcaggttggtcttaaaggagagtctctgagtcttcattcacttagtggtagctcatcggttgagtgggcagaaggtgcatttgttgcacagaagcaaccacttacttggtacaaggtaagcttctccatagtcaaaaaccaaaatgcagtttatctcggtaaaacgatttgctccatgtttaacatgtctccatggcttgctttcagacgactttctctgctccagctggagattcgccattggctgtagacatgggaagcatgggaaaaggtcaaatatggataaatgggcagagcctgggacgtcactggcctgcatataaagcagttggttcttgcagcgagtgttcttataccggaacattcagagaggacaagtgcttaagaaactgtggagaggcttctcaaagatggtaaaaaggctgtccatctttatacctctaaagctgcaattaatgaagctttttcagtatctgacttgtgttatgcttgtttgtaggtaccatgtcccaaggtcgtggctaaaaccaagtggcaatctattggttgtctttgaggaatggggaggagacccgaacggaatcacgttggtcagaagagaagtggacagtgtatgtgcagatatctatgaatggcaatcaacgctggtgaactaccaattgcatgcttctggaaaagttaataaaccattgcatcccaaagcacatttacaatgcgggcccggacaaaagatcaccaccgtgaagtttgctagtttcgggacacctgaagggacttgtggtagttaccgtcaaggaagctgtcacgcccatcactcctatgacgctttcaacaaagtaagttagagaaaagcatggatctttctttctttgttttgattttgagctctaaaagctgattctttctctttcagctttgtgttgggcagaactggtgttctgtaactgtagcaccggagatgtttggtggagatccgtgtccaaatgtgatgaagaaactcgcggtggaagccgtttgtgcttaaatgaaagcagacgcaacagcaatcaaaagactgtaaaggtggttacttacgcattcttacaggtttctgatggtattagtatgttttatgaagacaacagaagaagttggtatttttctagctccttattttatcacggtggaagttgtacaaagggacgcagcacgccgttcaacaatttgcagagttgtgatttatatgtaaataagcttgggaagggtttgttattgtaacccaagaaagaagatgaagaagaagaagaagcacattgagactggagaatctaagtccatgtgtagattcttttggtaggagcaaaactgggattagtttattctctgagttttgctttgaacgtgtttgttgttgctgttgttgtagtcgatactattagatgagacattctctgcaattatctcattgctaaatttatgtaatggtttttctttctttctatggaatgaagcatatcagtcttgaagtaaaccaatgtgtgaatcacccctccaaatattgagcttttgaaatttattcattctaccattttcgtgttttacgttttgtggatttaccactttcacaaagtaacagaaagtagaaactgccattgctgatccttttacactgttttttgggttgaccatttttttttattcatcaggaaaccttggtgctgttttttttttttgttttttttcagactaataatgtaatatcaatgtacatattaaatagattataagcaattaaagtataccgtatactaattataacttttgtttgttcttgtttcacagctgttattatcacttgtcgttactcagttatatctttataataaggaaccttacatagattttgaaatttcttggctttcctatcaactataatacttttgatgcaagttgcgagacgaactttaaaaaatcggatttttggtcattcttaataccataaagttgcaagttggtaattgtttagccactctgacactaaacatatcactcctttttggatgggttttctattttggcgaaatcaatccgtgtctcaccaattgttaggtttggaaaaaaattctattggctaaaagcctaaaaggctaaaactcttgaaaatttcatcgcttagtgattttttttatgctacttgtagtacaagttgcagagacgaacgtataaatatggttttaggttaattagttaaagttggtcgccgaccaaacaagaataagttatgttggtcatttgtttatatgggagctgcttgttaattaatttaacttttggttttctctaacattgattagcagtaaataaatggatgaagaagaagatgcaggtagatagatgacaacaaaattagtaaagaaatggatgatggaaaccctcgatgttctattttattcattgttaattaagacagcctagctgctttggtctaattattagataaccttgtactatatcttaactaataactagtaaactagttaatatttgtcatctttaataattaggttaacccacttgctataggtcatggctttgcgattcatatattttgatccaagtcgcagaagccaacaatataaaaagcagaatttgtagtcacttgattatttaaatcgcaagttggttattggttattaatatagttttttttaatcaacatgtattattccacttcacaagatggtatcatgacgaaagcattattaaaaaaaaaatggatgaagaagaagagcataatatttagagatggagatagatcatgaacttttaatcccacatttaatgatggaggaaccaactgtgaaagaagaagacataattcacaaccaaaccagtactaaagaaatgtatgatgcagaaaaaccaagatgccttctgtctcatccagctgactctcctcacaacctgtccgttggatgcgatcccaaacttccgcttggctgctttacgtgcggcggaaaaacaactgtgcggcggcaagattatctccacttccactgcaccacctgcgacgtaaagttccacgaaggttgtcaaacgcgtccgagaaggataacacatccttatcacctccaacaccctctcactctcttctatcgaaaccctgaaaccggaattatatccaacatcatcccctactccagcccttacgaatccgacacatctgatccagaatccaactcatctggtgaagggaagtctgaacttgtcgatattattccgtccaaatccgatatcatttttgacaagtgcacttggtgtggaaaagatttcaaaggtgatgtttggttctaccgttgtttgatatgtggcttttgtttggatctctcttgtgccttaactcttccacctcttactattgcaaatccgaaaagccatcatcactcactcctcttcttacctcggcctttattagttccatgtgatgcttgtgggttggtcaacgcgttggaaccaagttatgcttgttttcaatgtaattacatgatccatcagaattgcatagatctacctcgagtcataaagatcacgcgtcaccatcaccgtctttcttttactcctttcgggccacctctgatttctttatgccgggtttgctacaaagaggttgatatcaagtatgggcaatattcttgccagcacgaagattgttcttatgtagctcattctaaatgtgcaacacataaaaatgtttgggatgggacggaactcgagtgggaaacagaagagtccgatgaaaatgaagatattgcgccattcaaggtggtcggtgaagatttgataaagcatttttgtcataaacatcacctacggctcaagaagcacgatggttttcgagaagcagagaagcaatgtagagcgtgtgtatttccaatcgtctctcatcaattctatcattgcaagatatgcaattactctctccacgaggtatgtgctggtcttcctcgaaaacttgatcatgcattgcacaaacaccgtcttgtcctagacccatctccgctacatgactacagaaacatgcattgttcaacttgttcgcgagcgttcacgggtttcagatacaaatgctcagaaaagatttgccaagaccgcacaaatctcaatatagatgttagctgcattttggttcccgagtatttcacacataaaagtcatgaacatcccgttgtcatctccacatcctatagcgacacagatgagatcctctgtaatgcttgtcaggggacatgttggcaacctcatataaagtgtactaaatgcgattttgctatgtgttatacatgtgctaccattccaaacgaagtacactacaaattcgatgagcatcctcttacattatgccacggagaaagcagaaagagcaagtactggtgcgaagtgtgtgagaaaaaactagatacaacaaaatggttctacacatgcaacaaatgctgcactactgtccaccgtgaatgcttattcgggtcaactgtttatatgcagcctggttccagattcaactacgtatacggaacggtggaagttttccgcaacagtcataacagtcgactggtttgtcgtaaatgttttcattcgtgcacagattccgtctacttcagaggctacaagtcccaacagacgtttatttcatacaaaggctacgagcagcatgagatggctatttgttctttgacctgtttaaaactagagatgctcttctggtaggtcttaatgcaacttctgtttagctatgtaatgttatgctttacctaaagactacaagtatgttagatgttgttacatctattcatattatttgaagacttttgcataaaagttacttttgtttctttctgttgaaaccattaaaagatttgttggatttgagatcgtcaaatgtttaacttgatgagactaattcatcgatctttctcgtcgtctccaacaaactatgttcttcaaaccattcttccaatctctcaattatgctccaacggtcgtcttcaagaagctttactggagatggcgatgttaggtcccgagatggggttccatggttacgatgctttgttgaatgcgtgtttggacaaaagggctcttagagatggtcaaagagttcatgcccacatgatcaaaacccgttatttacccgccacttacctccgaactcgtctgcttatcttctatggtaaatgtgattgtttagaggatgcacggaaagtgctcgacgaaatgcctgagaagaatgtcgtttcctggactgctatgatctcgcgttattctcaaactgggcattcttctgaggctctcactgtttttgcagagatgatgagatcagatgggaaaccgaatgagttcactttcgctactgttcttacttcttgtatacgtgcttctgggttaggtcttggtaagcaaatccatggactcatagttaagtggaattacgattctcatatttttgttggaagctctcttcttgacatgtatgctaaagctggtcaaattaaagaagctcgtgagattttcgagtgtttgcctgagagagatgttgtctcatgtactgctattattgctggttatgcccaactaggtcttgatgaagaggcgttagagatgtttcatagactgcatagtgaaggaatgagtcccaattatgttacctatgctagtcttttgacagcattatctggacttgctttgctagatcatggcaagcaagctcattgccatgtcttgagacgtgaacttccgttttacgcggtccttcagaattctcttattgatatgtactcaaaatgtgggaatctttcttacgctagaaggctttttgataacatgcctgagaggacagcgatttcatggaatgcgatgcttgtgggatatagtaaacatgggttaggaagagaagttcttgaactttttagattgatgagagatgagaagagagtaaagcctgatgcagttacccttttggctgttttgtctggttgcagccatgggagaatggaagacacagggttgaatatatttgatggcatggtagcgggagaatacgggactaagcctggcactgagcattatggttgcatcgttgatatgcttggccgtgcgggtaggattgatgaggcatttgaattcatcaaaagaatgccatctaaaccaactgctggtgtcttgggttcccttttaggagcatgtagggttcacttatctgtggatattggcgaatctgtaggtcgcagactcattgagattgaaccagagaatgcagggaactatgtcatcctctctaatttgtatgcttcggctggaagatgggcagatgtaaacaatgtaagagctatgatgatgcagaaagctgttacaaaagaaccaggaagaagctggattcaacacgagcaaaccttacattacttccacgccaatgatcgtacccatccaagaagggaagaagtgttagctaaaatgaaagaaatatcgataaaaatgaagcaagctggttatgttcctgatcttagctgtgtgctatatgatgtggatgaagagcagaaggagaaaatgctacttggccacagtgagaaactagccttgacttttggtttgattgctactggtgaagggattccaattagagttttcaagaatctacgtatatgcgttgattgtcataacttcgccaagatcttctcaaaggtttttgaaagagaagtgtcattaagggataaaaacaggtttcatcaaattgtcgatggaatatgttcatgcggagattactggtgaacatcagaaaaaggcatgtaatattaattcagccaacatctgtggatatgcaggtgttgaagagaaacggtacaaattaaagttgatttcttttactttgttacagctacgtaccatacaatcacccaaacatacaaaaccttaaaagacaaaagttggcatctctatcagttgggttctagtcaatcttcactgaggagtagatctttctcacgaaccagaagcaagcatagaaaccgattgtgccagttaggacgaagaatgcgtaagagatgataatcatgtacccgaagtagagcattcccgagactagctttgtgatctccagctttgtgaagaagtagaagattgagtagaggaagaggtagaaagcggatgagcccgcagttaagtaagctctccaccaccagttgtagtcttcgctacaaagctggaagtagcagagcaccactgtgatctctgcacaggtgacgatcaagatcaaaaaaactataaagaggaacccgaagatgtagtagaactggttcagccatatagatgtcaagatgaagaagagctcgatgaagactgctccaaacgggagaatgcctccaattagtatagagaaaactggtttcatgtaccacggctgctctggtacttgcctcgggatcttgtttgttttgactggatcttcaattgctggcttcttgtaacccagatagctaccaacgaagactagtgggactgagatgccaaaccagaggcagaagagagcaaacattgtaccaaatggtatggctccagatgactgttctccccaaataagggcattcagaacaaagaagatagcaaaaaggataccgggaaacatgaatgcagtcttcaaggtcattctcttccacttgtttcctttgaacattttgtgaaggcgagacgaggagtaaccagcgaatatgcccatgaaaacccacaagagaaccatggcagtcataagccctcctctgttggatggagataagaagccaagcaacgcaaacatcattgtaacaagtgacattccgaagatctgaacacctgtaccaacataaacacacaataaaccagagttcaccggtggcctgaagacatctccgtgtacaagcttccatccagtctcttcctgggcctcatcttgggtctcgagctgattgtagtttgagatatccttgtataaagttctcatcatgatcatggctaccattccagaaaggaaaaggacaatcataagtgaatttatgatggaaaaccagtggatttgatcatcgttcatgagaaggtacgtgtcccaccgagaagcccatttgatttcactctcctggatcatcaaattccggaaaatgtttagcaacccaaaaagtaaagcaaaagaaggctaagtgtaagtcatgtaccttaaacgagacatcatatgtaaacactatttcttttccttgctcaacttcttgagggacagtgttgccttggattagattcttcgtgtccttattacatgttgttaactgaggatttttttcatcccactccttgtattcatgcaagatactatcaaaaagataaagacctgttagcttatacaattagacaagtactcctcaaaaatccagtaggtaacctacctgttaggcgtaacctcaaatccaacaattcgagcagaatcagactcttggtctctgtggtacatgactcggaagctcaagtgattatgtataaagtatttctcctctttgctctacgaaagccaagcaactattagttggtatgataaaaggtaatagcaaagactgaagcactagagtttagagacataccccttcataactccctttaaagccaacacgaaaaccgtgttcataagtcgttgattgacttccatctctcctttgtcttagtacagctactggaagattatcaagaatcctgtaaataaattcgcgttaaggtcaactatcgctagaaaatatagtaactctcgatgacacagatacaaagaacaagcatgctatacaattactacttacatattagccctgtattcatcatcaatcttttccttgaaattcttggtggagtcagcattaagtttaacacggcaacctactttgcagggctgatcttccagcatttgaaactgaaatttttttgtttcagaaaagtcaacatctcatggtgaagaggtgtaagtagaagaattggggtaatgcttacagtataaacggaattctcaatgcggtcacctctgagaacctcccctaaattctcagcattgttcaagatcttaggaggcttacagtaattcaggtagtagtagtcataaggaagttgagtctttgtggacgacaatttgttaactttaacataaagaggatcaccctgggacaaacaagacaaaaacaacaaaatcaagagctactacatagccaaagaaagatgatgttaaacacacaaacttaaagtgcagatctattgattcagatatgagtgaagttcaaaatgaaatcgtcgatttactaactatactcattttcatcaacatactcaattatactagctaacaacaggaccaacacaaacggtgacaaaagaaaagacacaaaattttaatcagatgtaaatgaaatcacatgctaaactagaatatcactcagacccataaaccctagatcgatcttcttatcgagaacacgagatcgggaggggaacaaaaacacgaaaagaggtaccttctggaaatcacgaggagcgactcctggtagataaaaggcgcgagataaggagaaagagagaaaagagagtaagagagtggcgtagaatcgaaagctacttcctttcgtcttcttcatctttttcttctgtctaatctcctcagaggttcttcttcttcttcagatgaaagttgccggagcaattagaaaaggatgcgtttttattttatttaacaaagatgacgaaaggtgagtacaaatacgaagtcgttttgagggattgcttacaaatatgaaagggaaaaaataataaaatatttagtactaagaattaggatgtgtgtgtttttgtcaattaagaggaatagatttgacataatttcctttccttgatgacatttgttatgttgtgggaatatagaaaatatattgggaatttaagaatgcaattcttacatgcagacaacccattttcagacaagattttgtgcatgtaaactcaaactaaatgtgattttattggttaatgaatctgatgaatcagaagaagcttcatgtctaaacaaagagatatctgttggcatgcctaagtttgtgtaaaatacataactttgtcaagaaataacttaagctgtagattttgtcatgaaccattccttaagtaaagttagatgatgattaattgattatgatgataaggacattatgaaaaaacatttttttttttctggcaaactaatgaagagattagtatgtcgaattgaaagagtttattcaaaataaaataaataaaaaacgatacgatgcgttttgttgccgccggcaactgaaaaaaaaataaaaaaaaagacatgaacacaaaaagtctctgtgaaagtgaagaaaccaccatggaaatcgaaggcgaagacggcacgaagctcttcctgaagaccggagttaaggatgtattcggaagaggagcgggattcaacaccgaagacctaacagtgtcacgccgccatgtttcactcgtattcaaacccgccgccgccggaaccgaaccgtccgatatggtttccttcgaggttctcgggaggaatccagtctggataagggccgttgaaaagggcaaaaagattcaaactttgaggaaacccgagactggagaaatcgccaccggcgatcaattttgtgtatcgggtaatcaccccatttggttcactttgaagagacgcgatgaagttatggaggagcgagcattggatcatggtgaaatcgaattgaatattgatcctgttaaaggtaatcaattttgcaacttgatgtgtttctggatttgtgtcccaataaacaacattttggttgttctgcattgcttttcttttataatgtctagaattatgctcttgagaggattttttctttttagtaagaatgaggctgaatgtgtagtttgtgtactgtgtggtgtggttgcagagtttggatttcttgtgattgggaaagaatttgatcagtatccaaagagtagggtgcgtgacataaagcaatgggaatggtttttagaggattccactaatggaaatagcgatggtgatgaagatggagataagaagggaaggaagggattagggaaaaagagaagaaggaagaaagggaatgaggatgatgattggagtgtggaaagtgatgaagataaagagttgatggtgaaatcaaaaagagttgtgactcctacttactcgactagatccaagaagacgaagaaagattcaaacgctagtagtagtagtagtaatggtgctcaaactaaacagcgtggaagagcagatgtcgaggaagaagatgatgatgatgaaacattgggaggtttcattgttagtgatgaagaagctaagttagaagaagaagaagaagaagaagacgaatcagatgtagatgatgaagaagatgaagacgaagaagaagaagaataatagctgaagtctcctaataaacctgaaatgtaagcaaatctaatcttcttccttttacaacgacaatcttttgttcaatagtgtactgtgtctgtctgaactgagatttctgatcatatgatatattatttgttcatttgtacgagtacagtacttgtgaaattctctacaacattacagcttctaatttgggggtttgattgctaaaaaacgttgccgtttccttttgctgttgttatatggcagttcatggtaccccactaaggatccacgttgttaacctctctcgcacgtgtgaatgaatttttacaaatgaaaaagccgcgaagtcttctcctccttcctttctccgtcgtcctcatttttcttcttcccaggaaaattctcattttctcacgaaacaacgaagacttcccatcaccacaatcaaaaacacaataaaaacatgagcaacgaagaaaacatcaaatctgataataagagcggcgattcctctgatctccctaccattcccgccttaggtaattttcataaacaactcacaaaattttacatcttattctcgataaaacaataaatctctggataatccaaccaaaaatctaccctctcacatttacttctgcctcaagtaaatgccctgttttatatattttcgatcttggaatcaacaaggaatagggttaattgaagctagctaaccattatgctttgtagatattggggcagaggaatgtgatcttcttgcagagcttaaggcaagtcacttcaaattgttgataaaaattcacacagtagttttcttgtgtttcctctgtttttatgatccttttgggtgttgattaacttacagaacctaaccttaaagcgaccatttgatgtgaaaaaactctcacctaaagttaccaaacgtgttctgttcctcaaagacattcaggtactttcaaattttcgctcttttacaactaaagtagagaggctcgatgttcggtttatgtatacttgtagagtaaatttttaggttacacacgatgaactcgaagagaagtttcttgctgagaaatctgcattggaggcaacatatgataatctctacaagccgctttttgctaaggtgacaagtttaatattttatcttttacttaatgttgtatggggttaaaattcctgagatgtactgagaatttgcagaggtatgaaattgtgaatggtgtggtcgaagctgaagcagagaaagaaggagttcccaatttctggttgattgcaatgaaaaccaatgaaatgctcgcaaatgaggtacatgattcaattgctttttctggaagctatgtgttcattgacactgaatagattaatgtaaaaactgtcttgttttggtttatgtagataacggaaagagatgaggcagcattgaagtatcttaaggacatcagatcttgcagagttgaagacacttcaagaaatttcaagctggagtttctctttgattctaatctttacttcaagaactcggttctgtctaaaacttaccatgtgaacgatgaagatggtcctgttcttgagaaagtgattgggtaactaatcatcctcattttacctggttttagttttacctgatctgtaactcaagtcttttatttgtgatgtttagaacggacatagaatggtttccaggtaaatgtttgactcataaggttgttgtgaagaagaaaacaaagaaagggccaaagaaggtcaacaacatccccatgaccaaaacagaaaactgcgagagtttcttcaatttcttcaagccacctgagattcctgagattgatgaagttgacgattacgatgattttgataccattatggttagactaccttctctcttttcttttaccaatggtttcttcagcagctaatatcgctttaaaatatcgaaaatattgcagacggaagaactacaaaacctgatggaccaagactatgacattgcgtaagcttacagtttcacattctctgacattgtgagattcaagaaattaattcttaactatttttttttttttttggttttacagtgtgacaatccgagataaactgatccctcatgcagtttcatggtttacgggagaggctcttgttgatgaagacgattctgatgataatgatgatgatgataatgatgagaagagtgactaacgagaagaaaaagtttgtttcaacagtttttaaagtgaaagaggagcttctttatattctcttatttatttattacagaaacaccaagtttctagaatctctctcaatacatatatctgaagaaccgattttaaagagaagacttcatgctccaagcacttaggcttaaaacattaacattttgagatcccttgttaaaagcaaagagatgtgttctttctcctattgccaattttggataaactctcgaggtaatacatgttttccctttcccaccaaagctctccactattgatttatcaatctacaaacacaagaatcaaaaactcattagtaacaaaaaagcacaaattagtcttcaagttcttgtgattatgagaagttgagacgactcaccaaagtcctgagagagattggttgataaggagagatatctaaaaaagcaccataagttgttttatcattccctttctctaaacttgatgtgctttggtcactgcacatgaccactacgtgctccttactattctcaccagctctgaagattctgatattgaccgatgtatactcttccatgttcttggaagctagaaccattaaaccgaatggacctaaacctgatgacgcattcctctgactgcagatcaattgcggatcggtccagcccggttcaatcacatctgctttctctaagtcaaaaccactcactttgaagaaaacttccacatctgcttgtggagctgtgactccatgaacctccattaccgaccctcctttcaatagtttgtttccccacttgacttgcgttgtacgtaacctctctatttccttaaccggccattgcaccaatctctttcctgattcatcaagccatactttcctaggaatagcctaaatcaacaccaaaatcggttaacgacatctaaatctgtgtaattaggcaaaatgttaaactctcaaccggtgtagttacctgtaaaccggcccaacccttcttgatgttatctttctccggtgacgactcgttaacccaaccccacaaaatcctgcgctgattaacagagtcgtaaaatgttttcgacgcataaaatttgccgtaatcatatctcggagccgtttcgtcctgaacaaaacccttgtccggtacgtagacatctctcacttcatcgtacgtaccaatcgtgtagtaatcattaaacgtatctgttaagctcactttaaggacgtgtttaaccatcggcccacttgaaaaagacgtatctaggccccgtgaatcagttctagccaccgggaaaaaatcagggcactcccacattccggtaccgtcgtggtaatgaagaggctttggagattgcttccatattacgaaatctttgctcgtgtgtagaatcgctaatccacgtcgaccttcttggcttccggtggttatgcgccaacgcccgtcacggccaaaccacgcggtggttggatcacgaaacgcgctggagttgatgtggttgacggggctaggtgtcacgaggggattttccggcgatttggtccagtgccgtagatatggatcggtgaggtttttaggtttaactaagttttggacctggcggttataacggtcgttgccggtgtaaagaattacaggtttgccattagggagaatcgtgacggagccggaccagcatccgttaatatcggacggtcgagatggtctgattgctggagaaagtgtgatccagttgattagatccgttgatgttgcatggccccatacggttttgttaacgtccatgacggcgccgttttggttccattgatagaatagatgatagattcctttgtatatcataggccctgtccaattttatgtacataaacatacatattacttatatgttatatccatgcttacttatacgtaatttataaaacaaacgagagagcaataataacttaccgttaggatcttgtagcattgaaacgaagccccaacataaacaaacaaacaaaatgagtgaaaagatttgacaatgtgcacaaattatagagaaaggaataaaaagataaccaagtgaaactgaattaatgaatccggtataacgtcatcataccgttcatccaatttttgggaggctggaaatgataaccggttcggtaaggttggttcttgatattattgggaacgttgtccaaggcatcaagaacaacaacagcatcgtcagtgagaaacaacgagaccaacaagaacatggcaatgttacaccaaactatattagccattgcaatcctttttttcgtgtttatgtttgagttttacttatgaaaaattggtcaaatttatagacagtgggggtctttggtgcgttcttgaggtggtggtggtccatattttgtgaaaattagatgctataatctcgatccaaatgccttttcatgttagttgagacttgagaatcttgagatccaaattttttttttttttttggaaagatatatatattttgtcaaggtataagatattctcataaattataactagcatcatgatgaaattgggatggttacatttctaaacgattgtttcaccaatttcggttgacattggatatgtatgaaaatacaaattttaaataaacaaacataatgctaaataacgtattcccgacagtcaggaatgttcaagatctcatagacttttgtcttctcataattgcaaatattttccactcagtaatagtattgagtactttatggaatgtcagtgtctcatcattgctgcggtgtaaaataaacaacactattgatttcgtccgttaaaaagcaacgaaaatgttcattttcttctatcgccaggtttggatactgttttgatgtttatgcatgccttgcctcccccaccatatatagctctccactattgaaatgctcaatctgtaacaggtaaaaaatattgattgagaagtcaatttgaaattgaataggattatacctactagtacaatgacacgtgattcttcttgaactctctcttggaactcaatttagaaagacaatcaaaatgtcctcaaaaagtgcgttggctccactaagttttctcctttgattatcacattctcctaatcattttgatgggattttttccgtaatgggtaatcacacttttagatgctgtgcatcagtgcatgtgctttccaaaatccatattataacaactaatcgagactcacgggtgtgtagtattgtaaattgcatgactgtgaaactaagaacttaactaatttttgaggacaagtttagtaataacgatgaacctataaaaccatagtctcgagaagacgtgtaaactaaaatcccacatctaaagttgaaagtatactctctctcttttattatataggatgtttaagaaattttattttggttcactgtataagatgttttagaagtttcaatagaaattttaaatgttttgatatattctgcagtctcttttacaattggttgatcttttaaaagttaaataagaaataatagtcttaaaaagaaaattaaatttcttaaatatgtgcttttaactaaactctgcgatctgaattctgattaatctgaatttgagaaggtttttttgcttaataaaatatgtactttcaacttctgagttctgataaaattaaatgcaaaaaatgaaatgaaactgcacctgatttggtcgctacttacatgtccatatcatcactattgcttgagacttgaatatttcgaaagagagagatgtgcaggcgagaatcactacacaccaaattaaagtggacacaaaccggattcaaccataacttccctctgggctctggctacatctcacgcacgtattctaaatctagagccagcagtttactaaacgacaacgatttagccttagcgcgctgttggaaaaaacactaccatgcaatgttatgtcccacatgctactcccatcattgctggtgaacatatttacgggcttgcccttgggcgggacagacgaagttggattagtatcggacggtggagatggtttgatcgctttaattagttgaccagacccgttgacgtgaagttgttggtcttaaatgctgaaacggtgggccgtttagatgaaaacaatgtaaacccaacgccgttgtaataaataataaatcatgttggcatcgctatggatagataggcgctagtgttataggttcgttacgtcatattgggcaatttcatacttgtggtaatatagccgtcgggcattttagaaaaaagttacgtgtgctgatttacatagaatgatcctatacatacacatactagttattttttggggggccaaactttaagatcgtactcaatttgtttcatatagtatgtacatgtatacatatttacgtttatattcattgaaagtccactattatcacgttcgttggaacttggaagattttgactaccgactctagaattgtcctttttataatagtaagtcatactataaggaagtcaaataaaatgtcatatatattagccttttagaattatttcaaacaaacaaattggacaattttattgacaaccaaacaaagtggaccatataagatctctccaaaatcaactcatataaatgctaaatcaatggagatgtaatgtgtttacatgtgtgtatctttacgtgatcaactgatttgggcagagttcatgctccaagcatttaagtttaagacatcaacactttgatatccataattaaaagcaaagagatgtgaactttttcctattgccaattttggatacactcttgaggtaatgcatgctcttccctttccaccgaaactctccactactgaatgatcaatctacaccaacaacaacaaataacagaaacttttattaacaaatccacaattaaatattcgccttaatacttgaacaagatagttgaagattatatagtcttgatcaagaggctaagctgttaaataattactctcatgggttttaaaaaggaggtttttcttccctatatttgcaagcgtttttacatatgaacataaattaatatataaaactatatacgtaaaatacaaaatgggagacttaattaccaaggctctgagggatagtggttggtgaggattaatatccacaaaagctccgtatgtcgttttgtcattatcttccttcagcgaagatctgtcccaaatccacatcaccaaaaagtcctcaaaattataagtcaagttttggatatttctagggaacccaattttagatctatcttttgtgaccgactgtttaaaacaaacataaatatttgtgaattgtgacaaaagattataaaaattaatatacttaatcccgatcttaatcaaagaaacgtacctgctttggtcactgcacatgagcacaacgtacttattgctgttttgacgggctttgaagattctaaaataaacagatgtgtactcttccaaattcttagatgccaaaaccattaaaccgaatggacctaaaccagacttaaccgatacattcatcttgctacaaatcaactgcggatcagtccaacttggttctatcacatccgctttctccaagtctctcactttgaacaatacttctacatccgcctgtacaaatcacaagacttttaaaaccctaattttctcatacctactgatttttcaaaaaaaaatgataataatcaaacctgtgcagctgtcacaccatagacttcaagcctagatcctgactttagaactttgttgcgtaagtttttgacttgttttgtacgtaatctttcaacttccctaaccggccactgaattaattgtttccctgatctatcaagccatattttccttggaatcgtctaatcaagaaagaaacaaaaaattgattcaatctctaacaattatattcacattattagtttcagttaagcgtaactaattacctgaataccggaccagcctttctcaacatcatcctcaaccgacgatgactcgttagtccaaccccacaagattctccggttcttagccgagtcaaaaaacgttttagacgcgtaatactttccgtaatcgtatctcggagccgtaccgtccatcttgaaaccattgtccggtacgaatttatctttaacccgatcgtacgtaccaatcgtgtaataatcatgtttcgtgtcgtccaaacttattttcaacacgtgcttcaaaatctcattaggttcaccaaacgaagacgtttccacgccgttagaaccaaacctcgtgaccgggaaaaaatcaggacattcccacattccacttccgtcgtcgtaatgcaacggctctggagatttttcccattttagaaagtctttactcgtgtaagtaatggctagtccacgacggtgaatcttgcttccgatgatcactctccatttcttgtcttggcctagccacgcggtggttgggtcacggaacgagctggcgttgattccgttaacggcgtcaggagccatgagaggatttaacggcgactttttccattctcggagataaggatcggagagattcttaggctcggctatgttttggacctgttggttcttagggtcgattccggtatagaggataaccggttttccattagggagaatagtagctgaaccggaccagcatccgttgatatcgaagggtgcagatgggaagatagctggaggatgtggatcccaattgattaagtctgttgacgtggaatgagcccacacgatgttaccccacacggctcctttcgggttccattggtagaaaagatgatatattcctttgtatatcataggccctgtattaaaattttaaatatgtgtatttttattagttaagtatatggatagtgtaaaaggatcctgcagcgtaacacaaggtcgaccaatacaatacaataatcaaatgtacagttgtatgctgacatatattggtgtaatcaatgttttataaaataataaaaaacacgagttttcagggaaaatgatctgtctattggatttgaagagttgactaagagaaaaaaattaaaaagataggagataaaagagagaaaaactaaccattaggatctgctcatgaccaatgatcaatccattttgtccaagcacgaaccacaacgaaataaaagcaaaggtaagagagtaatgaaaataacaaacattgagattgaggttgatatggcattttggtcataccgttcatccaatttttggggggttggaaatggaaaccggtccggtagggctggtttacggaaggagatttggtgttagtgctttgggtaagtctcttgtagacatggtgcgaggcttcaagattgacgacatagttaccaataagtaacgtgagcaataaccaaagtccaatgttggagcaaacttctttggtcattgtgtgtatttaatttctttgtggcttggtttttgtttgaatgaacgta

SEQ ID NO: 1295 - DNA, 47466 bp, Arabidopsis thaliana
ttggtcggaacagcggctgcggtaacgctactctgcatagccgcagcgtttctcaaccgcaattctcgagggaagcaagtagcagacgcagagtgggcgtctgaaacagcgtttgggtcaaggactatggaggaaaagaggaaatgtaagtggagcaaagtgaaaagaacgttgatgggttctttttgttggagctctgctgcgaagtggatggagatggaaacaaggcggcagccaccattgcttgcggttaaagaaaggagtcttaatgcggttgatccggtttggcagcgaccaattctgatgggtgagaaatgtgaattgcctcggtttagcggccttatattgtatgatgaatgtggccatccgcgtcatcatcctcagcttcaagaaaaagtgagtgttaatttactcctgacctaaatttaacaacaaaagtgttttttggttttggtcagagatggatataagttcttgtcattgctgtttttgtaggtaaaacagagttctgtggtaagaacaactctgagagatttgctttgacagtgattttctctagaaggaagtctcttgaagtttcgtgtactacaagttataaaccacaatgaaattaaaggtcagattctgagagcgctaaaaaaatgtgtatgtatcaatgtcttaagtgatgtagatgcaaattttctttcctttgttttttttgtgtgtgttattgattgcttagaggtacaaaggaaaagcacaatcttatgaacagacaatttgctccaacttagatggtttttgtgtgtgtgtctttttgattgcttggagggacagagaaagtggaaatcttatgaacagacaaaatagaataatccttaacaaacgtcttcaaatcaacccaccagagatttccatatcaaagaaaaaaaatcttatgaacaaaaaaatagagtaatcttcaaaaaaaacaaacaatatatggacaaacgttatcgacccaccatgagatttccaccacacaaaaacaaaacccacgtacaccagtgaatctgtcatgtgtcttcacataatcttcagcaattgagccatcaaaactgaaaaagacttccatccttcgatcatgacagaagcagagagaataaacatcttcacgccatgagagaatgaaagccggtagatagtcacaatgagctacacagagtagacaacaataacaacaacaacaaagaatcttgatgtcaccacattttctggtttcttttaatttccccactataaatttgcttctttgcgcgaacctcacacgtaagaaacaatcaaaggctcttttgtttcttcttctatagaattcctgtggtagtaacagtacaaagccagctgcacaatgccaagaatcgttcctattccatttggtgtctgagtggccaaaaaaacaacaagttttgtaattagtactatctaatgaaagaaaacagagattccaataggaaatattgttgagtaacttacataaacaaaggcatcgctgttgaataacccgtaaagaaggaaggaagcactcatcaagaaagtcgatagcgagagataaaacggcataaactcaacgctcttagtccgaatcactaggttctgcaaagaccaaacaagtcaggcaatcaagaaagctacatatatattttgaaaagatttgttgacattttttgggaacttacaataacaaacaacggcgaggcaaacattgaaacaagagaaccgcagctcaagaacccgacaaagtaccaccgtgtgagctggtcaggtatctgcaaacttccagctacaatcactccaaccacagcaaacaccacaaaaagcaaaccaagcatcttcatctgccatgatcaaaatgttgatttagagttagaaaaaaaaacaataatttgtttgtgtgagtaagaagtagaaacaatccaaaaaccttgttcttcttgtctgtatgcatgatgaagaggataatgtagcaaagctgaaacgtagctccaacggaattcacagtcataagcatggcattgctgtgtgatatgaaaggtgtgccataccaaaggcagatcaagcagtttaagagagcgtaaatgtatggtaaaccggagaattgctccgtcgatttgttcctcatgatcctcctaaacgttggcctgaaagaagaaaaaacagtcaagtccatagacaaagaaaaactctgtttaatacatacaacgaataagtgaataagaagaactcacattggtgaaacgaagagtccaaatgcaaatatgttgcctgaacacagaagaacaaatgaaacagtgatattaacaaatggaaaaaagtttctatctttgtttgtgaattgcatcaatttggactctacagaagcagatttctagaatttttccgacaaaattcagaaacaaatttgaatcttattaacgttgtttcagtgcctagaaaaggaaaatatgcggaccaaaaatggccaaaatatatactgatttggggatattcatggaacctaagccagatctagttatatatattacatggaatcaaaaaaggaatttgaatattgggttttaccacaattagcttaaaattaccaaacaaaaaaaaaacagtgaataggataaagttattacctgcgattccggcaacatctttacacatggataaagaagcattgaaagcaaaaacatccatgagcttctctctgtcttaaactctctgttttgtttgttttctcttcagaacaacaaagcttgtgctttcttttttttcttgctctgttatgttcttatggaaacggatcaaaacgttaaagagagaattaaacagagacgagatttcttcttatagaaacttttattttaaaaaaaaaaaaactgaaacccagaaacttaaaagaagactttcttaaaaaggtaaggagcaaaaggctgaatgtgtacgactatatatatgcggtccatatttggctttgtctactgtttaactatcttacaaacaaattaattacgaaaaagtgtcgtaacgttatacatatttgttaataaattccatttaaaataatatagatcatgaaaaaattaaggtaaacatatgcataatggtctaaaaattctcttaaaagtcttaatgatattcgaaatttgatcccattgattaaaaagattgaaaaaactcgaaaggttttgaaaatcatgcctaaaagagacacttaaataatatgtcttctctgttttatagcctgagctgtaacgttgatccccgtcgacattgatctcaacttgattatctgaaaatagttgctgaccaatcaatttttctcgttttttggattgagtttggagcttcttttttttttcttttgagtggtctacatttgacattctcttagaattttaaaatgataaagaatagaataatattaattaacatttggtggtcgtatgttctagtctacttcaacaagcgttcgggattaactcatgtgtctcgcgctgagtcactcatcataatcttaaaaccctaaggaaaaagaaaatccaatggcacacgtaaattacactttctttctttttataacaattatactgtttttaagagcatcgttaataaaacccttcgagtgatcaaatcccatttggtttccagaaaaccatcataaacttattcttctttcaggatctcatttgcggatttgcctctcaatttggtcaacacgtatactatcctagcgagacgctactcatacgctcattattacaattaaagtacaatcatttatattatgagtgaagttattatctacgttatctgaaattataacttacgtacgcgagtgaatacatatactccaacttgtgaagaaattaacgtttttccgataaatcactttattgatatatcaaattaccgatgatatagttgattaagccatgtcgctgtttcgctgaagtatgtttaaagtacgacgccacgcgatctgtataacaaagcgtgggacaatcaatctttcaatctagctaacgttacgctaatatcacgaatttttctattctatatatgtattcaatgggtttgacttttactttgtgacacatttattcttcattaagctgattggttaaacagatttaaacctttctctttacaataaccattataacctatataacataactcatgtaataagccgataatcgagcgcgagacacatgagtttatccattagtcactgtcagtctgtcaccaaccattcagaacatttgttttaaattttaattacgtgaatgatctaattacgacattgtagtaatcaagtggctaagcacttaagcttatccaattttcagaaattatatataccattcgatttcgggtgtatacaaaatgtatacggcattaaataaaataaatatttgatttataatgtaacgtagaatatattttatttttgaacaattacgtagaaatatcaactagattaaccagaaaaacacgtgaattaagcaaaagaaaagtcattaggagacttttgctattgattttaaaatatttgtggcgctctgaatgtcttggttttgaatatgatgttattcattatataatttaattaaacggagaaatatataaccttttttttgtcaaaaggagaaatatataacctaagtaatcaaatgtgtctagttttgttatttttctaaataattatgaccaggccttgtcgaattaaaagttaacaagttatgatgaatgtgtccgaaaaagtttgagatacataaatcaataaatcacatcacgtagacatcaacaaataatttgtgtatttctaaacgtgcaaatatttcctctgtcgcaatttccttgaatcgtacaataaaaaaaaaaaaacgcatgggttaaaaaataagtgtggctgagaattgataggtagaagttgttgttaaattattgaacaagccagctccatcggtagtgtgccatatgcaccgcaaaaaaagtgattatcaactacgatggttaaaaaagaaaaatcttctcttacattaaaaataataaattctttttgttttaccgtttcaaaatggattatatttccaagcagtatctatacaaaattaattccatacatactctagttattaatattttccatatttaaaataaaactttgatctacttttctattcttttatcaaatagatccgtattttgaatatatgttttaaggaattagatctctctcttttttcctgtcatgcaattcgtagacaaaaatataatttgtaaactaattaaatattcgaaaacataagttcaaagataacttaaatgtaaatatttagtgtcttacaaaccataggaatagaacaactagatagaagataaaatttaaaggcttagtttgtcgtttttgttgttatcggtttggtttgctctcatagatggaggtacttggtctggaaacatgttttgcatcatgttagtccaaaagtcgacatccttgagtttcagctccatctcttcaatcttcttctccagcttgttcaacttttcttgtgtctcgagatacttatcttcgtaaaacaaagatggaaccgccttcattgatccatatgcaaaacgtttgtctttctttatttgaacctcctaaaacccccaaaaaaatacttttaaaagaaagttagttgataacttataaaattattgttagaaaataaataatttttaaaaattcaaaagtgtcacctctttgtatatgtcatctttttcatcttgggtgagatattggtggtctccttgaaacatttgagttagtctctcgtcctctaagactttgctcttctcaactaccaactcggctttttggtcgacaaaggtctcgtccgaatttatcttgttggtctcctccattgaggtgtccatatcaaggagctcaccaatctcctcatcccggtttaattgtatactttctggggttgaggcacggcccatacttgattcgattttccttagaatttcatataaaacagaagcaatgctgcgtgcatttatcaacttctcttgctgactatattcagataaatttccataggttaatgttggttcgttgaaattgaactagaactagcaatagtcagtagatttttttaaaaatggaggatatatatatacctattatccaaattgaatgatgcaccatgtctgatgatgtattcattgtaagcatgataaacacgtttgagttccttatgatcatttatttcctttcttcttcttatagtaaactcgtcatcctactacaagtaaacaaattaaagatcaagacaaacaacataacaacttaatatataaggttagaaatttcatgaattatccggagactgatccacaccattcatatgatcggtcatatcttaaaaaaaatcaagaaactagctagaatcagtgtcacgttttctactcttaggtgacttgccttctctagccttcgaagaagagaatttttgaactgtcgtacacctcttccgttagatctactgtcaatgcggtgagcttcttcaaaagtataaaaacggcctacgaccagaaaaaataaaaagattaacatataaattatgattctttaacaagaaagcgtgaatttcgactcaaaaacagagaaaatcctaaagtagtactcaaatttagggaattagacgagagtaaagtaaactcacatagataagcaacacgaggatcatcagactcaaccaagtttgctacacgaagaaacctttgaatccctgaggctaatgtctccggaagcttctcgctgtcatagggctcccacacatattgttctttcaaagcgaggggtctcgtgaacaagctggttgccggcgaatcttccgggaggatgggatccatatcaagaaaaacatcggtaggatccacaggggcgatttcgttagacgacattgggagatgaaagctgcttcttctattgttttagttggcatggagataacattggagatggaattaattatataaagcagcacttgcttagcgaggtggaattctataaaataaacaatgtaaagacggtgtttgaagtgttaattaaaagtgatttattggaggagaaaaatgctttctactagtttggtactagagaaagtggtttcctagcaaaagtttacactttacacgataatatcaacgtgcatgggaaaagaaaaaccattaaaacaagttgagatagactaaatcttatgaattggaatataattaaagcatatgtatatatttcttagccaccaagaatataccaaaatatagactacaaaaataacttgatgtccaaatcaaaccaaattgtaaaatgtattaaaaaaaattagtcatcttttttttttttgtaaaacaaacttttttagtcatctttcggtacaaatcatagatgagtagtcgatgtgttcaaaattatcattttatttattaccattttattaatggtaatttttgttctaactatttgtttagtttgaatgtgtgatgaaattaatttctaaagcgtagtagtagtagtaatgggtaatttggtcattgcgtagtctcccactggttctccgtaactgtctcaaaattactcatttgagacgctcattcgttttccttcgttccctctctttcttcacactcctttttttatttatttccattgatctctctcctctcctcgatttttccctcctttaatccatctctgcatattcttcaagcttgggttcatcttcatcttgatctgaatcgatccggtatgtgaactctttctctttccctcaattctctataaatctctaagctcaattcgttattgtacgtcttcgttctgcgtttgatgccgtatcctgaagtttttttttttttttcggttcatgatgctttctcatcgttttccactggatctgctgctaaatctgggaaattttagcgtatttggatttgctacatttgtcatacatacttctggatctagatctgccttattttttccttgatcatttcgaattttggattaatagttgtagcttgtccttttatcaattcgaatctcatgactttgattgtactgaatcacacagtgaaattttgtaaaaaaggatagatttttgaatggttctgcttagtgtgtagtctaactgtttgattaaatgtcgcaagatgaagtttttcttgtgctgtttcgtctgtcaatgaagcttttctgaattgaattttcatgggttttgatgttgcagatggctacatataagcctaagaacatcctcatcactggggctgctggattcatagcctctcatgttgctaacagactagttcgcagctaccctgactacaaaattgttgtgcttgacaagcttgattactgttctaatctgaagaaccttaatccttctaaatcctctcccaacttcaagtttgtgaaaggagatatcgccagtgctgatctcgtcaactaccttctcatcactgaagaaatcgacaccattatgcactttgctgctcaaacccatgttgacaattctttcggtaatagctttgagtttaccaagaacaatatttatggtacccatgtccttttggaagcttgtaaagtcactggccagatcaggaggttcatccatgtgagtactgatgaggtctatggagagactgatgaggatgcttcagtgggtaatcacgaggcttctcagttgctcccaactaatccatactccgccactaaagctggagctgagatgcttgtcatggcatatggtagatcatatgggttgccggttataacaactcgcgggaacaatgtttatggtcctaaccagtttcctgaaaagttgattcctaagttcatcctcttggccatgaatgggaagcctctcccaatccacggagatggatctaatgtgagaagttatctctactgcgaagatgttgctgaggcatttgaggttgttcttcacaaaggggaagttaaccatgtctacaatatagggacaacgagagaaaggagagtgattgatgtggctaatgacatcagtaaactctttgggatagaccctgactccaccattcagtatgtggaaaaccggccattcaatgaccagaggtacttcctcgatgaccagaagctgaagaaattaggatggtgtgagcgaaccaattgggaagaaggactgaggaagacaatggaatggtatactgagaaccctgagtggtggggcgatgtttctggagctctgcttcctcatccacggatgttgatgatgcccggtgaccgacactctgatggctctgacgagcacaagaatgcagatggtaatcagacattcacggtggttactcccaccaaggctggttgttccggagacaaaagatccttgaagttcctcatctatgggaagactgggtggctcggtggtcttctgggaaaactatgtgagaaacaagggattccttacgagtatggaaaaggaagactagaggatagagcttctctcatcgcagatattcgcagcatcaaaccaagtcatgtcttcaacgccgctggtttaactgggagacccaatgttgactggtgtgaatctcacaaaactgaaaccatccgagtcaacgttgctggaactttgactcttgcagatgtttgcagagagaatgatctgttgatgatgaactttgccactggttgtatattcgagtatgacgctgcacatccagaaggttcagggattggttttaaggaagaagataaaccgaatttcactggttctttctactcaaaaacaaaggcaatggtaagataatatcacataaccaaatcacatctgatcctcagtctcttgaactctgtccataaaaaatcctcttgtttctatttttgccaggtggaagagcttctaagagaatttgacaacgtatgcaccttgagagtgcggatgccaatctcatctgacttaaataacccgcgaaacttcatcacgaagatctcgcgttacaacaaagtggtgaacattccaaacagcatgaccatactagatgaactcttaccaatctcgatcgagatggcgaagaggaacctaaggggaatatggaacttcaccaatccaggagtggtgagccacaacgagatattagagatgtacaagagttacatcgagcctgatttcaaatggtccaacttcaatttggaagaacaggctaaggtcattgttgctccacggagcaacaacgagatggatggtgccaagctcagcaaggagtttccagagatgctttccatcaaagattcgttgatcaaatacgtcttcgaacctaacaagagaacgtaaaacacagacacacacacgcacttccccgctctgtgttcactataatgtttctactatagttttatctgattcatttactctctttttttgcattctacgacttgcatgtagctgtcttcactcattctacgtcacaacacatctttgttttccattaatgttattacacagatcgatttgttggagttgtctctcctttcattattggttcctcctactcctattctataatccctgttttgttttcatgttaagcaagatatagaaaaagaagaaacaaaattgactttaacttatttccctttgctttaaacttgaggattctatttgttacaaacagcaaactcaaatgcataaataaattaaacttctgtactttctgttccatctacgcaacacgaccatctaaaagcatttggctttctcttcagtttcaccaccttagagaactacgagtgacattccatgatcttttcatcctaccacaattcaaaactagtaaagttaatgtgtatcgaggaaaataaaaatttattcacttagaatgatgaagaaaacggtggaagtgaggaacgcaaagacctcaataccttgtattttgttcttctcttcacagagtttgagggtattgtctagacaatggtagaatttcttggctcgttataagagatttaagtcagtaggagttgatgattgattggcttttgaattcttataaaggagaagaagacttaaatagagtttgagattgtaccctctgtttctgtagacaaccagtcatgtgcacagaacaaagcctgtctgatatcagggttcaaggaactctgactatcagagatcaccggtgtcccagagttgaaggttgaatcaggcgcacagattgacatcggcgtacccaaaatgtcacgggccaacaaagagaggatagggtatcttggtgtatggaccttccagtaattcagaatgttgaactcgccactacggggaaagatcggttcagacaagtacttgtccaaatccgttgttgtgttttggttctgagaagtctcgtgaagaaacttgtcgaaccctttcagtctgtctctagtgtccatactagctctacctaaaccggatccagagaaggaatcttcaccgacaatggctgagcacatcgaatatgcatcaagaagctccttgacaccattcgacacttccttgatacgatccagagcggtactgccatagatcttagagtagtaatactctaccaacttcatcttgaatcgcggatccaatatcgcagcgattgctaaaacaaggctgcatttgttccaatactcatcgaatttagccttcatatttgctgcgagagaactcaagaagttgtcctggttcttgcaccactcgaccaactggatgtggatatcacacatctcagcaaagtatacatttgctgtaggacatttgtttgctgaaaagtcagaggcaatatcgaatacaagtttaagataaccagtaacgtatcttgtccattcccactcctcgtcggttagagatgaatcaaagctgtgatcgtgatcacgcagatggcaaaacgcacccttgtactccaatacggtttcaagcatcacgaacgtagagttcgagttaacaatagaatcaagaaccaagatcttctgggagttgattccggcgagttgagcaatttcgttgaaccttacttgtgttgattgcgagctcttgacatatctcacacttcctcgaatcttttggatcacatctctcatagcctccaagcaatcttcgacaagagaattcagaagatgagcggcagatttcaactcaaataactgcccgttgattaatatctggctgctctgagacatatggtctttaattcgcaggacaatctcttcattaacagaaacactgtcgaacgtaacagcgaaaagcttgttctcaagactccattcaatcaaacatctgatgatcacttccgagagcatatcttcagtatgagaaggatccaaggtgataaagtttagaacattcctatgtagcctccactcctcatcgatataattagaggccaaacacacatagttagaattatcccgggaagaccacatctccaccgaaagattgactttaccgtataaatgattcaaagtgtgctgcactctctgcttctccctaatgtaaatctccatacatgaatcctcaattgtgctatttggcacagcttcaaacaacggctgaagattcctagcaaaaactttgaatccaacatgatcaaccatggctaacggataattgtgcaaaataatcatacgtgcaagatcaacctgactcctttcttgactaaaccttccaccacttcctcggcttagaaccacctcgtcccttcgttggtcctgatcaaacttaggtctaagatactcttctttcgcttgaccgtcatcaaaattgatagtagcaacagtaactggattctcttttttccttcttttaggtgtcagcaactgagacatgtcgtgattagttcttttgagacaccgcataagatggttccgaagatgagttgttccgctgttgctcgaaccactgagttttttattacactgaatgcaaacagcatagcacacatcagcctttctcactctctcaaagtaattccagacaacagatgtcaacctctttgatttctgcaagattatctcatttgattcatccatcatacaaaacttgtatccctgctacaccaaaatccctattcattgatttaaacaacacaattagactgaaacaaaaagatcagtttttttacacaattacaatggcgtgagagttctgtgattatcctagagcatcacaccatcagcatcaaaaccaagttcagtaagacgaaagcctacttgatgaatgcaccacattcattgatcaaagcaacaaacttgagactaatttacacaattagaatggcatgagcgttacaaagatcatcccaaagcatcaccatcagcattacacagtcatagctttgatcaaaaccaaaaaaaaatcaccattgcaacagagatcatcaaatcataaaaccaggatgcgccacattattcaacaataaaaaccaccacacaaaattcaatgaaatcaatcaaaggtacaaactttaggatgaaattagtcatacactagaaacaaacaaaacccttatgaattttgcgagcaagcttttgatatcaagaaattagccgagagagtgaaagaagaacagagcaatagcaagaaagtttgaaatttggacacctttgtttataagagaaaaaagcaaagccgtcagaatctttggagactagaatcggaggatccgaggagctcttttaagggttacgggtggaagaagctggatcgaagaatatcagatccgatggacgatttgggttttaaagacccgcatttaggggttcgggtgggttaaaccgatggaggagaaaccaaaatccggttttggatccgaatttatcccggtttcgttgtaaacgcggtttttggcgcggttggatagatctgattagtgatccgatctcaattaatccaatattctttctttttgttaattatagacttatagtattcaaaattaagatgttaagataatgtttaatttataaatatgaatcctgttaatggtaaatgataactagttaactacattgtcaaatacatatttaagggtatattgacctagctaacaagatggtcgaagaataacaaatctctcaaaacactttaatctaaactatttatcataatctcaatgtgttttgacgttacgaaaaacttcaatttcatttccttctcatcaattccatttataaattatatattcttctttttaaaaatatgggagtatatgcttagttaaaactcgagtaatttgcaaaaattataataaaatcattttatcattttcagtgatattttagaagaagaaattttttttttattaatgtgaggttttcaactttcaactttctatacataactaaatattttttgacctattatattttacagtactttttattggattaattagttatagacttatagagttatagttaataatgtttgtacaattgcgctttcatttcctcgatttagtagaacaacatcataaaatgtctcaaggccaataacttagctacaacaatgactacttattgcttaaattaccacaaactaacttacttcaacttttacaaaaccactcatacatattatatacaccattaacaatcataatcttctttcccataacgcaacgaaaaatgcatttctctgtttctctagaatctttcaaattcaaggaccgcgttgttgcatccatgaaggaggaatgcggtctgaagaagttggattagccgtaggagggagacttcgaacattaatgttaagaggatataagcgatactcgatatctagctctctacaagtttttcccacttcctctagtaatagacctcttcttatatacctctctcccatgtcttgatgattcattctatgtgtcaaccacaccgctatcttcacactattcaagtcatccatgcttaggaacacaatcataggtgcaggataccaataatccttcttgttgtctacgtaactgcatcaaaacataagaatatagtttagacttcactttcaagagacttaacctagtatatcggtcagatttagggtttaacgacgaaccttagtattctctgtttaatggcagtgatcttttcaggaggagttgctatatgaacacagaattcaaccgcgtctcccatatcgggacttcggtaatagttagctataggttttgtgccgaggacactattcggatatatgatcttttgattatcatatcgcaagaaaacagtcgtcaatatgttcatctcctccactaccaactggtatataaacaagaaaaaaatatcagaacaaggtcaccatattattataagaaacaaaaaattgttgtataatagggaacaaacctgaacaccgtcgatttcacatcggtcaccgacatcaaatgggtgcataacaaaaaggaaaatgatggcttcgaagatggttttgcaggagtttccaaatacaaaggctactagaaggagctgagagcttaagactagcaagaatctggttgtggcgattcctagtataagaagccagatgattatgattataatgccaattaccacgttgattatacggtgaagtctgtccactgctgtttttgtatcgtttaaggtcaaagccagagctctcctttctctaaacgccttaacctgtgaaagaactcgcgagattagataactctgtttccatgtaaagattcttaattgatatattgaatttgagacttaccacccaattcttgaggcaagacttgctgatcttatcgctctctgaagctccttcaaagagagccatggctctttcagcctcctcttcacatagaaaacgcaagaagtcttccaaatatatgtacctaaattaaaccagaaaaatcctatcaagattttgagctgaaaccaaacaaatcaagaactttgagaaatatgatcaaattcaaggtatatacctagaacctggctcggtgacgttgtgaaaaatcttcctagctgcgcatttagcttcgtactcgcttcttatatgcgtagcgtcctcatcctcctgagtagtgtcctgcatattttgatccaaagtagaaatagcgccttttagtattatattcatcaatctcttcatgttccaagcagacacattctttgtgttcattctcttcaactgatcaatcctaatcccttcgccatcttctcctctcttagaaccaatccgattcagtcccggacttttcccgactttcataaaactcttgacggtcgcttttagagctggaggcagcttagctccggctaatttctctaagctcttaacatcttctgctacttgttgctcttcttcctccattctctgaatctccatcaaaggaggaccggagagagtttcaatcacgtattgagtgaacaacgactcctgaatccgatcaaagtaagtgctcatgtggaacgatgaagccaaaactttaaccagaattgttttaaccaaccaaatgataagagccacaagcaaacataccaacactctcgtcacataccgaagagcagtgctccgagtctctctttcgactttcttatcgaacaagaaatgccacgcgagcaacactagccctaaccacaagcagttttgaacagattttctcactccgtagacgaaatacaaaacccttttcctccaagtgaagtttttctcgaccaagaagacaatgattctcactatccaactcgagactaatctcccacatatcaacaccaaaacagtcacttcccatttccacaaatccagcttccaccatgtcttgcgttgcaagttatgtatggttaagctacagaccaaacttgtgactatcagaactagacttatccattcaaggaaaacccagaagctaagtttgtcccttttgaattcctccggtaaatcctcgtctagaaacggatcctcctcttcttcttcctcaaacccattccgacccggagtacccgctttagggcttttcccaagaaacccagatttaaaaatcccggatctccgaccagacttcatctctgtcttgtcaatcgctggatgtgtcggtgttggaggatcctgcaatcttgatttggtcttgttcctactcaacatcggtttcttcgaaccacacttcaaaacctctgcttcgtctctgtttcgaccttcctcgtcgctacttccacctagcgatgttctgttctgcctccgtcttactgcgtctgctttaactttagtcttaaccggagaagaagattcagaaatcgtcgttaagccacgtcgcggcgtgttgctagcagttgcaggacgtggcggcgtgttgctctgtagctctgccatgttaagctcaacatctaaagagatctcatctcctgaagctctctgcttgtgaagaaactgaccaattagcttcgacggcggatcagataactcagctgacgaatgcctccgctctccccgctgcctgaaatggaaactgccgccgtcttcgtcttcgtcgtctcctttcttatcattcttacccttttcaccatcccaaaagtcatagcttgactctttccaaatattacctccctcagcattgctgcttgaccctgtagcaccgacggctccactctcttggccgttgatgttcactatgaagtcccgccgatcagttgaatcgacagccgccatgattccgttagagatctcacaaaggcaagagactagattttcttacctaaaagaagtaattatttccggaaaaaatggagagaggtttttttggaaagtaatgatttttgttttcagaagagacgagtgatagtgtacgatcaaagaagaagatgagggtgagaggtaataatgcaagtaataataaatgttgtgaaaacaaaaaccaaaatagcaggtggtatttgatgataaagagaaagtggaagaaaatttgttctcaatatatcaacgtgtgaaagtttaattttttgacgaaagatttttgatagtgcaagtaacttgatgatcaatgtggtatatatatgatgtgatgtgatttggtgagctgaacgttgtgctaattgctaaaagcaacaaaaaacaataataggaaatgtttttttcttctttctactatggccctttaaaaagtaacaatggtgtacggatgaaaaggaatgctatgataatggaaattttttacaaataatggtaacaaaggttttcgacaactatgcaatcctgaattttgggttgtatatttttggggtaaaaccaaatagattgttttgaaaaaaggtgtaaacaatgtaggactacgtaaaaaagatacatgcaatttcatgtcagtggttttatttactgattaaataaataaaaaaatcttttggaaaagaggtatactagatctctttttaaaaagtagactaattttatgtgttcttctaatcttttgtgttgtatctaatagaagcaaaatagggcacttaagagatgttattcttctgattactatataagtttattacatttcattctattacacctactttatttagtaagttctaccaatttgacctaaactatcatattcgaattcaagtcagatagcactgaaacataattctgctgactgattgaatcatttttatttggatggagtcattacaaatcatcactgatatatgatttctttccaattccaataaaatatttatttatttgcaccactaattctttttataatcctagtacgaaggctcgtgtcgtgctgtcgatggtttagccgattaggtttaataagtcaaaatgtacacagagtttggagtttggaagctcaataacgcatccaaaactcaaatcgtgttgtttctagatttatttcgacaatatgcatatgcgttagatatctaaaaattacggttttatttgtaattagctaaaaatattgcttcatggctaagacttaagagtggtgcatgtctctgcttttttgtgctctttttttttgttttatagaaaaatcgatttctatattggactgtcagcaatgtagaaagcatgtcagttatccactatacgattagctgttaatatcaacaagaatggattataatttataagttgtaaactgtactccaattttccataccgtttacgtattttgttagttaatcgatctcacgtttgccaattaccatatatatatatgatgttgctagctacttgtatatactcttacacaaattataccgtccctttaaaacccaatttcgctatggttttatcatcgcagttttttaataccgattttggctagaacgttttggttagcagcaaataatgtaatccttttttaccttttactatgtaggcgggagcgaagaagtaaattttccaaaacattcgaaaagtccgatcacctaaataaacgaatcatacggaaaataaaataaaataaattcactgttgtgccagactggcttacgtggctgcgtattaacggcggaaagaaatcagcaaaacgccagttggactgataagaaaggtacacgtggttggccacagttggtcgacctggcgaatgaaaacaaggttggttataaagaaaacgacaggaaagtgactcgtgagaaatgaaaacggcacacaagccacatacgcaactaactagaggtcaatcgacatggttctctcgacaggattggacactccgtgttatatattgctgactctatatctctcttgtaattatcacttactcgacttggatataaatcttataatatacaggtttttagttttggtaatattcaattctatttggcttttctgttcacatttttttttcagtatttttttttcatttttgaaactcgattttacatgaatctcatgattatatacgtttgatattgatttgttgatttttagataaaaataaaataaaatcaatctaatcaaagttaaaatgtaatatgtatcattttcatatccgactttttaggtttagttcacatgtgttcagttcgattactgaaatttgtaaaaatctaccttaaacatcattgaacgagagcataaaaaatctatgaattgaatgatggctaaagaataatacaatcagaggataaaccgtgtacggttctttttattaaccaaatcgtgatatataaaaacaatgaaactatccatcaaatgaatatattaattaagttagtcaaatatttgattattgctgttataaattccatgaatatttcgcaatccatcaagtgtttataattagtattccaaaaatagtaaccttatagtagttttaaaaacatcgtaattagtgaaagactaagaaaattaatccttttttggtagccgatttggaagatggcttaatctataagcacggtccaaaaaaataatgaaaataaatgcagtgatttggtgaacgggaacatgacaagaaaaaaagcaggttttaatttgttggagtgaaaaaactaaaatgaaaatggaggacttttttgttcgtgaccaaataagatcaagaaccatgcatggaccagatttcattggatttcgaatgtctcggtccaatcatcattcatctaatgtttttgtctatgggccatctgatttttgatcgtgtgagcttggaaccgccgaccgcttcacccatccacatgtactcacaaatcaactaaaaacattcgaaatgaaggtatgtgtatcagtacatatacgataatgtatatttatatatacatttttgcagccattttagcaaataaatcgtagagttgaacttatttacaactaaatgccattagcattaaaaaaaatttccaaaataattaattttacattaaatttttaatttaaattattaatcacattatcaatcaaatttaatccaaacaaacttcacatcaatcccctaaaattagcataaacttcacattaattatttagacataaaaatatttatttaaagatttaaatcttctaaatttttgcttttagagttattatatcattatctaaaaggcaaaaaatattaattttttaaatattattatttgtatatttaaacttcataaaacattattaatatttgaatttataaaaagtttaatctatcaaaaataattaacatcattatataatatatagttttaaaaaatctcaaaaaaaatttcgtcatattttgtgattcgaaattttaagaatgaacatatattaaccaattggcgaaaaatgtgtgggttcaacgtcccgcaacgactaatatattttgacagtgattcataaacttattataaattaaatcaatattaataaaataaatagttttttttgtggacgggtttggaaggacgggtttggcaggacgtacttagtaacaatagtaaactataaaataatttataaatttttatatatatattaattttaaaaaatgaattgtctccgcggtgtaccatgggttaaaatctagttaactattaaagacgttcaaaaagctatatgcatgtatatatgtatatatttacaacagaacgttatttgttaattaatacagtatttgcaggtggatctatcaatttattttacatgggccaaaaatttaaatagagattactttaccatctttcaaattcaatcaagaaatggaaaacggaataaaatatgttgaataaaattaaatgattatatgctaagaaggaaatatgaattgacgtgtgaaatgaaaaaggaaacaagataattctaaatggcaaataacattcagttttgagaagtgaatatgttaatgggggaagaaattattttttaaaaggggcgatttattaatttcttagaaatctataagaaaattagaaaatttatgggtggcaagaaagcagatccgcccatgtgcatggatgtgagatcattttcttgtaatatgtattttgtttgatatttgtcctttaaaatatctcagattttgtaattttgatttttaatttctgtataaaattttgcctgaattcgctctttctgtttccttttcaacatattttgtttttttcattttgtttacggttacgtgtatcatttttcagacagtatatatatgtcggtgtgtctcagttctcatcatctccataacaaaaagaaaaattgtaatcttagtttctcactcggttaaccataatatctagtaacatggatctgcatcttataggttttctcttgtggttttttgttgtacaagtgactacaagcagtggtacatacatcaacttgtttaagattaatttgattacaaaacaaaacaagtttttttttttaatcacgttctaatatattttgtttctttttggaattaagctcataggaacataacaacaacaataccagcactaatagtttttggagactcaatcatggatacaggaaataataatgacatccccactcttcttaagtccaattttcctccctatggtcgagattttcctggtgctattcctaccggtagattttcagacgggaaagttccatcggacatcattggtaactatcaaaactttttctcattttacttttctagttgcttagtctatcttgtagtccttatttctttttaaaaacattacagcggaatcgttaggaatagcaaaaacactaccaccatatttaggctcgaatctaaagccacatgatcttctaaaaggtgtaatctttgcttctggaggttccggttatgatccattaacatctacattactggtacaaatatttacattcgttatatattataaatattattatgattatgtttctaaattattttggcttttgtacatacttttttcagtctgtagtatcaatgtcagaccaactaaagtattttcaagaatacctagcaaaaattaagcaacactttggagaagaaaaagttaagttcatattggagaaaagtgtgtttcttgtggtctctagcagtaatgatctcgctgagacttattgggttcgatcggtcgaatatgatcgtaactcatatgctgaatatctggttgagttggcttcagagttcatcaaagtaagtttttttttttttttttattttgttataaaccgccatcatttaatcacaaaagttctctaaaaatgatatctctattcttctaatgttttaggaattatctgaacttggagctaaaaacattggactgtttagcggagtaccagtagggtgtttacccgcgcaaagaacactttttggaggctttgaaagaaaatgttatgaaaagttgaataacatggcacttcatttcaattcaaagctatcttctagtttggatactctaaagaaagaactgcccagcagactaatatttatcgacgtttacgatactcttctcgatataattaaaaatcctacaaattacggtaatttacatgaattcatatagtttttatttatttacgtacatcaatgttaatattaacatactatatatgtttgtggattcatgtaggatttaaagtggcagataaaggatgttgtggtacaggaaaaattgagttgatggaattgtgcaataaatttactccttttacatgttcggatgcatcgactcatgtgttcttcgactcttatcatccgagtgaaaaggcatatcagattatcactcataaattgttagcaaaataccgtaaatacctaaacacctgaatcggtttaatcaagtgattttagttactttgattttattttttttcctttctacaatttaataataacgattttttcattaaagtgttttaatttgatttattttacgattacacttatttttgttagtctaaccgactatataatcattccgtctctatgatgtaaacttaactttggtaactttgtccaaacaaaaaaaaaaaactttgggtgaccaacaaaataaaaactcacgagggggtattggaatttgtttggatttgagagggaatgcttgtcctatattgccctaatagaatgttgattagcatgatttacgtgaatgttataaaactatataatattatttaattcaaagatatatcgaagggttaatgttgaaaatttaaccactaagaaatcgttacgtaatcgtccctaatttttataagttatcaacaacttaattattgttgacaccgaaagtggatttaatcaaggtgtggccgtaattacaacactaaaaatccaaattactatggagaaccacctggtcgatgtgataaattagtgacagcacatatgattaaattataaaataataataggaatattgttgtattggagacttaccacacgataaagagttaaactaaaaaatgaaagtaacttgttaacttttcgacttaattaatctctacaactttaaactttacaaccttattctcctttttaatatgtcggcaactttgtagtttatgcccatgtccataacatattcacagtgtcaactttagctaaatatatagttatctttaaagatacaaataatactgatgaagaatattataactatctataatcttatttgtcttcaacagttctatcccatgcataaccaataattcaaaacaaaaagattctcgtttttagagatatatatcaaatgggggccatgtaaagtatcagaaaaatgtggttgtataataagcacgttgacaaaagaatgtcgtagggccacggagaatcaatgggatataaaatttacccaaatattattagtttgatttatgtttctaagaaaccggtgaacttgaatcactacaacatgcaatttgatatgtttactatttggagttgatggtcggaaggaattgttatctctgattttgtgaactttcgagtgttgggagaagattctagctaggttactggtcaagagaagccgatcaaactgatcttcatcaccttctagctagctagttatagttcagagagtttccggataagtaatgttaaatatatactatgaaggaagactggaagaggttctttaattggtggatataattacagatgtgtgcaagaactctaaccaaatatgtatcacaaactaatcatatctctaacttcatctcaaaattatacttattacatcctgccttactcgcattttcgaatatctctaccacgatgaccagctattggagaagagaagtggcgggcgcagaaagggaaaacacacaatcgagtttagatttgtgtgttccggatccaatctcacacaagtcccacaaagagggaaaacctcataggagatggcgatacgatttgataagaagatacgaattactatgcttaacgtaaatgttattaagctatttcatatatataattattattttatatatgatggtgaggtttaagaatcaagcctaataacatttacgttatataattaataacttagtggaatctttggcaaaatctgcttttatatatattatcgcctcttatagtagtaattagaagaacaaggaacaatcattagtcaaatcttttataataatattatacgttatcaagaattttattactattgcaaaagaagatttgattaaggcgggagtacttacagcaccaactaaaactcccctggagaattatgtggttggtgtgataaattagtgccatgcaaataggattaatgtataaaataagaaaattaacttattctcccttttatccgtcgctaccaggtgacaattttatatatatagttttatacgaatgtcgatgaacatatttatacactttacagtgttacctttaggttatatacgtaccgatcgattagtagttaaataatctactactgctgtttaataccttagttgcattctgtcttcaatatgattctcattttgcaagatattaaattgggcatatacgttgtcaataatgtagtgtgcgcgttgagacaaaatataataggctcacggagaatcaaagctaaaggccttttaataaacgggcccatttaagttgtttgcatcattcattcctgcgaaagaacgatacatacacaaatcggttctcgattttctttttcgctttttagaaccatacacgaaattctcaaagcatctgaacattatttaaaacttctaaaacaaaatttttatccaaaatgatgtaacttattaacacatcaacacgttttatcaaccacagttaaccgatacgtaaggtaagccaaacttaatcgatctttatcgtcaccctcaggctctcttagttagcttagctcagagaattcaagagtttttttttgtgtggatatatatatttgatttttaaggaacttaaacaaacaaaagaaacccataatttattggttaaaattagataaaatggtggcgtgagaaagaggcccattatcaagagccaaaggtattgctttcaaagtggcggtaactggtaaggttaatctctgtgtgcctgccttcttctcagctcttctctttctacttcatttcccttggttccatggccatgcccctaacgcttcgattactttaattccaatatttccgatcttttcgtcttcgagtttctattgagcgtcgtcaaaccctaattttgacttccgggtggataatcccaaatccgtaacttttctaactctttctctcagtttattaattcaagcttctgggtttgtttcacaggttccaattgagtggttttttagcttcgatcctagctaaaacttaaacctttttcttttctcaggtttcatagctcgatttcactgataaatttccgagctttcggtgttttgattcgcatgaggatttgaattgactaggaaagataaagatgtctatggagagatctttagaagcttgggaagaggttcaacgacatggacaagacttagctgatcgacttgctcaaggatttacgggtttgattcatataaacccaccttcgtttccatggccgccgaatcaccatcatcttcacaaggcgaaactgttcgatctcgagttcccaactcaacatttcagtgttattaaggattctaggtttagtatcaaccaaccaatcaacggtgtcacagcgattctcgatattgggaataagataggtcaagctggtgttgactttggtgctgggttgaatgtgatggtccaacagttcttcaggaggttgcctataccgttcttacacgaggataataacaagcttgttgtctctgtggatggtgataagagtacaaggagccatagagcttatgtgatcacaaaaggggatttgggaatggctacagaacggttgagggactcagggttttctaagacagatgatactgcttctgttactatgtctgaggaggaagttgcagattcctatcttagagctgctggattgcttggaagatcaaaggtaactgatttttttggttcctcttcttctgtgtttcacctgattttttctgctttctgggaattttatagcagtctaagtgacttgccttcaagtttggcattactgcagggatgtatctagattgaattgcaatgtaagatagtttatagagaatgagaatgtaatttttttggaaatatagatgctagtttgatcctgatccggcaagactagcattaggctagtgcctagtggtaactgtgaatccagaagaaactactgatgtttcgaagcaagatagacaatgataagcctaatgtgctgtgtgtttttgggagactgaaagttgtttttttgtgtgtttgttctctgtctgcttgttgatctagtaacagtatatttctcggggaatgcagggaacaattgatacgtcatcaagttatgacagtaggacaaatggtatggaacattcattggcagccagaggagatctctggagggtagaagcttcacattcgagttctactgcaagcgatggaaattcgtctctctttcttctccaacttggaccacttctctttctacgcgattcaactcttcttttaccgttacacttatcaaaacagcacttgctctggtatggatatgataggaaggtatgcttacaaaactttgcccacttcaatgagttttatgtccttttagaattcttctatcccaaaactcatgtaactctgctaattttcgttgcagaaaggtatgcattcactctgtccagctatatggtcaaagcatcggaggtggcttatgatgtcaatgctctctctcaatcctttagcttgcgtaagccgctctttcccgtaaagctgctattgtgttctcacttctatggaactgattccctgaacttgtcatctatgtgctttggacagtcatttatggatttgcaatttccaaacgggcaattgacatatgtatctggcgaaggactgacgacaagtgcttttgtgcctttttgtggtggtcttcttcaagcacagggtcaatatccaggcgacatgagatttagttactcttgtaaggttagataccgataggaacttgtcatgatcagtgtggagcttattctcatgaaacttaaatgtgatttttgaaatctttttgtttgtggaacagaataaatgtggaacccgaatcacaccaatggtacattggcctgataaatcatttgggttggatctttctcaacccttggcttggcgtagatccggactactgatgaaaccgacaattcaagtcaggtaaaacagcttcctctaaccccatctccctctcaactggtaaagaatttgttttacttacataattcataaaccggaacagtgtatgtcccacattcggtggaagcaatcccgggattaaggcagaagttattcactcgttgagcgatgacttgaatctgatatgtggctacgcactcaatgcacatccttcagcatttgcctctgtagctgtaagcaaaacttcttatattttggttctctcaaacctgaccgtctcttctctcttgtgaccataacttgttctctatcgaaaactgcagtttggtcggtcgaaatggaatggaaacattggacgcacgggaatagttgttagagctgatactccacttgcaagtattggccagccttctttctctatccagcttaataacgctttcgagttctgaatctttccaatataacataggagaaaaaaaactctgtccatttagtcgtcatgtacatatatatgtttgaacagactgcttttatccctcggtcacttttgtatatggtagtttactcaattaacccacaagacagtctctgtaattccagcaaatattttcaccacgtaaagattacagtttcacaatttacatgttattgttttcgtttttgtcttggtttaaagtttggaaaagaaactacattatgttatttatatgtgactagtgtgggtctctgacacttatagttggatcgtagtcgtaggtccataaagactagcgttacaaattatattaaagttggtacacgacattaattgcaaacctcctttttctttttgtttattccaatttgaccatgtttgaccttctgaaactactacattttccggattttgggttatatatatgcgataatgtgataactggtagaagaaatatcgtggaacgttttccaaatttgtacatactaatacactattataatatgaaataattagtggacccgatgcttattgagaaattgttaggttagaaagtgatattcttttgaattgattaaaggtcccactgaataatttgacgacttttcatataattgttaactatcaaaattattcagtggtttatcaaaatctgtctcgagtctaataagagtggctttgaattgtcttcgagattcgttctttgatccaaagttaatgtttaagttcaaagaattaataaggatgactaggaagtatagaagaaaaagtataattggcaaatgtgataacaaatctaacattgtctctattactatgatacgcgattttttaaaacattatgaaataaattcagatttcaaaaataactacgggactagaaaacaatcagcatgacttcataagaatcagtaggataaagtccaccagcgacgatacggcgaggacaatattctgtgcaagagttaaatattagtatttggaagagttatataaacgaaacccgattagaaatttcctctcttacaaattctagaagaagtagacaaaccaaaaggaaattgaaaaaagaaacgaaattcgaatagacaaacttttcacgttccaaaacaacttgtattaacatatatttgctcgtacgttttagaacagttgacgcaaataactacataaactgtgtttagattttctgagtctccttctcatctttctatttaacatacacaatatttttgtataaaaatttgttgccccgttcgcttgagttgagtgtaaaaaaacctttaaacaacaaccacattaatatcccttaaaaacaacgtcaacattcttctgtaaactaaaagttaaaactctacccgttaattagtattagctcatcattcaagttgatatcttatcattatttgtttccctatactttttaggattgaaataatcaaaagaaaattcctatatccacgtcaaattacggggtcttacattaatacatgtaatcaaggtatcaaacaaactttactacttttttctacgtacgtacgtacctacttacctaaagccagaaacacactaatcacgaccacgtacttttatttgtttgctaaaagaattcttaaaagttattaatgtgcgggaaagaaaaattagggtccagcctggaacttgctgcgttaattattaatttccttcggtcgatgactctattgatctagtatcgatgacgttatacaattgacttacaataattttacgaacatcgatcatgccataaatcccaccaagtaaacatatagaaatggttcacaacttaaaaacaactataatagaaatggttttaaatgttgataatgtcacacacgattcagttatagaaaacaaaacctaacgatcttatattatatatccccatatatatatatatatatatatatatatatatgccgtaccataaccagtgtagatcaattttgactaaattaaattagtcattatataaaagctattatccttttaacaaagctaccaaacaaaaacaaaacaatcaatatatacttatctatccttttattgtaacaataatctcatgacttgatgaaaactaaataattcagttatttgtttcatatatttctggaaaagaaaacatcaattatttcgttcgaatcaattatagttatctacttggtttttttccttaacagatctatgaattatttcgatggacaacacaattcgctggccctctttgtttttctttttctcaacctggcccactatgtttgttcatgcaagtagcaaattaaaattcatatcttctttattaaaacaatagaaaagaccaaaataaaataaaaaaaatattctcttttgttttaataatgttgacttacttatctcctctccttttcgaaatgtcttcatgagtctctcttcttcttccccattcgtcacataattaaacatcgcttctgacttcactctcaccaaatctctcttctttctcacacacaacaataaaaatcttgaaactaaataagagttctccgacttcagatcttctcaaaccctaaatgttaaaatgtcgttaaatcgacaacttctattcacttactacttcatcgtctctcttatcctcttctccgatttcgtatcctctgcaacattaccaaaagaagaaggtaccaacttatacaaaagtttatgtctttgtacgtatatgtttgattcggtgtaatgatttggtccaatcgacaatttttgaaattggcagtggatgctttacaaagcgtcgcgacggcgttgaagaagagtaattggaatttcagtgtggatccatgtgacgaaaccttgtctgaaggcggatggaggaatcctaacgccgctaagggattcgaagacgccgttacttgtaactgctcctccgtcatctgccacgtcaccaacatgtgcgttcttctctctttttcaacatcctatcttttctttgtcaaaattatcattaatatctagttttaaatattgaagaaattcaattatattattaatggaaaaaaataaaaaaaatcttggtctcattttccaaagcgtgttaccatcaaattattgaagtactgttaaacccacttgtttttaatttaataaagtaggtttagatgcttgaacgtggacaatttattaacgccgtcgctattgacctttttctgacgcgtccgtgaatcttgttttggtcgtttttgacgagtccgtgaatttaaaaagtaaaaactagtcgacttttacttcttttttttttttttactttcgtgttgggtcgaaaacataatgggcctataatttcgaagaccgttttttaaaaactcgttctgttttttttctttccctcgtaatattgaaacagagttctcaaggcacaagaccttcaaggatctcttcctacagatctttcaggacttcctttcttgcaagagctgtaagcagaagattcactcaccaatgttactattattacaacatctgctgccactcttagtatctctcattaactattcttttatcttcagtgatctgactagaaactatctcaacggttccattcctcccgaatggggagcctcatcacttctaaacatgtacgtatagataattagatatagactcattgatttgatatatatgtataaatatagattgatttgagtatgtttgtttgttgggatgatgaaaatgcagctcactacttggaaaccggataagtggttcaatcccaaaagaacttggaaaccttacaaccctttctggtctgtaagtacacttctttgatctcgatcttcaattatgtttctcaaagtttgtttttttgttttctttctatctttaatttcctggaacatttggtttttagtgtcttggaatacaaccaactctcagggaagatacctccagagctcgggaatctaccaaaccttaaaagactgtatgaatatttgttccaatttcttccaaactgttccttttttcttctgttaacaattagttattggtctttgctggctggtgttgagactatgtttaccctttttaggttacttagctcgaataacttgagcggggaaatcccaagtacattcgccaaacttactacgttgactgatttgtaagtattcctgtgttcttatttgatccgtggaacatatgtgttgccgaagatttctgactttttctttatatgtatcttcgtcttggtttatagacgtattagtgacaaccagttcactggtgctataccagatttcatccagaactggaaaggactagagaaactgtaagcgaccctttcagctcaatgagattttttcattttcatatccgtattggttactttaaaatattgaaattaatgtttgctttgcttctttaatcagggttattcaagcaagtggtttagttggaccgattcctagtgccattggtcttctgggaaccttgacagacttgtatgtacacgaattttgcgtgtggtgattcgttattttcgcctctcatgggctgacttaccttcaacaatgtatatttactctattccaaatatgaaattttgtaggagaatcactgacttgagtggacctgaatctccatttccgccactaagaaacatgacatcgatgaagtatttgtgagtttgagactcagaatagacgagtttggtattggtttcttccaccttcaactagctaacttctgtttatactcgttgttcgttgcaggattcttaggaactgtaaccttacaggagacttacctgcgtatcttggacagaatagaaaattaaagaatctgtaagtaatctctttttttcttcggcaagcatgaaaccaatttgtcgaagatggaaaagaatttaagctgacattatgagactcgttgtgcagagatcttagctttaacaaactgagtggaccaatcccagccacatattccggtctttcagatgtagatttcatgtatgatgctcttttcttctcttctttcttctgtttcaagaaaaaagctttatatggagtaatattaaactgagctgaaatttgttttccaatcgcgcagatactttacaagtaacatgttaaatggacaagtaccaagttggatggtagaccaaggagacacgatgtgagtgttcttcacttatatgtatattacatttctttgtaatgaaaacagtataactaacgttttctttggttgttgtatcgtttttggcagtgatattacttacaataacttctccaaagataaaaccgaagaatgtcaacaaaaatccgtgtaagaagaacaataaacgattaaacttgtcatgccttcaaaattcgctataaagcttatggtttcttggttccgtttatttgcaggaacacgttttcaagcacaagccctttagtggcaaataactcgtaagtcttttctacttctcataacatttcgaaagctctggatttatacaacactcactataatattgatgttacgttatgtttacctacagctcaaatgtttcgtgtctgagtaaatatacctgtcctaaaagtaagcctctgaagctatatatatatatataatacattacagaaccatatcgcttaatacctacctgcgtatctgatttatcttcggttaccaatcatttgttctcagctttctacggccttcatataaactgtggtggtaatgaaataacaagcaatgagactaagtatgatgctgacacatgggatacaccgggttactatgatagtaaaaacgggtgggtttctagcaacacgggaaacttcttggatgatgatcggactaacaatggaaaatcaaaatggtcgaattcatcagagcttaagataacaaattctagcatagattttaggctttacacacaagcgcgtctctcggctatctccctcacttaccaggcattgtgtcttggaaaaggaaactatacggttaatcttcatttcgctgaaattatgttcaatgaaaagaacatgtatagcaatttgggaagacgatacttcgacatatacgttcaggtaatttaattgatcttgtttcttgattgtcagaaagattgtatagctgaatcaattggctggtgtgataatattgcagggtaaacgtgaagtgaaagatttcaatatcgttgatgaagcaaaaggtgtgggaaaagctgttgttaagaaatttcctgtcatggttacaaatgggaaactggaaataagattgcagtgggctgggaaaggaactcaagctattcctgtgagaggtgtctatggtcctctcatatctgctgtatcggtagatccaggtaaactttgctaaacctcaaactatttacgagagacttctcctttgtttgagtgtttttgtctcttgactttactcccatggtcttgctttctagattttattccaccaaaggaaccgggcactggaactggtggtggaagttctgttggtacagtggttggtagtgtaatcgcttctacggtgtttcttgtgcttttaatcggcggtatattatggtggagaggctgcttaagacccaagagtcagatggaaaaaggtacatagtttgagttgcttaaatagtatttcaacattccaattccttttgagttctgtctctttgtatctttctaactcagctgtgtttcttcacctcagatttcaagaacttagatttccagatcagttcgttctccttgaggcaaatcaaagttgccacggataactttgatcctgcaaacaagatcggagaaggtggttttggtcctgtacacaaggttagcattatactgtgaaatgacattgttatgagagacaaaagataaaagatatatgatctttaaggtttgttaattgttttgattacagggaataatgactgatggaactgtaatcgcggtgaagcagctatcggcaaaatcaaaacaagggaatcgagaattcttaaacgagattgctatgatttcggctctgcagcatccacatttggttaaactatatggatgttgcgttgaaggtgatcagctcctgctagtttacgagtacttggagaacaacagtctcgcgcgagctcttttcggttagtcattccttttaaaacaccttacagcttaaaatattctatccaacccaattgttgttttgctcaatagcaatgtttttgttcctatcaatttaaaggacctcaagagactcagataccactaaattggccaatgaggcagaagatttgtgttggaatagcgagaggattagcttatctccacgaggaatcaagactcaagatcgtacacagagacatcaaagccactaatgtcttgctggataaggaactaaacccaaagatttcagattttgggcttgctaagcttgatgaagaagaaaacacacacatcagcacacgagtcgctggaacatagtgagtcaaacaaccaatcaatcacaaacaagaagtttcaactctgagatttcatataaccaaaaacaaacttttttttgtctgtagtggatacatggctccagaatacgccatgagaggccatttgacagataaagccgacgtctacagttttggcgttgtggccctagaaatcgttcacggaaagagcaacacgagctcacgatctaaagctgataccttctaccttcttgactgggtaaatcatcacttcacacctcaaaaagcctaaaacctaaacctaaaccccttaaaccctaaattatggatctgaatctcaatttctttcgcaggtgcacgttttaagggaacaaaacactctacttgaagtagtagatccaaggctaggaacagattacaacaaacaagaagcattgatgatgattcagatagggatgctctgtaccagtccagctccaggggatagaccttcgatgtcgacggtggtgagtatgctcgaaggccattcaacggtgaatgttgagaaacttcttgaagcttcggtcaacaatgaaaaggacgaagagagtgtgagagcgatgaaaaggcattacgccacgataggtgaggaggagataacgaacacgacaactaccgatggacctttcacgtcgtcttctacgtcaaccgccaacgccaacgatctttaccctgttaagctcgactctgcctattggaacactagaacttaattaaggataacgtttttgccaaaaagaaagaaaattatggagttatgttattatgacgttttgtattttgctttttgtaaagtttttttatttatgattattctatttaagacaattggaagattacgttacatgaaacagaaaatgagaatatttatcttaagagaatcaaaaggtccaaaacaatttagatgagataatattttgttgttaggttcttttaacttcttttttatttgtttgacgtatgatttggcttttactttcttaaatgaaatcatattgtgatttacaaaatttcatacaaaggcgaaaattaaatttcactcggcttatttggacactagagctttactatgatctagaattgtaatgcagaacccccttgaaattgcaacgataaaataaaaaaatatatgactataggattccgtaacttctagaaatttttatttaagatttgtgaatatgatttctttttaaaaacattttcaaaaatttttaaattattttgaaatattaattgcaccgataacggcattattgtccccttaatatgattgtttagtcaaccatcctattaataatttaatacgtttcatgaaaccagaataattatgttagattatataagtgctaccgaataaattgttggtctgttaacatctgtttccatggacaataatttggcttgtaatagtttaaagtttaataggtttatctatattgtcgtttagaaaattacaattaaattataaggaatgaatgattaaatatgaatttataggtcctcaagcttttcacggggcagcaccggcaaatgaaaatccttttaaatagaccaaacaaaaagaaaactcttcacagaatctttatggtccgaacaaatcgagttatttcaaggaaaacaaaattttaagcatgatctcgaagtaaatggtataaataaatatcgaccttgtaaccgacattttgcaaatttgaaggtgaacaaaaacaaaaaagatcgtgaagttgtaattggtaaacataaatatcgtacttaaatcatttcatttaagttgttgaccatatgtaaattacattacttggatttcaaaatccaaaatcatggaaatcaatgttagtaaactacgtcattaaatagtaatgatttgagttttactgactttttaatttatataatttgatgattttagggaagttgatgtgatttattgtaaatttattcaaattttatctaaaactataagatttggatttttatatatttaactaaagaagtcttctcaaataattcagaattaaaaagaatcaaatccacaaactgttttcaataagagtgaattttaagatagatttttaaatcattagttcaataacactagattttattagagtttttaaaatttatgattgaatagcatatgatttataaattttacacaaatcattgaaaatattagattgaatacactctctaaatgcacacagaaatgttgagatttttttttgttggtcaaagaaatgttgagatttgttttcaagatttattgccaaaaatctatagttcacaacttcacatatttgactgataaaaacttatcttccttctctttattatgacaaatgtgacttatatatatattttatatatagatgcgtgggtgtataaaaaccagctgcgtatttgaatatctctctctctcttgtctgtgttgaaatgggttcaaaggataacgccatttctaatgactctgcattagttttatcgcttcttcttcttcttcttcttcccctgcttcacgaagcagcagaaggatgtgacatgttcacggggcggtgggtgaaggacgattcttaccctctctacaattcctccacgtgtccgttcataagacatgagttctcttgccagagaaatggacggccagatctcgattactctaccttcagatggcagcctctttcctgcaaattagcaaggtatcatccattctttatttattacatacatttttatcttttcaaacttttttttttgggtgtctagctattgaaccaaggtatcgttatagatatgactatttttatttttttacttttgattcatgattttgttttaatatattcgtcggtttttatttgttgaaatatgacattacattagcgttataggaggaccacaattttttgatttgaaagataaacgcaataataattcagcagtgtgaagaaatcttgatttggttcatataattacttttcaagaaagttgaaaatgtttagagatattgtttttgtgtttgtaaaataaagcacttttgagtgagcaaccaatgagaaaagagaatgctatttatatagttgtttgctataattgaatggtgtttagaatctccaaaattgcacgagatgaaaacgaactttttttgtcacaatatatgccaagtggtggatccggcgtgagttacacgcgccgccattgagattaggacagccaccaaactcttcctcataagaagacataaattcccccacacttgtggggacagtaactcaaatctttcgacggttctgtcctcctgtttcttaagttaatttcaatgcatgccaccgacataaaacgccaccgtttatattgtttgttctaggttcaatggattgcagtttttgaagaaaaacaaagggaagaagattatgtttgttggtgattctcttagtctaaatcaatggcaatcgttggcatgtatgcttcattcctctgttccaaattctacgtatactttaaccacacaaggtagtatatcaacctacacattcaaggtagttgttattaccaaatctacacttgttttggtcaagttgaatagaaaaccgggatgaactaaaccggagtggtgaaaattgcaggagtatggactggaattgaagcttgataggaatgtttatctagtagatatagttagggagaagattgggagagttttgaagcttgattcgatcaatgatggaaaaaattgggtagagatggatacattgatttttaatacttggcattggtggagtcggagaggtcctgcacaaccgtacgttcaagtaactctgaattaatatgctttgtttttggcttaattacatgcaatgttcaaagtttggatttgttttgttaattttggcagatgggatttgattcaaatagggactaacgttacaaaagacatggaccgtgtggccgcgtttgaaattgcgcttgggacttgggggaaatgggtcgataccgtcttaaatactaagaaaactagagtcttttttcaaggaatttctccatctcattacaagtaagttgattttgttgattaaaaagatgatcaactaaagaaacttgtatttaaaaagttggctttgttgtttaccagaggagttctgtggggcgaaccagcggcaaagagttgcgtgggacagaaggaaccacttttggggacaaaatatccaggaggattgccagcagaagtgggagttttgaagagagcactcgggaaaatatcgaaaccggtgacattgctagacattacgatgctttcgttgcttcgcaaagatgctcatccttcggtttacggtctaggcgggcgaaactcctccggtgactgcagccactggtgtctctctggggtaccggatacttggaatgagattctttacaattatatggttgagtaaaagaaataaaatacggaaacatcaattatagcatttgttattgtgattgatcatttaaatctgaataaaaggtccgtttctgaattttgtaatcatacataggttattagaattaaagaaatcgaatgatcaagaaaaataattaatctaaaccctacctccgtgtagtgtaagtgaacacaatatgaaactgtatagatcaaaacttctatagctaattcatttagtaaggtcgtttttcaactgatcgatagtttgtcaacaaagcacattccaattattaaagtttcaaccaaatctctacaataattctataaaaatggaactgaatgaagtcaagttattatcaaattcgatcttaaaaaatcatattcgtatgaatgaagtcaagttattatcaaattcgatcttaaaaaatcatattcgtattcgtactctctttatctccatgccaaacacatagattttactctgttctatcatgagcacctaatatttttgtaatgaatgtatcatgagttgaacaaaagggtccttagctcagtggtagagcatttgactgcagatcaagaggtcaccggttcgaacccggtagggcccttcatttttttttcctttttttttttttgactaagattctttacaattatatatactttcttaggaccatggttagcaaggaacctatctctagcagccaaagatctatatatagcaagcaagaatgtgttaatagcaagttagtaacgaagagcctgttcttgtgatcgtataagttcataatacatcagattttcagtcatgattcatcaatccttcgttacaagaaaagcctttaacctctttttcatcatctgtgtaataagattttcttagtaactaacaaaaagaaaacataaggaatctcctcaaaccaaggacaaaagaaagggcacaacatactcagaaaagggttctaatgagtatgtgattttactttctagaatcgaaatggagtttcaggtccatacttgctgctcctcatgttgtaatgatcaaactttgaactattactgtactccacaggcttcaccgtatctgatggtgttggctttggttctgtctcggttgttttatctctatgacgacgccttgaccgctctttatggatcttcggttgggcaacctctcccgaggcatagaactgagcatagtcctgccgttttgatgatgtccgatggtgcttggatgatgacaaagtagggtccttcattacactacttgatcttagctttggcgtcttatgttcagggtaactatcatcagctttaggtaagtgagcatgtcgggattctgagattggtgctggggcagtatgcctttggactcgaggtggttcttgttcgtcttcaggcattatgagtctatcttttaatggccttagattggggttggtttggaatcgggctggaactaggtggctggttataaactcgagagcaagtttgcagagatcagtaaggagttgcccaaatgatggccaaccaggttcttccttggttattgttttctcatggacaggccgggagagtttctcttttcctggatgctcttcttcatagctggtttctgatcctacctgctgtaagataaaacagaaattgttgttgtttgtagcatatggttgatgagaagcgaaaaggcacgaaagagaagagatagaaatttaccgtctttgagaagaaagaatttccaaagccctgctggagcatacaagtagcataaccaatgagaacagcaccaataaccaagagtatatctgcaccgaatgtaagcacgcaatgatcttctgttaacactctcaaatccacccctaaacagagtgtatgcaaaatgatctatgtagtgggaagaggtgtttttgacttcttaccagttagagagattgagctatcatcttgatagtcacagtcctcttcactgagagagatttggcgaagagccgcatttcctctatcgatgaccagcaacgagcaggtaggccgaacatatacgacatcaaaatcatttgagaactttgcatcctcacttggcccatctctatacccagctatatttgattttcccccagctatcgtagtaacacctgtaacaaaaatgtttcagactcttaagaacacaattcttctcagtttaattatatttttcaacaacaagcaaccatttcagtttttgagtgctgatgtaagtaaaacctatagaaaacttgtatacctgaatcaccaatctttcggatggcgagattcaaagtatcagcgacataaacgttccctttgtcatccattgtaacgcctctcggatggttaaaacgagcctcactcggttttccatctgcatgccctgtttttccttgaaaagatccagccaccaatcttcccctgctgtctgcccacaagtacatagattataaacaaagtcataaaaacctccaacactaaaaaagaaagagaaaatcaaatgtttcatatatagtataaagaaccagaatattgaagtaaaatagaaaatgtaatgctacaagccaagatcatcaaaagatcacagtagtatcgttagtgtatcaagtataatctgcgatggcatgtgtatatgattggatgtacttaaaactgcaaaaactaagtcataaagaagagaacttgtggagaacgaagttttacactgagacaagggaggagtgattttcatgatgttgctattaagttcatcaacagcataaagttctccatcatcagaaactcgaatcttgtaaggaacaacaccaatatcgtttccttccacaacagtttcgaccaagtaaccattctcaaactgaagaacattagtgtctgcaccacaagtagcagttagagaaagaaacatcaaaaccaagtttatgaacaacaaacaatcaaggcgaccaaattcagtcgtactaattgagaatttacctgattgggataatttagaggatgatccagtagtccacttgagaaccgatgacatgtgcttaatcaaggaacctaaattcaatttacaacaattgacataaaaaaccagaaattgaagagtgaattcactaagaaagtgagtgaagcagatagatcaaagcaacgaagttaagtatggtaaagttaccagaaggagcagcttgagcttgaaatggaaaggagtgaagagtaaagaagatccataaagtgaagaaagtattgaaagaagaacaagtaaagctctcagcgtttagaagaatctgagatttgcccatctctttctctgtatcttccaaaagtacaattttatgttggaatcgaaccctagtagaggcgattcacatcttccaacacaccacaacaccaactgatagaatgaaaccaatttgcagatgacaacagatttttttcttttcttttttgaaagtaagaaaagaaattgtgtaacgaacataaagttaccttattgggttactcgtgttttttatgggccttataataggcccattaaggttcttacctttcaatacgcccatttagtgagtgctaaatcctttatactcactgccactgggccactagaagtcttgaatactaaaagacaaaactaaagtaaagaaacaaaaaaaaaaaagccgatcagatcagaagcacttctacgacatgtccaatcgcatcaatacctttttcttgtctgtttcaaaataaggtaaataaattatatgcaactttatagtatgtgaatagtcgttaatacataataaaaaaatcaagaatagtcgtgaatagagaaaatcctttttatcaaatccatactctcataggctcatagctctcaattcttggtttgaaattgaaatcgaattgtctctcaagctttttactttccgttaaacacggacaattaactcactttgtactaactgataaaattacatgcatatgccactccatcactgcatcagtgcattgtattcataactcgtacaaatataactggaatgatgtattctcacgatttctatatttataaagtttgcatttaaagcccaccaagactaatttggtttacttattgcttataagatgattcaaactttggacttagcaattttcaatcttgattttgctttcatcgataggacaactgtacttattgagttgcttcacgtatttagtgaaagctaatactgctattcagctgtcttttatgcaacttgacaaataatttaagagtcttattttatttttgttcaacatttaagagtcttatttaaaaacaaaagaacttatagagaatgaacttacataattctcgtttgattaaataaacatcaaggcagttaaatacggaactaaagaagggttaacaaatagaaagcgttttcaggagaatgtgggaaatggttacactttttttttaatttgccacgtgtctttcatctatctcactcataccggacggaccggtcttcgcgtacgtacgcaataacagcttccaagtagtttcattcccaacccaaaccgtgtgattttgcgttctgtctgaacatcttattccctgacataccgagaacacccctacttccttttcgacgtttcttggagtaaagtagcaatgtcggtgtaaatgtccctttaccatgagggtatttacgtaaatctatgtcctttgaacttccctaggctcacccttctctgtcatttattactctcttctcctctcctacgactctctctctcagtcactctaaagcctttttcccctcttctcattctcgagctccggacttgtcttgaaaccgtgaaggaatctgtatcttttgtatgttacccattttattgtcgttaagaatcaatttagaggcaaaacgccgagaggtttgcccgggagagtgtttttacatcgatcaggttggttagctaatcaatatttattaattatcatcttttgttcttctgaatgatttcgtcttcattgttattctgcagtttcttatattctcattttcaatcaaatgaatatatcattgtgacttgtgaatgctcttacaatcccatcattcataccaataatgccatggtcaagcattcacatcagcttgaatattagtctcatattggttctgtgtttatcctttttcctttggtaggtagtgatttataatttcatatgattgatttgatctgcagggtttaagcagaggttggtttgtcatttcgccagtttgcttcttcaaattcactctacgatgaagtgagaacaacaaacaaaacatagataagatagagaccttggaactgttggaaggtaaattcaatacaatctttttaaatgaactttgcttctaaagttgtattaaaccctgagaaccatattaatttagaccttctggagtaatactggttatgttgctgagtttattatcactctttaacataactcttctcattagttttcctttaatccgtgtgctttatggtctaagctctagtgaaatagagaaatatggttgttttgtgagtagcttgtgactgtactaaatgttaggtagctatatttggctttgaggctgtcttacttttttttcaaatgagtggaatcaaatgaccatttaagagaatcatatacatagagacatgtgtgtatttgtgtgtgggggcacttttatgttcttggattctagtttaactgatttggtttgtagcaattatgaatcctgaatactctaatccttttatcagtgtcccataattgtaaacttatgaacaactttgagtatatatatgtatttaaactcattagttctttttgtattcactttcgcacttttttcttgactgttccttttcagaaaaaagttgaatagaaaataagaacgaggggtgttgaattatttgcatgtgtcatgtgttctgcagataaacccatttgggtgttatttttattatatgttgttttctcacttttgtttgattctatagcagcacaatttgactaaatagccccacacacatatatagcaaaagatttcagaacattaataagaaagcaaaaaagttgatcggttcatgaaaagaaatggtactacacacgcaagttgtttattcttcttccttggacatttcttgattgtttattccttgtaaattaaaacatttttttcatttatatatgaaccacattgtccccacaactctggctgaatctttaagctgtatccactagataatctaagcatgtatgtctctctttctctctgtgtgtatatatatttattgcaaacatctccctcctttcctttgtgaccaaaagtgtagtgcgaaccatttgtgaaacaatctcttc

SEQ ID NO: 1296 - DNA, 11291 bp, Arabidopsis thaliana
cttgagcatgttggtctagagatggacttacctgttatcagtaacgttctttttactccctcaaatctcatctaagtttgaatctttttttatagattattgatcttgtattcgtttaactagtgatgtctgcggatgattcaaagagtgtggttctaaagggagtaacgcacggtgcggttgattaccttatcaagcctgtacgtatggaggcacttaagaacatatggcagcatgtagttaggaagaggagaagtgaatggagtgtaccggaacattctgggagcattgaggagactggcgagagacagcagcagcaacatagaggaggtggtggtggtgcagctgtttctggtggagaggatgcggtggatgataactcatcctcggttaacgaaggtaacaattggaggagcagttcacggaagaggaaagacgaggaaggagaagagcaaggagatgataaggacgaagatgcgtcgaatttgaagaaaccgcgtgtcgtctggtctgttgaattgcatcagcagtttgttgctgctgttaatcagctcggcgttgagagtaagactaaaacttcttacatttgcatttgtgattgttatgctcagggtctaaatgatcttctatggcgcagaggcggttcctaaaaagatcttagagctgatgaatgttcctggtctaacccgagaaaacgtagcaagtcacctccaggtataaatcttatactggataccaaaatgagccattgaaatgcttagatgttcttagcggctttatgtggacttgcagaaataccggatatatctaagacggcttggaggggtatcgcagcaccaaggcaatcttaacaactcgtttatgacgggtcaggatgcgagcttcggacctctttcgacattgaatgggtttgatcttcaagcactagccgtcacaggtcagttacctgcacagagtcttgcacagcttcaagccgctggtttaggccggcctgcgatggtctctaagtcaggtttgccggtttcctccattgtggatgagagaagcatcttcagctttgacaacacgaaaacaagatttggagaagggcttgggcatcacgggcaacaaccccaacagcaaccacagatgaacttacttcacggtgtccccacgggtttacaacagcagcttcctatgggtaatcgaatgagtattcaacaacagattgctgctgttcgagctggaaatagtgttcaaaacaacggaatgctgatgcctctagcgggtcagcagtctttgcctcggggaccaccgcctatgctaacctcttcgcaatcatccatcaggcagccgatgttatcaaaccgcatttccgagagaagtggtttctctggaaggaacaatatccccgagagcagcagagtgttaccgacaagttacactaatctcacaacacaacactcatcaagctcgatgccttataacaacttccaaccagaacttcccgtgaacagtttcccgctggcaagtgcaccagggatatcagtaccggttcggaaagccacttcttaccaggaagaggttaacagctccgaagcgggtttcactacgccgagctacgacatgttcaccaccagacagaatgattgggatctgaggaatattggaatagcctttgactcacatcaggactcagaatccgctgcgttttccgcttcagaagcctactcttcttcgtccatgtcaagacacaacacgacagttgcagccaccgagcatggccgaaaccaccagcagccaccatcgggaatggtacagcaccatcaggtttatgcagacggaaacggtggttcagtgagggtgaaatcagagagagtggctacggatacagcaacaatggcgtttcacgagcagtatagtaatcaagaagatcttatgagcgcacttcttaagcaggtttgatttgatttttttttttttgtcaaacttatatagaagcataatctgatccgtcaacgtacatgtttgcgttcaaaatcaaatatataacaactctcagacgctttctcaccattggtcgcatgtctttttcataataatgcaaattacaactaaataacaaaaaaaatcagtgaaccaaaaaagttgaaaaacacaatcttgaattattgatatacaggaagggattgcaccggttgatggcgaattcgactttgacgcatactccatcgataacattccggtttgattggataaaaaaaccgataaaccggagggactacccggatctgtactgtatcatttttacacgacgatctactaaaacttgtttgatatatatgtagtctgcatgaaattttaaatggcagattatataagaaataattattcatgttaggggttaatatccttggagattcttttgttcctcatttatgtagtgaggctgtttagggttttgtaagtatgtatttcgagtaaatgcttagaataattcgaacaaacttaatttagtacaacgccacaacgtgaaatcaaagcaattcaagatcaaaacacaaagggatttgtctgttcaatatttgtatgtatacatactgattactaaaatctgatcatacgaaattcaagaatcacacggtgcacaaagcaccactagtagtagaagtaattctgcatcaaatctggttagaaagaatcaagaaaactgtatattttctggctaatgaggaaagtccttcactggaacttttaaatccgaagaaacagtagagccaaaaatggtgtcaggatgagaagaaaggtggatacatgtttcctgtgactgttgctcgtgggtagtacagaagggagtgaacattcctggccgttgaagagtactttggtgggaaacccatctttggaaccaactttgattccaggagtcagtttcttggtgaaggagataaccgactgctgtttcccgggtatccgaaagtcttcactcgggttttttccgtctttctctgcaaggagatagttcagtccagggagcccttccattaaaacagttgtgttcttcccgttgaccgcgatgatacttccgttaaacgagtacgctttctgaaaaccgggtgcagcatttctcagttcaaccgcggtaaaccaatccacgaaatcagtatcaccccagttgaagagtgtgactcgagcagtccatccgcctcgatagtctgtagctaggtgccagtttatgctgactccacagttatctccacaaggtaatgggtccgggactttccggttttttaacactgcccaagcgttggtaagtttggttcggttgtcaaatggaattagaagagcctgatatggaagaggaagagctggagaagttgtgctgcaagtacgcgccactctgtcgctagagcaacctccacaagcgcaggtcttacacgggattactgagtcattgaaataagaagagaatgagacgcagcatttaggaggagttggttgagtgatgttgcagacgacttgccagctagcaaatgcactcttgtttgaaggcaaaccgcttgtatcagggaactggcttgagctgacacgaagaggagggccacatttgtaatccgggttaaggttacctttaatctgccagctctggggaggtgttatagaggagatgttgagatcaggaggcattttgtaaacttctatttgaaaaaccgatttagacttctctggatccatggaccgtggcagaatagttccatttctgcagcagtatgggatacgcccgacattggtatcgttatacttagtcaggggtaggtctatgatgtgtggccttcttgcacagctcatgacattagagaagtcaagatctttatagtattttgcttgaggaccagtgatgcaatccgacgaatcgacaacacttggataagctcctttggttgagaagagaaactcatctttcatccacataaaacttagatcccaattgtcaagccgaccaagcaggttatgattctcgatagtgacctgcgctgagtaactcgactgatatgctctggtcacatcgtacattatggttagatctccttcttgcctaggaaggaacttttgaccaattttgcttgttgtaatgttcggattcggtgtgcaacatacttgcagaacattactacctggaaaaagccatagagaagaaaagaaatgtcagtgaaacacaaaggaaacatttatgctcgcagcaataagagtcttattatgatcaagaagtaaaagaaaaacaaatatgcaaactgaacagcttaaattccaaaatgtttaatcagatattccacacatttatcagaaaagccaagcatgagatagtttcctaagtaaacttaaggtctaatctcaattgctaataagactagttcaaacttttagtttacaagaaatctatataaacaatagaatttttcaaccactctattgatcacaaatagacctggtcaatgtgatcatattgctcgacttttaaaactcttggtaatgccttcataagcaacccaagatcacataatatttaaaattgcaacaattcattaaaaaaattatgaacaattaaacgagaaatgaaaaaatacattaaaaaatctcaagatttcaagtcataagattcagatgattttgataccttgttgagtgggtttaggacaagaccatccatcattaacaagagtgatgttcttcggaagcggaacactcggcggagcaactccaaactgagtacccacgagctcaacacgtgcttccatctgagttacgtcgccggccgtcatgatcgccgtcttcaaatccgccgatggaaacccggcgaagattgtcccgttctcaacgctagccgggaggctagaaccgtcagagagaacagcgttggtcgctgaaacaagaatctcgcggtgggcgaatttaacaaagacttgccacgatttaagctcgtcgcggccgttgtttaggaccgtgatctctgattcgaaccggtacggctggttcttcgtgtcgtttggtttaatcttggtaccggttaagtaagtgtaggaaacgaacacgccgttgcagagatcggcgtctttagagcgtggtggtggagtgttgcgttgagacgacgttagttgaatcgccgtgaagagagatgacaaaagaatccataaaatgaaatttcgagttaaacccatgattactctaaatctcttcactcacaaaaatctcttttttaaaaaacaaattctggaaatgaaaaggtgaaaaatcggaagtttaattttgaagagaggaagagaccgcgttaaagaacagaacagcttagtaagacgctgtaatgaaaatttatgtccgcgttgaaaatgtgtatatttccttgtttggtcggattttaatgttttttcttgatcaagtaaacaaaggttacgaacaaaagccaaagacaaggttttgttcttctgacaaaattataaaatagtgggtttaagttttcaaattacaagatgaaccatatatttctgttaataaaaaaatgcaaccccaacctatatcttagtaattatgtgaatgtgtaatttacacctaatcgttagctataaaacattgataccaaacacagtttatagaatgttcgcttaaatgacttatattcaaatatttactgatatttctgtctactaaattttagtgatttctaagagtgtttatggaagttttgaatgtattgagagtgtgatttgatagctaaaatatattatgaagattttgtttgaatttgtgaaaaataataaggaaaacgtatctccaaaattaagaaatggtgtttatggaaaatatcgacaagttattcctaaattgtactctttgcttaggaaaataaaggaatcaatggaagtaatggtcctaaatcgaagaaactgcataatataagggtgaaacacataaatagaagctttggtcaaaagaaagtcccccgttgaacgaagttgccccgttaatttgaatcattctcgaggttcacggctctacctagccatgtcacactcacaccattcgtccaccagtgatccatttaaatgaattatattttcgtcaccactttagatttttaaaaaaaaattataagtatgattcatgactttgccatatttaacattacttaaaattttgttggtccaccattattaattattaatgatggcttattaaggttgaatcatacgcttacatgaaaaacaaaaccaattgcaaatcgaaaatttacactgtccctgttacaaagttaccataacaacttttaatcacacaaacagatactctgccaagtgcaaatcgaaaaattgccatccttcaataaaatgaaaaaacaaatcgaagtatacaacctcagcatgatatatatataaaaaaaactctaaaccatacaaaatctgaatttgaaaccagttgtgaattcaaaagcatataaaaattcaaatcaaatgaaaaacgacatcaatggaccaaaaaacaaaaaaatggtggagttgacggagacaagacaactagaatcacgcgcctcacgattcccccgataaagcccaatatcttgggccatatgggcccatacacagagaatgacatttgaggcactaaaaattaagaccaattctcattattatggcattgaatgactaagaaccaaaaaaaagtgttgatatttgaattcatcaagaaaatgaacacaaaacattagtggaaccaaaaaactaggaacttacacattcattacatattatctctatctaattaagttaatcaaaatcgctctcacttgattatgacctaatacagagaaacacttaggcgtaaacagagctacaagagagagccatgagaagcacagcagctctttcttcctcaccgagttttctccataacctcttcttctcaaccgctgatctcttcatcaccggtactttaaaccctaaatccaaaaacttactcactcctttgttactgctactactactactacgcttgttattgcaaattttcggatcatcatcgatgtcgatcttgccatcatcaactatgttgattttgtatttcttggcgtttcgatggtcgaggtttagatcattattgcaattgctttttctgttcttcttcttctcctctgatctcataccaagtgctgcttgtctcttcttcctactcttgatcccacaagcattgcacaatgactacatagcaaaagacaaaccaaagaaataagaaaaatttgaacttcagagcaatatgagatcagatctttccggtcactaaattgattcatcacctaaataaatttgaaaaacgataaaacctaaaataggatcatgcataatatagatgctatttcgcgatccattgattagatctactagatcggaatctaacaacaacccaatagactataagaagattgaaatgaaagggttagttaaaaatctcacctttggtccggcaggaccaccacgccaaagaggagttcggatagttccgcaatcaacgcaagtccttttggtatcaccagaactactaccaccgccacttccgctgctactgcagttctcgttatcaacatctgataactctccggcagagtcgagttttgttttcgtatcttctgatccctcagacatctttttttttttaagagatcggagcagagcaagttttgatgataaggaagagggagagagagagagacggcggttagtagcaacagaattaaacaaacggagaggaattttataattgaggaggaaggcgggggcggaaaccctagtatttcgggttatttgaattgactaaaataccctcgagcgggagcttttattaattttgtgccacccgcccaaaaacttataactaaaatctgaaacaatgttttgattttttgttttttaaaactagccgctttcaaattttgcggctagggtttgttattggtcgctgtcctgacaataatctgttttcacgtttttttttttttcagtttttggttttattttatttctaatgtcaaaatttataataaactaataaagttttacgtcggttttatttacaatcaatgcaacaaatgaattttttaaaaacttatgaatgatgactggattattaataaaaaaacaaaaaaataatggcaaaattctgtaagataaatatccattgggctcaatttgatagtccaggcccatgagcatgataacgcagtacagttttttagttgagctacagaagaagaaattacagtacagatgcacctacccacaaagaaaacccggtggttcgaaccgttaagttgtcaccgtaggattaagtatggcataggatacgtggatgacaaatcatgcggcctcaaccacaaagttttgaggtttgttcaatcttggtcttacgaagatgttcggtgtgaactctaaacattggagtgaggatggatattttcaaaaaagtgaatttcaaagaatcttcaaacataacttcttccccacttatgtttcaagtttagtgcaaatccaaaattagtttgtattctcatgtcttgtatgaattattaactaaggcatatttgattttattccaaacagtttatatatgatggaattgaaaagtgatcagcctccgtttaatttttcaatgatcatttctgttagtaatagaggaactagaggaattgttaatcagtgtgttcttttaacatgaaaaagaagatagtttctctttgacatattcatgcagtaattcatcatatcacaacagaaagatgatttgagacctgaccaccaatgaccaaacatatttatcatcaagacaaagagtgagattatgagtttccttcgtatgcatcagagcatttttttgggtgagttctggagcttcactctgcaacatatgtaagacttcaccaataagatgagataatttcaatatttgaaattctttgtgtatcaatgtaactcgtacttgagcattgatatgaccctttgccaagcagattattaaggaagaaagaaattaacctcgcagttgtaggactaaattaacctcaaagttctacaaagacaaggttttcttccttggatgccaagttaggaccacaaagctcctcaaacaaccacattgcagaaaccatcagcaaaaaacaagaccgattataaagttaaaagattgggcttaattccatagacaagccctttaccataatataggaaattagtacaaaatacaacaaaattggaaaattggaactggaaagagcttttgaaggtcgccgcataaaaaagtaacgtaacttatttgactatataactctaaattaaaaaaccctattttctatgaagtcaaaaaaaaaaaacctattttctacatcatcgaaaccttgctgagacaatgacgaagatatccaatattccaatggatttgttggaggagataaagacgtaaagacctaataaagacttgttttttgggttctataaaatataacctttgttatttagtgttcgaggtaaacaagactaaagtccttcaatgctcatgtaaaatagaatctggccaaagaattattgtttccttaatttttacactatagtggtttaattatactaattagcccattagggagtaaaaagaattattgtttccttttcttttttcacggaaataacttttgaaagttggcatataaagttgttacctaacttatttcttgtcgattaaaaagattaggaaagcgtgagagtaaaaccctaaatttctattacattgatcatccttgagtgctgaaacaatgacaaagatgtccaaacttccgaatgatttgttggaggagatactctctagaagtccactgtattctatgagagcaatacgattgacttgcaaaaagtggaacactttagccaaagaagaaagctttacaaagaagcaactcgttcaaacaaaagctgccaaggaatttatggtgatcatgatgatggattctaagttttgtttaatgaacatcaatctcaacaaggaagaagacgttgaaccatctataaagtgtaatggtaaaattattaacccaatcggtatgtgtcgagtctatcattgcggtggtttggtatgcatcacaaaaagcttcagtaacactagagatgtggtttggaatccgtatttggggcaaactcggtggatcaaacctagaagccatcacgcatatatatatgctattggatacgagacgaaaaaatcgtgccgcagctacaaaattttgagttctgaacacaattatataaatattgatgatgaacgtgttgactacgaaatctatgagttagactctaattcatggagggctcttgatgtcaattccaattgggcgacagccttttataaaatggatgtctctgtgaaaggaaattcttatacgtatactgattataggggtgacttcttgatttcttttgattttacaacagagagatttggaccgactctgcctctgccgttccactctcgttgtggagatattgtggctctctctagtgttagagaagagaaacttgcagtgttacttcaccgctgcaatatatcaaggatggagatatggattactaacaagattgagcccaacaatgtgtcgtggggaaagttgttcttaacagtggacatgaaaccactcattattgatgatggaattttcttcattgacgaggagaagaaagtagttgtggtttttgataaggacaaagagatgagaaaccgtatcacagcttacatcattggagagaatggatacttcagaaaagtggatctcggagattctgaaagttttcctgttaggtgctcttatgtaccaagttcagtggaaatcaagcaactggcaaaaggcaaaagcaactagtccatttacaatacccaaatatttggttcttgcattgtttaattactactactcttgctttgtcttcttttctcagcttcctgattcctgaacaatattggtctattcttagttcgtttctcatctcttacgttgaaaaaaagattgttaagcatactagtttgagatcgaaacaacaaaatcattcaatactcatgtccaatataatctggcaaaactgttgtttcctaaactgttacacggtaagggtataaattagggccaaggctatctagtgctaaacatacaaaatcttttgccttttgactgtcaagtaccaaccaactgccattactattgccgccactttctcggactcagaaatatataa

SEQ ID NO: 1297 - DNA, 29694 bp, Arabidopsis thaliana
ttgaggattgagctcatattacagctcaaataattttattttatttcaatttgtaatattttatatccttctgtaacatatttaatggtgaaaacaagatttttttttaaaaaacacaacgagataattaatatgtttgtttgatatgataagtgctagtttatgatatacttatacactgccaataatttacactgagattcggtccaatgacattacagattatttatttaagttcctgatgaacccataaatattaattggcttttgttttcttatgaatccgtaagctagtgcatttcactctgcgtaccttgctgcgaggttgaaatatgtgtttccacttaattagctaatgatggcgaaaaaacaacttattaacattacacatgtcacatgatgaccaagaagaacatgtaaatactaaactgtatgcatctcttatcgaagaacaaataagtaacacgaatgtaattgcaattttctcatgcttttaactgcaaaactaatctctcattttcaaattctctcgtagctttaaataatgactatgcacgcatgttttccacgtataagatcagaaatataaaatccgatagactttgagtatttataaataatttaattaattgattaatgatttttttcacgttcacaactgaaaattaagaggtttactataacgatcgtattttcagtcttctaataaaaatttaggagtgtttattattttaaaatatacaaatacttcagaatgatttataatgattaatgcaaacaaatcgcttgtgatgcatttgttcatcccgaccacagtcaccattcaaaccctaaagtaaagggtccttcgccgggtcaacacacacaacagtccaagaccacatgtattgattcccgaagacgataataggtaatttaatcattctaataatgatgttaaaagattcctgcaaaattttgtattatatgtttgtttgaatatatatatcactgatatactacaatatttgatatttgtggatacttgcaagaaacaatcaagcagagaagtcgttggcttacgagagcaatcgctgttatgaagactatgaattttcaaaacaacttgcgtaccttgtagactcttttagtttagttacaaggaaaaaattaaacaagtgattatcaaaagtatttcgtcctcttgagatgtcaaatcctcgtttattttaattcctctattcttaaacttcgggagtaatatcattatatacatgacacatattgtgcatgataatcttaaattaatgaaaattatgaatatgttttacatatgatcaagaaaaatgtacaatgcatatgactgaatatagtgagcaaatacataagaaatgcgtttggttttttctggatgacatcagtttattaaatttctatactatctttggtttcttccggatgagataagagccacgatttatgaagacatcagtttctcagcttatcatatatactttagtcttttgtgatctttctactaatttactattacttttttctaagtgcttccttcataattcgtggttctctcactatgataattagcgtgtatcatgtaatgttaaggtaaatattttcatataacctttatgagcaacgatttaacaatattacttttagagtgatattgtagttatcaatttaccatattagaaagaaacaaatccaataattgaaaaagtagcaaatggtgaagtgggccaagtactagcagaaaaggcagccatcatatgtgaccataagatcgggcagctcgtaattttggacttctataccccttttcgcatttccagtgatgactttacaaatataatgtaaatgataaaatcatatagttttttttttttttctgtgtgactcttgtcagtataatatcagaattgttaacaattttccttatcaactaatgcatcagatagacatcagaaaaatcttatctatcatttaatatcatcatcacctattttacaaatgataaaaagcgtccgtattcaaaatcggtcgacttcaaagttgactccgaagagtaatatctatgcagttgagttggaccatcattcaataagacaatacttatttgtttttctaaaaacttagcgtagtctagaaattcaactactttattttatcagcatgattaatattattaattagtttggaacattttataacatgtccaacgtagaacaaaatcaacatatatgattgtatttgaaagaagaaacaaaaaaaaaaaaactaattacgatcgatctcgcattttgatttgtgtgaatttggatccctgattaattagttatagccttataggtatgatgatatttaagcaagatgtgtagagttccacctaaccttcttctatacttagaaaagtccactatatttaaaaaagtcaaccacgtgttttgatattttgtgcttctatttattttgaaaagtatgtctatttattacgttttgaatttgttagatcttgaagatgatgagaggataatatatatttgttcaacaaaatagtagaagtgacaaagtatatataccatatattgagtatgttgggacaaaaactagtaattcatattatagtaagttacggattacgtgggagctaaaattgataagaaagatggtttatggtaacacatcatgaaatatgatattgtcggaaagtggaatctacagagcccgcttaagtttttaatttttttgttttgtttttgttttaaaacttttaattatgaaaagatatgtattaaacatgttacagtatacacatatggattcctcagctggatatatacgtgaatccaagtttctgacaacttaagatgctctaagaccagctattatcaaacaagttattatatatttcgtttaaacaatttgtttacattgatcggaagttataagaaattaaatcctcataaaatacatattttctatatatggacgtaatacacatatattaatctgagtttctaccatatacgaataaaaggagaatttgttcacgttgaataaagcaaatggtgtcacatccacaatcaatcacaacatataggggatttgttgggccacgacttaaatcaaaacaaaacaaatgttcctatcgatttaaacataccacaaattcataaagctctcactctttgtggtttctattgacttaattaaaactcagtagtcgttcaagactaccacaattttgttttcttttgctaccggtatttattatatataactcgtatgatagtatctgcttaacgttttgcgtggtttgttgtttatggtttgataagtgattgaaattcttcacgtaccgcaggaaaaaaagaagaaggattttagtggttgactagacgtacaattagagaaataatggattgatgtttaataatatatgaaattagtaatgttttggtcgatattatcaaacaaatataggttagatgttaattagaaagattataaggaaaatgaaattatgaaaatcatagattcaaaaacgattttcgagaatatatatttctgtttttattgatattgaacttgcatattaatctataaaatctaaaggcaattgatcggatatatatataggaaatatctttgtccaaattgaaatattattacataagcaggcatgtgacatgtgatgtaagtgaaaaactagagatgagtggatttgtggacctgttaaagctgtagacttgtcaaatatgcatctagacaaactaaattaaaaagagttcttataatgtgttttctatgtggaatattcgacatcacaccaattaggtaaatcatgtaataattttgaacatcatcattgtgaacaaatgattgtataagtactgggaacaaataatttctccatgtctattttgtttaacatattaatttatttttttatcggatgtccctgaagagtgaaggatattgatgggtcgttccatggagtgatggaggttgacactcatcaaagaatcccgatcattcatcaccataactgccaaaaactccatggctgtttctgctttggcttgagcaaggtgcttccttgtatttaaactctcatctttggataacgtgttccaatttttgcaaaccaatcacactactctcacagatttcgttggaagcctagcgagcacatcctctgccaaatcccttggaagatcggacagcatcttcttcagcaaggatcgatgtaaagcaaataagttagggttaaagcttaagaagcaagtctcctctgcttctggtggttacaaatttgaagccacataaaaccctagctgaatttgcgtcaaggaaaacaatcatcggctttagaataataaattaaaatctaatctaatgggcttttaatgtggcccaaggtataattcaaataagatttcagcccaacaatattttcgatatataactcaacaagacatcaaattggcaatatgtctagtctataggtctgaaaactggacatgaagtgcttaaaggatgggtttttgcatcacattcgctccattaaatctggttcaaccttaaccgcagtctcctcgaatcaacttgttaacctatactcaaaaagtggtttattgcgagaagcacggaacgtgttcgacgaaatgcttgaaagaaacgtttactcatggaacgcagtgatcgcagcctacgtaaagttcaacaacgtgaaggaagcgcgtgaattgttcgaaagtgataattgtgaacgagatttaattacgtacaacactctgctttcagggtttgccaaaactgatgggtgtgagagtgaagctattgagatgtttggtgagatgcataggaaggagaaggatgatatttggatagatgatttcactgtcactactatggttaaactttctgcaaagttaaccaatgtgttttacggcgaacagttgcatggagttttggtgaaaacagggaatgatggaactaagtttgccgttagttctctcattcacatgtattcgaaatgtgggaagtttaaggaagtctgtaatatatttaacggatcgtgtgttgagtttgttgatagtgtggctaggaacgcaatgattgcagcttattgcagagaaggtgacattgataaagctttgagtgtattctggagaaatccagaactgaatgatacaatttcttggaatacattgattgcagggtatgcacagaatggttatgaagaagaagctttgaagatggctgttagtatggaggaaaatgggttgaaatgggacgaacacagtttcggtgctgtactaaatgttctgagtagtttaaagagcctgaagattgggaaggaagtacatgctagggtattgaagaatggatcatattctaataaatttgttagcagtggaattgttgatgtttattgcaagtgtggaaatatgaagtatgcagagtctgctcatttgttatatggttttggaaacttgtattcagcttcttcaatgatcgtgggctactcgtctcaggggaagatggtggaagcgaaaaggttatttgattctttatctgaaaagaatctagtggtctggactgcaatgtttttgggatatcttaatttacgtcaacctgattctgtgcttgagcttgctcgtgcgtttatagccaatgagactaatactcctgattctttggtcatggtcagcgtccttggtgcatgctctttacaagcttatatggaaccggggaaggagattcacggtcacagcttgagaacaggcattttaatggataaaaaacttgttactgcatttgttgacatgtattcaaaatgtggaaatgttgagtatgctgaaaggatctttgacagtagcttcgagagagacacagttatgtacaacgcaatgatagctggttgtgctcatcatggtcatgaagccaaatctttccagcactttgaagacatgactgagggtggattcaagccagatgaaatcacgtttatggccctcctatcagcttgtcgtcaccgcggcttagttctagaaggtgagaaatacttcaagtcgatgatagaggcttacaacatatctcccgagactggtcactatacctgcatgatagatttgtatggaaaggcctataggttagacaaagccatagagcttatggaaggtattgatcaagttgaaaaagatgccgttattcttggagcatttttaaatgcttgtagctggaataagaatacagagcttgtgaaggaagtcgaagagaaattgttagtcattgaaggatctaacgggtctcgctatattcaaatagctaacgcttatgcctcctctggtagatgggatgagatgcaacggatacggcatcaaatgagagggaaggagctggaaattttttctgggtgcagctgggctaatatagataaacaatttcatatgtttacttcatctgacatttcccattatgaaacagaagctatatatgcgatgctacattttgtgaccaaggatttgtctgaaatagatgaaatcatgatttaatagacagagaggtatcaattttctgtacataaattatatatcactcacatgaccgaaggttgatgatctctgtcttttgtgctttaacggtcaacatttttgttttgtttattattttgaagtaggcgggaaaaaacaagcagcaccagcacaaagtgaagaaaacaacaacagaaacaacatcaggcagagaccaacaacaacaacatcaatataaatcagtataagaaaaccatgaaaaccaaaccacaaagcgaaaccttccgaaagaaaacctactagcaagttgcagcagctaatccacacttctccgggagtttctcagcgaggtcaaagctcgatatcacggacattgatactgtctttatgcttacagaggcactggaaatcggccttggacagggcattgcagcaagggcccaagggatcaattccggtggtcattgggttcctagcctacacatagggcttgcaagagttcagacaagtagaagtcataccgcagaagatctgtccggttgctgccgtgagtgtaaaggcaagaaccaaggtaagaacgataagcttagtgtttggctccatggctttatatactttgagagagtatttacctaaatgtcttttcaacaatttgttgggtttgctcttctcttagcttaggataggctatactacctgcttcatagggtttatattgagagaataggcacgtaactggtgagatttagataaaacgaaattataattttaacatgaaagcatgttcacaggcttttgatattattcagtatccatattcatgagcacatgtagtggaaatatcgaatgtcgaaaatggtctatactatagagtaagaagacccgtgagacattgacattactatgttccaatgtgataactcgtcacgggtgttttggtggcctcaaattttcttaggggctcaaattcaatttaattgctttcacatgcacagtatgtaggtacttgtacttgatatatcttggaagcattatcccaatttgacaatttattaatgagaatagttggtggtcggctctgtgagttatgtagcaggcaaaatgtgtcttatggttgtattttgtgttttattatcccaagctatgatctaacatgtgtagatgaatgtatgaagacattctaaaatagagctaatcatatattgcagcttgacctcacattgcataagtagaaagtggattgattcttaaccccgaaatacaaaagtaaaaaatattccatcatgtgaagttgtgaactgaaagcaatgaaagtttatttgtttactaatttgagggaattttttgcagtctcaacaagtggaacagaacgaagattgaaatgcgtagcagaggtcaagtagacacaggccaaagagacataaatcctgaaccaaatcattgatgagaagaaggtgagatgtgtacagatggtggtgaaggcaatcactgccaaacagtttatgaggtacttctttgtgttgaactctttctctgttccttcgttagggaaatgaccattggagtaaaagtcattgagcagctggtctttgagctggaatgtgttcattaaccaagcattgatgtccttttcttgatttgggatttgggtcaggttgatacgacggatgtggatgtgaacttctgatggctcaattccataaacgttgtctaagaaagatgggcagcgggttttataaccgatggtcacatcataaactgcaagtgcaatagtgttgcatcagagtttgcgtttttcaagaagagaggaaaggcctaggatcttaaatcactgatgcaaaccagcaaaagtatagacaaacctgcgtcaagtgagcaactcagttcttgcaagcaggagacgaaaccttttgtcctgggaagcagcacgttgttcagtatcggaaggccattttcagcagcaaatttcttactcctttggcatttagcctctctgcataaagttccattgtaaaatgcttttaactaaaaggtctctaaacaagaatgatactccaaagaaaggaaacgtacgtgtaatctgtgccctcggggaaaagagcaagccataaagcgtctcggggatccttaaaactcgaaactatctgtctcaagtttgcttcatcgacttcccatctcctctcaactggaataaactcaaagaggtgaaacgcccaaccaaagagaggtaatttcatcaaactactcttaagcacatatttgatattcccaatctggcctttacgcagtgcaagatcccagaagtacatccaatcaacttctgttcggtggtttgcaatgagcaatactcgatcctcgcaaggaaccttatcaccagagaagataactttggttttgttaatcttctcaaagaggaaaggccacaaggcgagccacgagccaaagaagaaggaaacacatttacggctatagcgaatgctgaaaagcctcaacactacagctgataagaacccccagaatatcaacatcataaaagctgttgaaactaacaccatcagacatattatacctcttaacactctaatcagagacaacttatcagaatttggtacactctttttttccattttatacaccttaagataatctaattaacctcccccttctagtcttctattcttgatgcaatgaatcacaaagttcatgaatttcctgttaccagaatcaccatcagagctcatatggttgaacacaacatacttcacctgcaggtaatgatcaaagacacatcaaaataagaatcgatagcaaagtactttatcaacagaaaacgaaaacaatgtcttgtaatttaatagacttattcaaattcatacaatctgattaatgttggattaaaataaagaagaagcttgtattctcaaacacatatatacattgtctaaaacaaaaactctcaccaagataatcaagattcaagcacaaatctcagtgaggattaaaaaagccaatcaagaacacagcatttgtaaaatttattattggaaaaaagaaattcagacagagaaaggaaccagatagaagaagacagcttaccatggaactgagcttccaggttttatttataaacaaacagtgcagaagaagaagaatttaatggccgagaaaaatatcatgaaggactacgatcgttttgtgaaaataggctcagaggttgttgctaattacggtctatgccacttctcgtagaaagtagtactcttaggaaggtgaggaaatttaaaccactgtcccctcctttttcgtcattattaaattcgacacgtcatcgtgtttcattgttccctttattcagcttattattattttcagtctatcaattgggccgggctttgaaagcccacaaaggttatttattatacgtttatccttatataaaagaaaggaaataagaaattagtttttctcctgcagagtgtttctccttcctcaagtcactttttgagtcgcagcaatttggcgtttggtatctctcaatctgctgcttctccttctcagtcatggtcatggatatcgatttcaacgagtacaagctcaggtgcgagcttcatggccacgatgatgatgtaagatctctttgctaaatccacttcttctttctactgttttgatttctcgttttcgtgatcgattctactctagattttgaaattaagtcttgtattcagtagggttcagcaaaattcaccctcgtgattccaatttcactgttccgcttttgatccagggtttttcaattcaatgagctgatttgatagttagtgtgaagctttgttttgattagttttattattaggttgacttctcaacgaatttgtactcaatttgagaattttatctaatagggtttgatgtttaaccttgcgtgccaatggcattaatatagatcaaatttatacaatttttcggcaggagtgtgattgtctttatgctattgagcttatgcaattgaataataactgtgattgtgacaatggaaactcatggtttatcaacatcttcaggttcgtgggatttgtgtgtgtaatgatgagaatatagctacttcatcaagagataggaccataagggtttggtcactggatccatctgataagcgcaagtatacctccgagaaaattctgctgggtcatactagctttgttgggccacttgcatggatcccaccaactgatgaataccctgaaggaagacttgtctctgggagtatggatactttcgtttttgtttggaatctgatgaatggagagaatattcagacattgaagggtcatcagatgcaagtcactggtgttgctattgataatgaggacatagtttcatcttcagttgatcagtaagtcctcctgttcatgtaatttccttagtatgacatttaccaactgtttagtcaataatgcctcttacttagtatccagtgagtgtactagcctgcggttttccttcactgtttcccaggaattgtatcacatacaggatattatatgaatcttaaccgtagttgtaaaggttttatgagtgttaattgtgtgcattattgtcttgagtagcttactagctttagtaatactggggtaaagagatccatcaaattttgatttaccctctactgttgtgtaatgtaacttacatttatttatttttatttgtagaaccctgaaacgatggagaaacggtcagcttgttgaatcttgggatgcacaccagtcgcctatccaggcagtgataaggctgccatctggtgagctcgtttcaggtacatgatccagctaaagctgtcatttgatgcatttgtttctgttttttttgttgttttcttgctgccatggacttccttattcgattgtattttctagtatgatcgttttgcaagcttaggttaaatgattttttggttgttcttaagatgcatatacttctttttgattaggcttgacggcatatttttcactgatgttacttgtacttaccaggttcaagtgacgccagtctcaaactctggaagggtaaaacgagtctgcaaactctttcagggcatacaggtgaattcattactctctcccaaatttcgtatctctcaaaatttccttgtcaatatgagaaactgcataccggaaataagatagaatctgatactagctgctctaagatatcttatcttgtgaagtgccaagacactggcctgttgtcagggattccttgttattggagaaactattgtcttatacaagtatttttattttacaatgcagatactgttagagggttagctgtgatgcctgatttaggatttctttccgcatcacatgatgggtaagttatttgcttccaacaaactcatgccttactgaatttcattgtccaagtgaatccttatgtgcttaactcgaattgtgttgtcttttgcatgacctggataagttttgtgatccggggataatatgatacttgagttttctcttatttatcctttcatgtgtttgtacacagcaaaggttgtaaatcactattttattttttctaacagttcaatcaggttatgggcactaagtggcgaagttcttcttgagatggttggccacacctcccttgtttattcagttgacgcacattcgtctggccttattgttagtgccagtgaagatcgtcatgccaagatatggaaaggtgattacgggttccttagtttctattgatgccttggctgttcttcacttatgtttcacagttttctaggttatatgaggtctgagatgtttaaatttggaaaatatgtctccacttttcagtatgttgctcgctcttaaagttttctttcaataataaagatgtctatatatcatatttttgtggaagacgtgttataaatttgatcacttagttgcaacctatggaaagttagttgttagtatgtcagacagtaatcaactgatcagaaaccagtttgaaaggctcacgaagattggtctgcaatagctgttataatagatatcacttgcgaaaagagactgacattttggtttaaagcatgtttagatcttataggttgatctattgttcttactttgttatttttgttttggtacagatggagtctgcgttcagagtttggaacacccaggctgtatctgggatgccaagtttttggaaaccggagatattgtgacagcatgttcagatggagtggttcgtgtttggacagtacgtcatgatgcgattgcagatcagatggagattgatgcctatgattcccaaatttctcaatacaaactaagcaggtaatctgatcatttatggtgatctctattcttatcgactaaattctatgtccattgagttttttttcttcacgtggcaatgcatattatatgacctgctgacggggtatgctttcttgtcttttatgctcaaaatataactgcaaagtatatgcgtgctgttctttatctcaggaaaaaggttggcggattgaaacttgacgagctgccagggcttgattctttgacgtcaccaggtaccatttattatccaattaattgtaatattaatgtttcgtacgggagaaaggctaaattttaaagaatctcaagagaacacaaagataattgatagtgtctggcgatcaaatttgaatagattaagctggcattcttgtaacatcatcctctcttatttgatatatgttctcaggtaccagtgatggccagacaaaagtagtaagggaaggagacaatggtgttgcttatgcatggaatatgaaagaacagagatgggacaaagtaagtaaacagaatgaacttttatctttttttttatttgtcgactgcatttcgtttttgctcttgacctgaatgcggctttgctatatattagatcgcatgcatgaatatacagataacttccctttgaaacaattaccttgaggaatatttgttactttgttcatcgaaaagttgccatcggattagggcttgtaatttccacgaatgagcatgctgtctggtcataaattgatagcatgtactgccagcaatttgccttttgcgaggattttatttaatgtggcaacccatacctgagaggaaaatttcatctgattttgacttctgatcctccttcgaagtagcaatctcttaagtagatagcaagtaaatgagatagatttctctctaacatttgtttgcatatgaaggattaaacattggctttttagtgtggtagaatgttttgagttctcactgcatgccttttttcagattggtgaggttgttgatggcccagatggtgtggctgatcgtccaattcacgagggagttcaatatgattttggttagattttgacctattatggaaacttgagaatctctcaaaatcgaagaacaaaattcttagcccttttttttctctagttttcgatgttgacattggtgatggggaacctatccggaagctaccttacaatcgatcaggtacctgaatgctcttactggccttgttttattacaagtgcaaccacaagaaactgcttcagtttttgatacttcaaatcttttcttgtttggcagacaatccttatgatgcagctgacaagtggcttctaaaagagaatctcccctttgcatatcggcagcaaattgttgaatttatattacaaaattctgggcagaaagacttcaactttaatccatcttttcgtgatcccttcaccggcggtataaaatttttgaaaataattggtctgaaattttgtttttaggattttattttaattttgtgttttgccttttattgtgtaacagcaaatgcttatgtgcctgggcaagcatctcgtacagctggtatgaatacactgtctgtgtcattttcacataatactttcaatttcttcatttcttgtattgttcttttgctgcctcatgctctgactcttttctgttgcagcaactccggcaaaacctttatacaagcacattccaaaagtacgctggttctctttctttattagttattactgtttaatgtttctagctttttgatccttttttcttccataactctctccagagaggtgtgctagttttcgatgctgctcaatatgacgggattctgaaaaagatgacagagttcaatactactttacgatctgacgcagtaagctttcagtatcaactttagtcacacaaaatgattaaatggttattttacttatactattgttggtatttatgtttctacaatttttccatcttttgaaggtaaacaatgacaagtccctgaccgaactcgaagtatccagagtaggcgcaatcgttaatatactgaaggacacatcacactaccactctaccaattttgctgacatggatattgctttgcttttgaaagtgctacaagcatggccaccggcaatgatgtttcctggttggtcttctcttgtcaatcaattagtcaaacagaactgtttattacatattgaacttttgatggtagccatatgtttctcaatattatgaagccacagcaaagtcagttttttccgagatgcttgttaaacaatctaaaatgagatatgttttggtttatttggatgttattcttggtctccttgtgtttcttttgatgtttcttgcaggccataaagcattttgcctttcgctggccactttatttttgtcttttgttggatatagccttatgtttatcttgtgtcaagctcttatacctatggttttgaatatgcagctactgatatagtaaggatgctcgttttgcatcatcatggagcaagtctacttatcaagcatgtggaaaacaacaatggtaatcatctaattcgtgaagctatgctttctcaacattaatgaaagtactagctagtaggtaatgtcctttattaactggtatctctctgttactatatatcaatcagacctgcttttggatttgataaagaaagttacagaagattctgctcttcctgcaaatcttttaacgactgttcgtgtccttgttaatctattcaagaattcttcatttcattactggctacagacgcatcatagtcaagtaaggactctttcatttctatgattttataccagaactaggatgtgtgatgatctcgatgaacctactaattggtttagctgtgacttgcaacctgaggagaaatttttgggttttatgtctaatatacattgcttttttgcgtctgggcatataaattaagtttctaattacatttaaacataagatagtgcctatacatgtgtgtgtttattataataatttgagaagtggttttaattgctgtggatcaatgcagattcttgatgccttctcaaactgttattcatccccaaataagaatctgcagttggcttattcgacgttgcttctcaagtaagatctctcttatattactttcttctagttggatttttgccaaattgtagctttattctattattaaactctctgtggagaaagatcaaaccgtaatctatgcttttgttcttcctcagttatgcagtgctattaatagaaaagaaggatcaagaaggtcaagctcaagtcctttcagcagctttgcaggtacgcctaaatttggttatttttaaccactgttgcatacatccaaatcctattcatcgtcaccgagttgaatctcatctgtttttattttgtctctgtcacttgcacaaatctctgagatcaaagtaaaatcggagaagaccaatgtaccaaatagtttattatcatttttttggtgctaaaaatatttaacttattactacaggtagcagaagaagaagctgcagatgttgattccaagttccggagtctggtagcaattggctcactggttagtttccgcaacaactagagtaacgtaatccacttgttgttaattacataatttaatcggtgtgtgtttgtaacaacagatgcttgaaggtctcgtgaagaagatagcgatagattttgatgtagagagcatcgcaaaatcagcgaaggcgtcaaaggaagccaagattgcagaagttggggccgatatcgatcttgtaattcgtcagtaaccttaaaagagagtctgtgatcgaacccgggatttgaattttcaatgattccctcaagaattttcatatgattcaaaatcacttttccttgaaatgcaattcaacttttttgttttcagatttctgaatactaacatatgttaaaacttaaaagattatggcttatggcttccattttgagtagaatttttgatcaccccacattaacattctactaagcgaaaccctaacgttcttcttcttcaaatgccaatgtcttggccttatcctcttccccaagctaaacgcaaaatactgcggaaacttcttgagctcttcaagttctctttccatgtcgtaaacgagaaactcgaacttgggcctcaagttatcttcaacactgtatccgaatatcgccgggattctcccacagactctagctgcttcctcgtgttcgaaacctatactcttcaagaatctcatctttgctcttagcttctcaactctcgtgttcagcacgtgcgcgttcgtcttgctggctcggttcagattccgtacccctagctccttaaggtaaacaagcgtcggtctcaagcaatactcaacgtcggagaagaggatgttcgggcaatttacgattaagcccctggattcttctgcggaagctccaagctcgccggtgagaaaatcgaagacgggatcgagtttagagatgtcgaaagtgggcgagaagagctgtggacagaggaaaacgaggcgtgggaaatcttcgtcggagattcctttcgatttgaggagattcacggcggagaggataacggaaagatcattcgccggaggagcaagtcggggattctgaggaacaattccgagagaagaaaggtgtcttagattttcacggtgtgaggtttggaattttagatagagaggcttagagcttgaaggagaaggaggagacgagaaagacgagagaggttgaagatgatgaagtgaagcaataacagccatatcgatgattcttcacttcttacttctcatcccggttcgattttatttatatctgttaaataaaccagaaattagcttttgaagcggtttagtatgaggccggttctgttaactactatacttcatggaccttaatataaattgggctgagataacaaagcccatcattataaaacccctagaccagaagaatctttttctctttgctctttagattctcaaaatccagagagagctcgttaggaaaaatgaaggcagtgatagggacagtggtgtcgaacaaaatgcagatgtcggtggtggtagccgtcgacagactcttccacaataatatctacaatcgatatgtcaagcgtacttccaagttcatggctcacgatgaaaaggactcctgtaacatcggcgatcgagtattttccccttcattttttgaatttgatatacatttgatcaagagctcgaaaatttagggaagctctaggaatatttgaactcaaccattggaagtagacttgcctgtttgttattaggctgctttggaaatgaaacttgatttggttgtttgaaatattaggtgaaattggatccttcaaggcctttgagcaagcataagcattggattgtttcagaaatcataaagaaagcacgcatttattctccacaagctgctgctgcggctctcaattcctcaacctccattgctgagcagccccctgtttcgtcttcctaaggtgatttagttattgctctctaattttttgtatcagaatattttgtttcagtgtattgtcctttgatacctttagtggaactgcatgagaattgaactttgctgtttgacatttgagttttgatactgtttctaaaggtatgagaggctattgtgtggcaatatagcttgttaggcatcttgatgttccattcttaagttcttggaatccattttgtgctccctacattttctgtgtcatacccactacgatttatagctagttaggcatcttgatgtgcatctaccgtaatctatttttcttacctttttggttggttaggctttaaaactctgactgttcctcttgctgcagttttgcagttctggcgcaaactcaccccagggtcgaacaatgtgggtcgcagacgtagcaccatcagaaacagagaatgtggtaacttcgaacataatccatcaagctgtagtgtagtgctttagtagatgatattgatcagatttcgatctcctgattacttgtataattgatgaatccgaagttacagattatctattgaaagtttgatgaataattttcactctagcgaaaaaaagctaattcaaaaagaccaacaagtttacagagattgtgttggtcaaaatctattcataagtgatgttaagaagaccaaacttactcatctaattggatataagcatttggagaaagtaaacgccaatatgtaacaatgcatataagaatccagcgccaaaagtattcaaattctaatgtgtcctatgaaatgattctggtttggatccaagttttggaacaaaccaaaccgaattagccttgccatgtcagcatactccaatcaaacattgattggtctcttgtaatgttatgtgggtcccatcatatcaagatgcagtggcagacgcagtagaactcttgctgagtctcaattgtatccataaagataataaaatttgtatatttcctctttcctctgagattcctttgtctgatcgtgaacttgtagtagtgttttcgtgatagaaaattttcaaagttaatgtgcatacactagctagtgaagaagaagaagactaactaagaatggaaggaacttgttttctccgtggacaacctctcacaacaataccctctcttcccagcagaaaagggtttcttctccaaagatggaagaccaatcggattgtcaggttttcaggttttaagaatcactcggtttctggaaagtcgaggtctttcgatcttagcctcagagcttcaggtactactaaaaagtttcaagctttttgattacactacttctgcatcttttggtttgactttgtttgcttttcgtgaaatgggactttgctcgaacgtgattcgcttcttctcttaacactttatctgtgtcttgtttttgctgatggtttctgcaatgttgtcgtttcccaagtctttaattctagtttcaaagttctcatcttttcaaccttttgatcagacaccagtagtctcattataatttttggcgcctgaagcgctagctttactgcaacatttctggtattgattacctggaattcatagatttttactcatttccctacttgttattgaacaaaggtcccattagagcaagctctgtagtaacagaagcaagccctaccaacttaaattccaaagaagaagaccttgtctttgtagccggtgctactggtaaagttggttctagaactgtgaggtcagtttcttgcttctttaagtttgaatgataattcacaatgctggttggttgaactgtcgaagtgtcctatcaatgtcgcctttcatacagagagctactgaagctgggatttcgggttagagctggagttcgaagtgctcagagagcaggaagtcttgtgcaagtatggcttactttgattctgaatatttgctataagtgtttcatcattttggtgatgtttatccgcaattgatactttgcagagtgttaaggaaatgaagctccagaacacagatgaaggaactcaacgtaagaacaaaatgttttgatttacttacaatgattttgttgtagaaaagtaacaggcagtgtctgtgtctttagcccagctgtagaaaagcttgaaattgtggagtgtgacttggagaagaaagattcaatacagcccgcattgggaaatgcatcggtgattatatgctgtattggtgctagcgagaaagagatctccgatattaccggtccttacaggatcgattacctagccaccaaaaaccttgttgatgctggtaagacaaaaatagcttaaagcggtttatttttccattctctctttcttgtttcatcattgcttcttgtggtattatgagcagcaacatcagcaaaagttaataacttcattttggtgacatccttggggacaaataaatttggatttcccgctgcgattctcaagtaagtctgtaatgtttttctttcattacacacttttggtcagaacagcccataaaacttaatggcatgttcttgttatatgacttcttctaaacacctcgtttgtgaagcctattctggggagttctttgctggaagagaaaagctgaagaagcattgattgaaagcggtcttaattacgcagtgagtagttcacaaaataaaataaaccaaacttacagtttcacagactctttcgattgtatcacatcttagaattgtctttccatcttatttcatcagatagttagacctggaggaatggagagaccgactgatgcatacaaagaaactcataatctcactcttgctctagacgatacattgtttggtggtcaggtctcaaatctccaggtaataatattttccctcgtctctgtcagagtgatatgaccagattatgaagaagagctttaagattttgtggttttctgcttccttgttattgatctccaggttgcagagttgcttgcttgcatggcaaagaatcctcaactttctttctctaagattgtggaagtggttgctgaaacaactgcaccattaactccaattgaaaagcttcttgaaaagattccttccaaacggccttatgtccctccaccgaaggttagttacagtatattgctttcatctcctctcttttcgatcttgattatcgctctcttgtgataagatagtttatctttatttatctgcatttcggttgtggacaggcatcagttgcaaccaaagaggtcaaaccagtccctactaagcctgtcactcaagaaccaacagctcctaaagaggatgaagcacctccaaaagaaaaaaatgtgaaacctaggccgctgtctccttatgcctcgtaagaaaacttgtttctcaaccgcaaaaaaataatcaaatatgtaactaaaatgacctattggcatgacattgattgttttcgatttgtcttgtttctttttttttggtgaatgtgatatatatagctacgaagacttgaaacctccaacatctcctattccaaattcgaccacatcggtcagtcctgccaaatctaaggaggtagatgccactcaggttcctgttgaggccaatgtagtgccagtgccagatagtacctcaaatgtcccagtagtagaagtaaagcaagttgaggaaaagaaagagaggcctctttccccttatgcccggtaaaaccttattgtctttgcgactttattatattcaggagtcacagtttgagtaataaatatgtgagaaggtaatgatatcgaaagtttgatggtcttttacttggccgttttatgatgcagctatgagaacctaaaaccaccctcatcgccctctcctacagcttcgagtaccagaaagagtgattctttgtcgcctggtccaaccgattctgatactgataaaagctcaacagttgcaaaaactgtcactgagacggcagttgcaacaagtgtcactgagacctcagttgcaacaagtgtacctgagacagcagttgcaacgagtgtcactgagacagcagcaccagccacatcaaaaatgaggcctctttctccttatgcaatgtaacaaatcttcctcttatgttatttagttcctctataaatatatcaaattctattgtggtccgatttttcctcaatgcatctacactgtcttttgcagttacgcagacctgaaaccaccaacctcaccaactcctgcatcaacaggtcccaaggaagcagcatctgtagaagacaactcagagttacctggaggcaataatgatgtgctgaaaacagttgatggaaatctgtaagtatcttgaagccagatttacaaagtgtgtgtagactttcgttaaggaatcgatcaatacaatatcccgggttttttgcttgttgttcaggaacacaattccaccttctacaccggaagcagtacctgttgttagcagtgcgatagacacttcccttgcttcaggagacaatacagctcagccaaagccaaggcctttatcaccttacacaatgtgagaatagagagaagcatgctagttctaagtgtgtccattgttattacttcttcttttgcgacctgaaagactgaaatgtttttgcaggtacgcggacatgaagcctccaacatcaccacttccatctccagtcaccaatcattagctatgtgagacgagaattggcctcctaaaccctggagcttcttcttaattgcaggttgtaaacaatgagtaagagagtgatggggcaattcagttttgcaggtatgaatcagtgagcttatttgtacaataatacaatattcatcaacatgccttatatatgagttctactttttttctcctgttcaacgatcaatgcagtaaccatattgttaccctatctcatacatatatgatgacccaaattaattatcattaggctttcatatagctgtcttataatctctcttctgtattcttctcattcagtcaactttatgtctttttgtatacagttttaatataaaaagattgggaaaatttaattataagtgcgtatctatccattaaaaaaatcgatttactaataacaacaattcatgaatggatactaaattagtaacttactatgtgcatggtaagaagtgtcaagactcttagaagttagttgtgttgaaattgtggcaatcgagagacagaaactgagaagacaagaggattgtcgcttatgtcttggagcgaaaactacggaacagaaaacttagaaagtcacaatgaagaacacaatcccaaaaaatgaatcttctattagataaatcacctctcttggatactctttgtttcttttcattttatttatcgagtaccgaacgataattaaaccttcaaaacacttggaatttatgtttagttacacttccaaacaaaaccaacactaacaacaatttgtaaataatgtgattgatccaatcgtcaataacttcttctgtgtccttggctattgaagactagctaggcagttagaacattgaataagtacggggtttattcattaaatatgcatctcaaattctccatgttacgtaaggtagctttcttatagaaaaaagggttttctactttctcacctttcatcgcttttaaggcattcctttaccatttcaatcaagtgcttagtgcttgccactccatctctttaaccaaaagacacccaccaaataccttttctaatttaccattagtaactcttgcggataatgctttgtcaaaagatgttttcatatattcgtgaaatgcgattacaaatatttgaattttagtggagcttttaaaaatggtccacttgacgagtatgcaaaccatatagataacgtggaactacatatccttcaaaaatctaatatttatatcttaactgttccaaatgctaatagctttccctcgaaaagtactatgagcctatcgaaatgtatcgttatatgttcatatagattataaagaacagttagaaatctttttcattttatttttcattgagaaatcttgtaatgtatcatgacatagataaagataacgtgctgttttgtcacaatatatagaataatgtgactactttttgtcattacaacataagattagcgtacaaatacaaccatgcatgttccaatcatttaaatttagaatctagcgtaaaaagaaaatccgaatcaggaactctaatgtgatgatgaactgaccttagaatttcacccgcaaacagcagtaaatcctccatttgttagttgtcctttgtgatgtttgcatttaaaaagtagcctttacaaaacattagacccgatgtcaaaccaataattacatattgtttgtttcttttgatgcaaataccccaaaaagagacacatattttgttttattttattttaaggatattttatactattattcattaaagtgtttcaatcaaaggcattattttacatcaatcaaaagcatttttctttccaagatcggactggtttaatgatgatataatcagataaccaaacttcaccatgaagatgattttatcccataacaggtgtcaggttctacacaaattaaatgaggttttgttttggccatgagataagcaaacttatggagtgtcgaaattgagatctaaatcctaaaaaaatgttgatgtcaaacaaacaaacaaacaaaaaaaatcctaacacatgtattggtttttaataaaaatgtcatttattgtaacacaaagatgttaggtgaaaaaagaaacagatgacaaaaatcacaatttaatatagtttacatttttaaccaaatattcttacaaaaagaaaaaagattgtacactttgtatgattcttattaaatatctagtgagtagtctcattccattcgtggtataatgctattcactgcaatttgcttctgttctttaacctttcctttgttcgtcttcagtaacttttcttttgtcactatctaaattgttttatatctctcatttaatgctctgttctcagtgattttcagctgttggttcgtttttacttgtgagttttttcaaatcacaaaaactctttaaaataaattaggcgggcgatttcaagttgttcatatactcatgacgacaagaacttcgaatcacaaacgttctagaaggttcactctcttcttcttcattagtttatatttcattttacagtcttgtcttaccttagtttctgctctttccagcgatccggtcccaagaaaatctctcaagaataaaaaatcaagcgaggccctttacaacattcacatggtcaggaatcttcaaaggtgtttatatatttttcttaatcttcttgatcatcaaatcaacttaagttcttaattgttctttaggatgaacttttgcagagagagatagaacagctaaaatctcttttaaagtccagaaaattacatcccgggggcaggagagtctcaagtgatgaggttttaagaaattttttcacagaagattgtttttaggtttctaagaaaaatcaaaacagatctcaaatcttttactgtatactctgcagattgatttattgcttcaagaagatgaagtcttagttcggcgtgaaatgaagacagtccttggacgcaaactgttcttggaagattctaaaaatgaagattcttctatccccaaggttatagaaaaaactcaataagattttggttacttttaacacaagtaagcccgctttgaatatcttgtctaaagatgtttttatgaattcttgatttaggaggcgaagaaactggtggaggaaatagcgggtttggagctgcaagtgatgtacttagaaacatatcttcttttgttataccggagattcttcaacaacaaaattacatctaagttagaatcagaagagaaagagagatcagaggatcttcttgagtgtaccaaactcattgattcaccaaaaaaaggagtctgcagcccgcagaaacttgtagaagactctggaatattccgcagtcactcatcgttgtctcattgttcaggctattcctttagaatgtctccccatgcaatggactcatcatatcatcgatctcttcctttctcaatgcttgaggtaaaagaaattgtgttaaacagttaatgttgttttgtttgagtttctttctttaccaatggtggtttacattttcatgtcttcagcaatctgatatcgatgagttgattgggacatatgtttctgaaaacgttcataagtcaccaaatagtttatctgaagagatggtcaagtgcatctcagaattatgtcgtcaacttgtggatccaggatcactcgacaatgatctagaatcgagcagtcctttccgcgggaaagagcctctgaagatcattagtcgaccttacgacaagttattaatggtgaaatcgattagtagagactcagagaagttaaatgcagttgaacctgctttgaaacatttcaggttttcaatctcaggctcttacaatatcaacttcttttagtttagatatagcaactatgttatttaatcaattgtagacttcttcttgaattcaaaattgtttaggtcgcttgttaataagttagaaggagtgaatccaaggaagttaaatcatgaagaaaagctagctttctggattaatatacacaactctctggttatgcatgtaatgttaatttctcaaactaaacttcttttaacaccatcttgtgattagtgacaaatctctctagatattaattagctattttgggtttgtttttgtctcttttgcagtcgatacttgtctatgggaaccctaaaaacagtatgaaaagagtatctgggttgctgaaggtagggtaatcttacttacagtgcagaactacttgggacacaagtcatcggtaaataaacaattattagggcttttctattgtgtaatataggcagcttacaacgttggaggtcgaagcttgaacttagataccattcagacttcaatccttggttgccgtgtttctcgtccaggactggcaagtctatgattgttttcgattctgaaaattgaacttgatgagggctgctaataaggattggcgtatttgcaggtatttaggttcttgtttgcttctagatcaaagggtagagctggagatttaggaagagattatgctataactcaccgtgagtctctacttcatttcgctctttgctcggggagcttgtcagatccatcagtaagcaaatcccctgactcaacatcgtttcttatcttacacgctattcatattgaaggattaggttataaagcaacacgattcttttaggttcgtatatatacccccaagaacgtgatgatggagctagaatgtggtagagaagagtatgtaagatcaaacctaggaatttccaaagacaacaagattctattgccgaagcttgttgaaatatatgccaaggatactgaactctgcaacgtcggtgttcttgacatgattgggaaatgtttgccttgtgaagcaagagatagaatccagaagtgtcgcaacaagaagcatggaagattctctatagattggattgcacatgatttcagattcgggttgcttctctgaaaagaaaacacgactcatgattcggattagttattttttttttcctttgttttccatctgatgtgagcaatgaattgaagaacttacaaagtatcaaactttctagttatgagatatgttaagtttatacctttattgttaaggaacgactacaggatatttccgagtagcttcaatctccatggaactagtccatctgtagagtttaaaagtgagctaatcgatcctcattctaagaattcagctgctccattcgaaatatcacgagtctttcactgtgacggcttgttgttatgcacctcccatttcgacgcatctagagtcttggtttggaaccctttaactggtgaaccaggtggatcagaaccggcaattttctcatagaagctcgcagctttgacctcggatactgccaagtagacaacaattgctgcaataagagctacaaaatcttgagctctcatcaacgtagcgaatattttgatatctacgattttaactctgattcatggaggtttgttgaagatatgatccctccaggcgtgagctttggatactctgaactcagtgtgtctttgaagggaaatacttactggttggctatagttgtaacagaaacgccccgcaccatatcattgctcaagtttgatttttcaatagagaaatctgtacttgtgcctcttccctatcatagtcttcagagtcgtcgttttgaagctagtagcctttccgttgttagagaagagaaactttctgtgttattacagcgagatataagttccaagactgagatatgggtgacaagtaagattgatgacaccaccaaagtggtgtcttggagcaagatcttagcattggatttgagccctcatcttcagatttggaatgatgcaagtttcttgataggcgaagagaagaaagtcatcatgtgtgagagattggttgatgtgcacacgtccaaagtcatggtctacattgttggggagaacaatgttgtcacacaagtggaatttggggttgttgaaatggatggatgttgggcagttatctttaattatgttccaagtttgattcaaatcgagcaagctggaggcaataggaacataggtaaataaacaccgtctacatgtaatatctttgtgcgtgtgtgtatgtgtgtgtgtgtgtgatcatgttctttcagtttcaggcttttctaattcaatgacttaaagtgattcagaaaacatgtacaaagatacaagttgtgtgtgtgtttttcttaattttaccctgtctcttgtctgagttttctttttcacccaagatacaagttttacaactataaatcatcgcccaattcaccttgcaagttctaccactaagccaagcatggtatgttgcaagtataattggtgttttctctatatcttacaaacacacagcttaaagttgcaaatatttggaccagaaaacaatccccaaattacttgaaaccacaacttggcttgttttatatattgtaacgtgcaaggagaggagcaagagatatcgctgagatttgggtaaacatggccaagatatccagtccattcggtaggacctgcttgtgtagaaaaaacagcagtaacatagaatggccagttgggaactctgattccatgtgaccacaaattatattatttattaccatgtctcagtttggaataaca

SEQ ID NO: 1298 - DNA, 79186 bp, Arabidopsis thaliana
aagcttagcaagttagcaacactaagatcacaaaaggtaaaaaaaaaaaaacagagcttcttagcaagttagtaacactaaaatcagggttatacatgcatctagtctttttagcaacagaggaaaaccttcacagttctagtgttctaccaagtagttccagaaagtaaacacatatattcaatctaataagctattacaagaaattcaatgctcaatatgatctcatgggaacgaaacaggggaaatttgattgccacaaatatatgggcttttaaagtgggccttgttagattcttatcaggtccatgtcactcactattcaacattttactgctgaactcaactgtgggaagaggaaaccctagagatttggtaacagcagagatcaatgaagacaatacaggagcagcttccaaatgacttggtagaggagatactctgtcgcgttccggcaacatctctgagacgtttacgatcgacttgcaaagcatggaaccgtttattcaaaggtgatcggatattagcaagtaagcattttgaaaaatccgcaaaacagtttagatctctatcgttaaggaatgattacaggatttttccgattagcttcaatctccatggaaatagtccatctctagagcttaaaagtgagctaatcgatcctcattctaagaattcagctgctccattcgaaatatctcgagtcattcactgtgagggattgttgttgtgctcctcccaattggacgaatctagagtcgtggtttggaatcctttaaccggtgaaaccaggtggatcagaaccggcgattttcgccaaaaaggccgtagctttgatgtcgggtactactaccaaaaagacaagagatcctggatcaagagctacaaactcttgtgctattatcgtggtaccaaatattttgaaatctacgattttgactctgattcatggaggattcttgatgatattatcgctccacgggggagtattggatactcggaacttagcgtgtctctgaaaggaaatacttactggttcgctaaaggtgtaacagaagagcggccccgcaccatatcattgctcaaatttgatttttatacagagaaatctgtacctgtgcttcttccctatcagagtcgtcgtcttttccaagctagtagcctttctgttgttagagaagataaactttctgtgttattgcagctagatcaaagttccaagactgagatatgggtgacaaatgtgattgatgagaccaccaaaggagcagtttcttggaccaaggtcttagcattggatttgagccctcatcttcagattgggaatgatggaagtttcttcctaggcgaggataagaaagtcgtcatgttctgtgagaaattgattgatgagaacaaggtcaaagacatggtctacattgttggggaggataatgttgtcacagaagtgggatttggagtagatgaaatggatggatgtcgggcagttattcttaattatgttccaagtttggttcaaatcgagcgagctggaggcaacaggaaaagagggcactaaacactgtctacatgtaatctcttttctttctgtgcgtgtgtttctcttaattttatctttgtcatgttctttcagtatcaatcaagcttttctaattcaatgaaaaaagtgattcagaaaacatgtaagaagctttcaccctatctcttctctgagttttctttttttcactcaagttacaagttgtacaactagaaattatcacccaatccaccttacaagttctaccactatcacccaattcaccttacaagttctaccactaagccaggcatggtatggtaaaataagccaagtatggagatcccctcaattgaccagattggacaagacaaccctccacggccaggtaaggtaacatgagcttcagatcaagcaccagcaagattacaatgacctcaacgttcaggcgatctcctaaaccttgttctatttttcttactaaaccccaatatactaaaaagcccataatatttattcttacagggccgcaattgatccagatcttctcaatctcagttggttaacgttattcatcaatatgtaataaatcatcaaaaaaatttggtcaaaaattaaatcgacagctaaaagtttgaacataaaattcggtaacagaaaacagtaaagccaccgacgatgtaaagttattatagaaacgaaattcaatgtgttgttgactttcgtttctatgataactttggcagcttttgaagttaatgcattttgataactccaaagagaggaaaaaacgaatcatcagccaaaacgccgtcgtacaggctccaaaaccttcatcgtcttggcgtcttttgtctgagacccatagtaatataagaaagtgtgtatcctagtcaggaaaattcaacgtacatagtaacaaattatttatttctctatgactatacgttatatcatattcataaatgaaatccgtattttagcagcattaaataagagaggtgaagaaataaaggtatggttattatttatttatactaaatagtaataaataaacgaaccttgttgtgaatgtgagcagctgagcaatttctgaatctctctatcttcttctgtttcgttcattttaattccattaaatgcttaaaccccacattccattaatgctctctccttccacttcaatatttctttttatcatcaccaccgtccaaatttcatcttacatctctgccctacacgtgtctcttcttctccatctctccggcgataacagtgcctctggatctccgcatcttaaccggctcgatgagtgcggtgctgttctgaagaacatcggactcgtcatcgatttcgttcgccgcgatgagcttcccgtcgctggaatccgttctgatatcgggtaaaacactcccgccgatgatctccgtcggaagaacggtgatttcgtgcttctgtagtaacggaacgagaacactcttgatttcgatattaggtttccgaacggtgattgacgtttgttccatgtagatctccggtatctccatggagacaccgtcgctggctccatcgttactctctctgattcagattctctctcgcattcgaacgagtacgatctcttcagctcccggaaccgagaaatcgccggtgatgattgctcttccaccgacgctctgatctcctgatcgttcgtcgtatcggcagcgattgtgttccaattgctccgcgacggtgtgatttcgccgcggatgatgatcgcgttattctcttcatcatcgagactcggacgaattcgaggagccattaacggaacgaacggcgacataggcgttaaaactccggcggatccgagaatcgccgtacggcataacggacagttagggtgagatcggagccattcatcgatgcattcaaggtgaaaagcatggaagcataacggaagtgttcgtacataatcaccttcttcgaattccaacaaacaaacagcacaatctctgcaattggcggcggaggttttccccaccgcgggttttccggtgcaagcagcggcggagtagagaaacagcggtaaagttttgataacggaatcgtctaatccgtaaggtgagtaagaagagtaatgaaaagagtcgaaagggaaaggtgaaaatgatcggagatcggaggatgaagttgaagcagaggaagctgaagataagtgaaggagacggcgtcgacggcatcgccaccttctaaaacgacggaatagaggtgaaagaaaacggcgggagatgagacgagagtaagttacgaatagaaaagcggcggctagaaccaccaccatggcgatcaatggaggactaaactctaaaggaggatccgaagaacgggagagaatctcttcggatataccggaagatggtgaaggtgacggtgagttatcgccggaacgaggcggtggcgcgacgaatcgcatggtggtttggtcaaaaaacaacaacgacgaaacaaacaaaaaagtctaacaaataaaagagtctaaaacagagtttcaagtgaaaggtttaaacgcaaacgagtgtatttggggactttggtgggaaaaaaatcgttgactaaaggtaaacggtattgggataaataaaatttacacgtcagtgtttttttaatgcagaacaaatacgacgatccaaaattgtcagaattaatcaaataattggaaatttgggtacattatttaggtactgattggttaatatggggatatagttatatgaataactactaacagtgagatcttaatatagctaggattagaaagaagagattagcaaagatctagcatacatggaatgaggggatagaaaaagaagaggatagtgctccttttaggggttgtttgattttaatgtggatttgatgtggtgacccactctgatattaatggttttgttgaactttatcaagtggatttttgcgacttttttttggttgatggtttgatcaaagcctttttgaaaattcttctctttacttttcagtctctatctccatttgttcatactggctgctcatccactgaactagaatttatccttttttggtgatgtaatgaagtataaaatttcaacttagttttaacacatttttacttcaagtcacttcaaatatctgcttctagtgaactagaaatttgttataatgaatgtttttctattatttaatgaagtataagtttattgttcctatgattatgagttttgaccaccaatacatgcttattcggtggcaaatatattcaacgaatattaattttatgtaaatgacatcatatgtgaatgttaaggtttagtaaatatgataaagttcaagaatcaaaattatgatagacaagttaaagactgtaatttttaaacatatatactttgtactagtcttcaaaatatgtgagaaaaagaagtactccactaaccaaatcacatgtacataagttaggaccccatcagttctttcaagaaccgaaaactatttgcatgtattttacttggtcagaaattacatatataaaattctggtggcaataaaggtgcaaattaaaaccggtcagaagtacttgccttggtctatctatacaataaaacacaatgactccagaatttattgctcaacaactactttctttttcttttagtcccggagatatttcttacattattattgttcatgcaaagctatatttgtttgcatccacagagaaaacgcataaccggtcacatcaaatacattatgcattccggtctgatgagacatgagtttaactgttgttcggtttaggatttactacacggattctggtttagcatcttatcctctttgtttagaatcatacgaaatttcataatatacccactgataacaaaaaaagattcacttcttgattaaaaaacataatttcagaacgtgattgaatctctcctattttatgatcctgtctccctagatacatttttgtctaataatgtaattctacttgttatgttttgttgttatacagtagcagatttgatgatgaaaaactgaaaaaaaagaaagaaagaaaaggtgtctctatcggattaaaccatctcaaatgttcataaacttctcattggatcataattgtaccactacaacaacctcggtgtctgacactgtgagctccaacaacagtcttaaaacatagacatatccggaggagctccatacatactcttccatgaatacggtatctgccatttcccaccttcttcccctgcagaaaagaatattcatagtaagtttcatcgcctctcactattaattgcccgggtgttgttaccctcggaagaatagaactatttaccatggaacttgtcaggagtcagacccataagcttagatgaagcctcagctagaagaaatgcttcaggaatgttgtctccttcagaacagtaacatagcaggcatgtcatcttcaagcctcttgcctaaccccaaaacaacataaaccccgcacaggccatataagtgtttcaatcatctaaaaatgagtcgtagtggttacattgttcattataaggcattttatctaccttaaaagctgagaaaagagctgcaaatggcaagcttggatagtagtctatgtcttcaagttcatcttctgaaggcaacgccagctcttctacactgttcttttcaaagacagagctaaggtacttccaacatcttccttctgaatcatactcgtgcaatcttccaaacccaagcctttcacagtgatcatctcttccatcagattcagcgttagacagataatacacctgtgggcctctaaagtaattgccaaggagaccacgaattaacttgtgaagagtttgcttttagtaagaaattaagaatgtggaaagaaaaaggtgcaagtgaagctcatttatttatcaatcaaatctgtgattagagacctctgatgctgtttgcactagactatatttagttctacattgaaggcatacgaaaaaagttatagcaaaacacatataaaaggaagcgttatagttacctcgacatatccaagttatgcagcctttggaagtctaaactcgataacacaatgatgtgcttctttccacttgaagcagcaaaattggctatattctccgcaaatttaatcatcattccctgttttgaatcaacattgtaagttaaaaaatgactcactaaaattcccaatctttttactgaaaagctccagttaattgacatttcatagtcccaacacaaaaagcattgaatgcaatccttcaaaaaacaggattcgaaataacgaggacaaagctgccaacaatgtaaatacctttgcaactggagaccgttgctgagcaagggtagtagcaattgaagatgactcataaactgaaaacacaaaaccaaagcggagaaaagaatgaggtttcacaagtataaaaggtttgattcaacaatacaaagtggcatagatctaggcatcaaactatacaaaggcaaataatgtgttattattgtcctatataacaccttaatcatgtaaaacagaggatccttaatctaagaaagcaaagcactcattgatcttaaacaaagcatatagtttgagaaaacgaaccctcgagaggaagggcgatctcgccacaaggaagagggccataagcatcatttccaacacaaggaagcagatttggatcatcaagataaccaactctctctgcaccagtagatgacactagaagatcaacagcgagctgtcctacattcccaattgacaatgctggctggtggggggaaacaaaatcaaaacttcatcaatcataaatctttacaacatttgttttatgagaaacatcaaatgctactaaaccctaaacctttttcctacaagtttcatgactgtttcgtgggatttcaatgttcccaagaaaagttggggactttctaatttctattttctcttcaataaaggtacagtttttaagctttagagacggaaatatcgaaagggaacgaatacccagaagcagagaacagatcgaaatcggagaaaagcaaaggaaacgaaacaacaacttacgagaactaaagtcgagcaatcttcattcactagctttccttcttcaacaacaaactccatttatgaaggcaaaacactggtgacagaatcggattgcaagtttcccaaatatcaagttcgaagaatctctgcctgcgttcagaacagttcttcttctttggtcgagcttgaagagaaagccagtgactaatttgggccgatattatcaatcaaatgtaatatgggccatattaaagcccaataaaggaaaaagatgatggactacaactgtagagtatatatacttggtgacgattttgtccaaaaaaaaaaaaggtgacgagaaaataaaagaagaaatgaaagtctataatctactacatgcggtgtaaatgtagttagtacgacttatgctaacattctacaaccaaataaaaagttgatgtatctcagtatctactattgaagtgaaccatttgagggaaaaaggaacaaagcatatatataagattggaaagagatgagagcagggccggtacaatgttttttcttaatttctgttggtcatattctttaatttatatcaagtgattggtcatatcaagtaccttttaaataagtagaagaaggctggtcatatcaagcacctttcactagggatagttctatctaaaaaaagtacctacagaaatggggttatagttttgattaaagaagcactagtattacgtcgcattggatgcaaaaatgaggttactcatttcagaacatagactaaaaagagaagattttttaataaagtactaataacaagattcagacgacatttttcttaaaagtagtaattacatgatttaggagaagacgtttttttaaaaaaatgtagtaattacgtacgcagattcaagacttttttttttttggtcaagattcagactcaagactcatgagaagaattctgaacttcatcttcataattcaggggcggaacggcggaagcttttttttttataagattcctatgatgatcctgaatttgctggagcgtaacttactctcagctaatagagtaagagcgtcacttccaattttgaagaatatcaagattttgattcaatatggcaatcatttcaagtgttgagaaacctttaaaagaaatgagattcataattaaccatctacaaaacaaacaaaacaagcctcagagttaaaaaaacctacaaacaaaacaaacaactatcgtaattcaagcaaacaaaactatcgtagttatagattaaacacaaatttagactttgttaagttaaagtccatacgtataattaatcgaaagccctaaccaaaatattgaccttagaaaaaaggcttataatatagtttttatattaataaaacttaaaagaaaaaatttctaaaaaatgcactcgaaatattaaagtgattgttaagacaattattatccagagagatccatatcatatgatgacaatttaaatataataattcaaatgaatgagttaatcatttaaaatgagatgcgaagactttctgatgttggctgtctcttccattgggtacattatgtttcgtttcttgatcgctatccttttggtttatattaaaatcatgatatgaaaaaaaaaactcatttcagaaacaacaagttagaatattagaaaaaaaaactaaaactaaaactaattactaatttatagactgaaattaagttgatttttctcaaaaataaaataaaaataaattagttgatataaatgtgagaagaaacagtttaatcgcttttaaaacaagaattaataactaggcaagtattattgttgaggaacgtaaaataaaacaaaactactatggatttgttggaaaaaaaattgaaggacacggtaggtctgtcaaggagtggtgctgaccaattagtccatattcaatgatatattatgaaatcaaatcttatcctctaattgaaaattcttattaggttttctcacatgtctaaatattcgtcctatgtccattaattagtttaacttaatactccaaacaaaaattcaaccaaaaatagtttcttaattaacacaactttcttttagttatcacacacgtctctacgatagtctttcaatgggtgatgtgtcctaaagatcgtgattttgttagtttttcaaagagatcaggtcacgcttttgctccgtcgaacatggccaaatgtgtcgcatgatcctaatataatgttaagaagcaaacatagatgacatattatactgatagttaaatgcttacaaaagataaacaacagcaaatgtccatgataagcgaattaataataaatgattttagacaattatgtactattgttttctcgatacgattatatgctcacctaacaaatacacttccactagtttcatatatacatggtgatgtcacttttacgtgtattttctaatacgtgtacattttgaggtttatctttttgggggagttttggttagattcgtagaatctgtctgatgaaaaatatcaagtaaaatggagaactaaattttctaaaatagtgttaccaatacgatttgcttgttttttcaattccgataaccatgcgcatataatctcatcctacttgttgaggcacggtttatgctaaaccaaaattcaataacattatggaatatggattaattgtgtataatctaaagtttacgaacttataaccagaatatacaattacggctgcaataagtcatcatccatagactatagtatataatagagtcttaaaattaatacttaattggcattaggaaccaaagaactaaacctttttagtgcatgataggatagtatttgttatcgtatatgtacgagtacgaaacaaatggatcacttctgcaaaagtcagcgtggacgttttctacatttcgaaacctgccatgtcaataaataactcatatatcgtaaagatacattgaacattatagtacacatcggcacatcgctgttagtattaattatttttcatctatatttgtagaaaactagctagaaatatacgcacaggcaactaagattttgataactggtggcacaaatgggtcaaattttatgatattgcacgaagtcaacaatacattttctttgtcattatttcttttgttttattaaagattgtaaaacttcttgtgcgaacaatgtttattttatgttacccactcctgcaggaacacgcatcacgatcttttagtgatatatatcaaaggagatttttctccttttacagccccaatgttgttccttatgaaatctcacgtactatatcatctgtgtcaacatatgtgtctcttcaaagaacaaatttttttgatatcgcatactttttcagttttaaatttaattaattagtaccaagtcaatgtaaccaatatgaagtcaaagataataattgtgcaagttgattatacgaaaacgaaaaaatattaaaactagctcgtttcaatctaccaaatctatcatgtgatatccaatctttgactatcgtacctccatcgtatttaagtgaataattaatcgatggtgtagtgagagctacatgtaccatattatttaacgtgtaaatgaaaaaaaaaacttcgtttagagcaactccattgcatataaaagagagtgtcttcccacaattacaatataatgtttataaagaaaatatattatttaaatgttttagtgtctttaaatttaggacatatgtcttaaatgtcttgttaaagacattttagagaaaaatgtctcaaatttaaagacccatgacatttaattattagtattttgtaacttcaattttttttaatatttattacagacaccctttctaatgtgcaatggggttgctcttagatgtatctaactatattcttaaatgtatttaaattgtctgattgtctccatatatagaaagctcagattctattcggaccacgcagcgagtgccgagtgggatcaggtaagccacccataaaacaaattatctgcctttatataattatttcagaattccttgcgtattcggtaacaagaatttgtttctttgttcattgctttatttttttttggcaaagtctttgttcattgctatatatggttgtgatgtgtggaacttccaaatatatagctagtggcgtttgtttgtaaaaatgataattattgttattagttattatgtatggcgtgggaaattatagtatccttagcatttctatatttggtatatatggggcttgtacgtttgccatggttgtgacggcatacctacataccattggtattttatttggttgaaacgtccccatatatttcccattggatttgagacaactaaccttttttttttggatatgtaattatatgttagacaacgattgatcgtgtaataattcaaaacttatcacataataatggatgcatgtcgtgtcaaatgaacggcgtgtaaaatgcaaagtactcctaatgaaggaaaaaaatgtaattttgtctgattaaaacgatagtttagttctcgttaccgaaagcgacaatttcacaaagaagcattaatgtcgatatatctaaactaagatcatatatagtggtcatgatttgttttcggaaaagtcaatagaaattctaacagttagaaagcaagcaaggcagtaaaataaaacaaaaagatagcaataaaaataggaatatagcaacaatagtgatatttcagttgtctaaattaaatagctagagcattactttagtagacaaaaaaaaaagtatgcatggtaatatgttgtttttggggaatatgttatttaattgtcctaatatatctaatttggtcatacctttgcaccactattatttgttttctttagcatttagcaaccccttgtttttcttttgtatatattagtcattcaaatataaattttgtgtcgtattgctatcgtaataacaacgtctgaaatggatagatgtcgtttgtggaccattgtttattggcaagtatactatagtcgtgagtgtgaaaggctatgggattcaataactaaccatacctttggattccaaaacgtcgttgttccatagttcgagtccatgaccattgacgatttccataagttttcttccaaacaaaaattaaatatatggagaagagtaaacgaggctattttatacgaaaccttaaaaatgtcaaaactcggttagcagtcaacaatcttttttcatttaattagggtttaacattagagtgcgacgtcggtggtcgaatgagagaaaagaaagtgtggaaaaaatgttagacatgtaagtcgtctatttttgaaagaaaatctaacctagttcacggaatgtgtggttagcccgacgtattatattaccacaaccacacactgtatgccttggcaacacatctcagtattttatattagaagattcaaatggtcgtcttccttcctcaccaaaaaccattggaaagtttccaataacaatcgtgagggagattgtaatatgattatcattgaattttcttcgtagtcccatttatattcttgaatcaaagtatccatacaaacttccttttttcggatgcatagaaatattttcagagtcgacaaaaacaaagaactctattttctttctttcgtcatctcccttttaactgacttgtgatatgaagccactgagcttccgtcaactctaaatgtccggttttattgtgaccagctctcaagtatgataatcccttgcctttatccctacaacaacaagttaagagttgaagaacatctactagaatagattgcagaagaatatacaacaatgttgtattgcaaaattaataagaaacttacggtaagaagaggagaattcgggtcgcagctagatattttggaaaactagagttaagatattttgggaatttcggaaaagatccagaatatccccatgattatttcgatatacgttattgagcaagtcttatttccgaaatacgaagaagcggcccgtctttcaaaatctgtaccgatcattagttaattgtgaaactagtatttgttggaactcaatatttgtatttatatatcttacttacttaaaaatgtgggagaattttttatacgacatcctaagaatgtcaaaacttggctagctgtcaacaatcgttttcatttaattaagggtttgacattagaggccgcatcagtttttttatttacaagaaatttctatcggaatcccacggtttttatttttgttcacgaatctctcaattaaattttaacatctgtgacagaataaaaaataaataatttaaaattctcatatgattagagaagatcccatattaacccatagtcatccaaaaatgtactttccaaatcatcattttgtttattatcgtaatgaaaagtcaatcgacattaaaagaccattttcctttatcgtaatgaaagtcaatcaacttgtatgaaatttggtttcggttgccctcattattttcgaaattgaaaacacataagaaaaatgttttgcaactcgtgctctttttgtcggcgatttgatccgtacgtctagaaaaattcataataataatacgtttattatttcctatacgtacgtatatcagtatatgtatattcgtctcaaaccatctgttcaaacttcttttaaataaatatactgatttgatgacattgataatgtgtttaactataagaaactccaaatttatttatactaatactatcaaataataaaagtaaaataaaactgcagccttcttaaatgtaacacatgcactttatacgttatagaagataaattagttagaccaaatatcttgttttctacggtattcgtgatatgttatatgtttttcaaaatgatggagaaattacgatagaatggtaactaaaaaatcaactcgcaaacaaaaatataagccaagtcacccactcaatcacacgtataaataaaccttaaattaaaataaatgttatgaccttactatggagattgtatcgatcacatttcttgaacacttgatttaaattaaataaaacaaaaggtacgggttcatatatagtcctaaaaggcgttccttatcgttcatggaatgagtcagaaaagtcaaaacatctggaagaaaacttttttctttcacatgtcgaaagtgaaataaaactaatcaaaacagaaaaaacctaagtaataaaaatcaagttccgcttggagaatagtgttatcgttacgttacgttttgcaacgtgtgaagatgatcagccgccaacacagccacacacgcgttatcttgattttcttattcaaccaacttctaaaaataaacccgaatcttcgtacggacgcatctcatgttcaattattttcacattgctctaaccatgcatgtaatttactcaaggctttgttttgagaccgtctttcttttcggacgaccgtccatccattactccttttagtctttcatcaacactttcttatttccaaagttgcatattaattacattattaactaattaatactaatattcttgattaacacggtctcatgtgaaaactggcgctgccggaatctgacggtcacgtcttcagtctaaaacgccacgtgtcattcacccacgtcgtccgttcaccaactttttttctctatatatacaaatccaacatcctcttctacactctttatacatttcaatatttcttaccaaatacataaatttttctctccaaatcccaagaaataaaatttcgaatttcttccctcaaaaaaatctccacacgtcaaggaaattaaaaccccataaattccttgccaataaaaccttccaactactcaagttaattttctgtagtgtataatcttgaaaatatggtaatagctacagaaaccaccagtagtagtcatcaccggagactcactttcgcctccttcttaaactccgatcccgccgctgacgaagaagaacagagtcatggtgttgatgatatcatcaatcccagtagtagcaacaaaaacatcaacaaggatgtccatcataattaccgacaaagtcaaagcaatgcttcgacaactagcggtgagtcgtctcctaatcaagttctatcgccatggaaccaaacctactctccgtactacaccgacacaacaaacactccatcgatgtctccctcaccgtggaaccaaacttactctccgtactacaagtctccttggatctaccagacccgaaacattgatgatgataccgacaacggtttgatcggtacaatcgtgagacaagacggtcatgtctactcgttggctgcttctggagatcttttattcactggatccgattccaagaacattcgtgtttggaaagatctcaaggatcacacaggctttaaatcaaccagtggattagttaaagcgattgtgataaccggagataaccggattttcaccggtcatcaagacggtaaaattcgggtctggagaggttctaaaagaagaaccggaggttattcacgaatcggaagcttgccgacgttgaaagagtttttgacgaaatcagtgaatccaaagaactacgtcgaggttcgtcgtcggaaaaatgttctcaagattcgtcattacgacgccgtttcgtgtcttagcttgaacgaagagctcggtttactctactccggttcgtgggacaagactctcaaagtttggagattatctgattcaaaatgtcttgaatcgattcaagctcacgacgacgcgatcaacacggtggctgctggtttcgacgatttgctattcaccggatccgccgacggaactttgaaagtgtggaaacgtgagcttcaaggcaaagggacgaagcattttcttgttaatgtgttgatgaagcaagagaacgctgtaacggcgttagcggttaatataacggcggctgttgtttactgtggttcttctgacggtaccgttaatttctgggaaggacagaagtatctctctcacggtggaactctccgcggccatcgtttggcggtgctctgccttgccgccgccggaagtctggttttaagcggcggagcggataagaacatttgcgtgtggaggagaaacggtgatggtagccactcgtgtctctcggtattgatggaccacgtgggacctgtcaagtgtttgacggcggtggaagatgacggcgaaggccacagagagaaaggagatcagaaatggatagtgtacagtgggagcttggacaaatcggttaaagtgtggcgcgtgacggagtcggcgtctacggttattggctgagatatgcttgaggagaagtgtacacgcgccgccgccgccttaagcgcgtggtgaatggtgatgcggactatgaaacagaagaatgttccgcggcccatgtgatccctgccgttgttgtcaaggcaagtttttatggccggctaaaagaagcatttcatacaaccaatagggaactgccatgtcgtgaaagtatctaactgatttagaaagttcttctagtttattcgatcttctttgtaaagagtaactgcacatatttgagttacgttttagacaatattgtttcattgtattaaatcattttatttatatcttattttatggaattttaatactcagcttttgttattttaccattaatcttttacaagagaaaaatggaattgaagacttgtaatacttacgtttataggttgatttgttgaaaagaaagaagtcgttgaaaaatgggatgctaaaacttttatggtgttttcatgaacttatgtgaaaagtttcactttcgtgggattaagaagtttggtgcacatttatacatgtatgaatgcgcattgacatccaaacactcccttattatttctaataaattttaaattaataatagatcttggtttcaagatattaattacaagtacagtatcagacaaatttgtttttccagaagtataaatacaatcagttgttcttgccgtatgattggttgcattagtattcgctctgaaaatatgaccattgttagtcatgactcgtaagtctaagtaataaattgtaacattttttttttttttttttgtaacattaccttatatgattacagaaagaaacaaaattcatggacgaatgtacgagaatgtgaacagattattatttagaggctaataaatggtcctatagactatagtatacaaatgatcaatgactaaacctataaggctataaccaatactcgttgcttttgcaaaaaaatccaaaaaactgataaaccacatcaaacctataaacctaaacaaagtaccacatagatagatcatgtatagctagctaaatgagagacctcatgagtttttgggttatttcatattgatctagtaggaaaactaattaataagaaatttatataagatgaaatatgttcgtatgttaggttgatttgttggttcagacgttcagtttgttggaaaaagaattagccactggaaaaacggagaggattgtaatattctatttttttgtcttcaagaacgtaagtaaaaagtcttctttttcgttggatatatgtattgctatttctacacattgacatttgacatatagacatgcacacaccacccttctgttcatattttcaaatagcacgaaaagctgataaatcttgatctattaagcaatttagaagtttaagagtttggttaattagttctaaattgtaaaattcataatgataattttaatgacaatgaagttcctaaatttaagtagtagaaatatgctttgattcgtagaaaagaatctctgtagattgcttttatgtgtattaacccaactatattaacaatgacgatgtctacagattttcactataaaattttatttgtcatttttagtgtgtgtttttttttgttctcacgagcatttgcagtttagtattataaaatatttgactgaaagattgttatgttttgtacccaaacaataatatttttatatataattaaatctattccgacaatttttttttgtctaatctattttttaggtttaagactatcagtttgtagaacagttgtttcacgactaagtaagaaaggtgcatatatatagcgactcatcaatacataaagatgatttactttcatgaatagtaatctaaatcccaaaaggaaatcgattagaggctcggactttggttaataggaaaacatttttgaaagacacattgacattcggttcaaatccggtttccacgcgccgtttatataactaaacgcaacatatatctgaaaataatttgaattgggtatggtctctgtgtttttctcttaattaaggatacaacaacaaacaacgacgttaattattgtgcgccacagtagttaggcaaatccccagtagtttcttgttcatttgaatttaattaattaagaatgattaaacccataatcttgactattttattattcaatgctataattgttatatatatggtagactattatatataggtcttgttaagttaatcataaattttcataactcacagcctcaaaaatattaggatatttatagttttgtcttgaggattaatgtaaccgaccttagctcagttggtagagcggaagactgtaggcgttgcagataatctttaggtcgctggttcgattccggcaggtcggattttttttttttctttttttcttttcaactttaaagataaaacccagcccatattaaggcttttagttcaaaaaacctagagcagccgtttataattaaataaaatcaataaatgactccacatgcaagattctcatttgagacagaaactctccaaagcggcacagcttcagcggcgatttggagacccaaaagctaagtggcattgggccaaacacaaccgaagcctatttgttcaaaacacaaccgaagcctatttgttcaaaacacaaccgaagcctatttgttcaaaacacaaccgaagcctatttgttcaaaacacaaccgaacaaaaaaaactaaaatgttaaaaagaaagcttcaaggcaacttcctcaaaaggagaaagcttcaaggcaaattccccaaaagatttagctgactatcaggtttgaatgtttataatatgatgtagaaagctcaacctaatgcatctagcataaataaggacatcacttaatccaaaaccttcaaagagatggaataataatcaaaataaaaacttataagcctaaacaaatattcgaaaattcattttaaaacatgggaaccttcttaggatattttgtgcctggtctctcacttgcacttctcggtctctggcatgtaatcaataccatacaatcttactctctaaattccccaaaccaaaatttcacctcatgattctggttccctttcccgtataacaaaaaactcaaacatctcgagctcatcgtcattatcattgttactttcttatccattttcctcctaaactcagatttccctttccttaaattatcgtctttcaaaccggaaatcaaacacatctgcatagtcttccaactcatttcgtttgcgtcttccactctcatctttgacgtaataaatcctcccgataaggatatataccggtttcatcgggcttcatgcaacattggttttcatgcaagaagtactcttctttcttgattctcactccactgatcacttaggtcttgaaggccagtaccatgtcctcctcgaattcgctgccttcgtctccttctcttcagctcttgcgtcgaccatttaccctaaatctttttatgcgtctcttgtgttctcggcctcgctcatgtttcaaggatgctggttcttgaacatggggttaatgtttttagatccaaattatgtccatataggggttgcttgagaaccacgaccgatacaccaagaagtaacaacagtactattgttgatcatagtgggctggtttgagagtctccttgtacagaaattatggcacaagcgttagcgaatcttcagtttagctggattttatcagctatattgatttttacatttgtattctctctcaaaagtttcggggaaagtcgccgtgtttcccaattgccggtcgtcaacgttagaatacgaacgtaattttcgacgaggaggtgatcgttctactgtcgtggaagcctcgacgaatccttttcgagaatatatttcgtctcgtttatattaatgttgtaatagtatagaaaatatattttgttatcggtaggtaagcttttactatttgatgtaactagcctttgattgttatgacatgtagcaacgaattatacattggttattgataaaagcgtatttccatgatattttttttaatttatatacaaggtttatactggtataacttcaataatggtaagacttatcttttgactagagaactgtataaaatgagtcttggaaaacgacatagagttaaagcaactttgtcactcttgtcagataaaaacttatcggtttctcttttccggctttaactctccactcatcactctccactctcaattttcaccttctcttctctgaacaaggcaaacaaaaatggttacaacccaaaacacgaaggccagagtcacctccgtctctcaccgccgatcacagcaagatcctgagtcgccggtgaagaagttcttcaagttggtcttaccttcaacgatgaaggataagatgatggtaattacttaacacttagaaaaaacttgaaataaagtgtttgcatgtgtgttgttatccctgtttcaatttctagggactatatctgaagattcactaaacagtgtccatttcttttgttttatcttggactagagatctaaaagggatacactaatctgatcatttgttcttaagaaatgtagagaatttaagatctgacattttgttacttgtttctgaaaatctcattatgttgaataactttgagcagaagattccgccaagattcgtgaagctacaagggtctaaactctcagaggttgttacattagagactcctgcgggtttcaagcgttccattaagctcaaacggatcggtgaagagatttggttccatgagggttggagtgagtttgcagaggctcattccatcgaggaaggccactttctcttgttcgaatacaaggagaattcgagtttccgtgtaataatcttcaatgtttcggcttgcgagaccaaatatccactggatgcagttcatatcattgacagcgacgatgatataatcgatattacaggcaaagagtttgttggaactcaaggtacaaggaagaataatcaatctgttaatggtggtgatacagagcacaaatccaagaagagatcaagagacatcgaacttgacaagattctacacggtaagaagactttgttcttaatatagattaagaagattgggatctgaatatttttaatctatgtgtagatcttgatgtgatgaatccaatgcatgtgcttaaagaagaagaagaagacaagagagtcttcaggggataacagagcttttaacagaaccgagacctgcaagtttatttgttgtgtaatgttaattaatgacttgatgaaactaaaaaactttcattgcaaaatgagtagtgttttgaatcctgacctgtaacaagctatgttaaacaaaactgtaaccaggtcttgttttgattcttctttctttcatctccttcctcagcttctctacctctacccatttccctttatgagctaacacattcgataaagcgacataatcttcgcactcagaacccgaaagcttctcgtcctctcgttctatctcgagaagagcctttccgatctcttcacccattacagtctctccataaatgctgcaggcattgcagaggcttcttaacaagatagcgtcaggctttataggcatagctaatataaactgataagcctcttgtatccgccctgccttaccaagaagatctactatgcaaccatagtgttcgataaccggtgtgacaccaaatcttgtcttcatgctcttgaacagctcgattccttcttcaacaagacctatatgacgataagccgaaagcaagctagtgaaagttatttcgtttggtttgatcccagattccgccattcggtttagaagattcggtgtttcgtttcctctaccgttgagagctagccccgttgccattgaagtccatgtaaagacatttttcactttcattagctcgaacacggagaatgcgttgttcaagcagccgcattttgagtacatgtcgacaagtgcagtaccgataaagacatcaacttcgggtgtgaacccgagcttttctatgtaaccatgaacgagagaaccaatttcgagcaaacccgtctgagaaatggctgaaagaacacaaaccatggttgtatcagtaggtctaactccactaccacagcaagagaatctcctaaacaaaaccatagcctttctcgcattgtgattgcctttatccttatgtgaacaatatccacctatcattgcgttccatgtaacagaggttctctcaggcatttcgtcaaacaccttccttgcataacgtaaatctccattcttagcgtagaaatggagtaaagtggttccaatcaattcagattcatatagaaagccaagctttttcaccatcccatgaacaattctaccaacccgtaacgccgacgacgaagctgacctagcacaagcgccaaggacgaagacaaaagtgcgctcattgagataaagcaacgaactttttgatgcataattggcaaaaatccgaatcgagtcctctggtttgctacatttaagcaatgtgttgaagagaaacttatcaggatgaccaaatcgaggaaacactagtaaatgagcaagctttgagctgctttcggttgatggctttgaacagtaatggcctatgagtttgccaaatagagaattatcatggcagccattgatgactaattgagcatggatttgcttagcttgaattagggttttcgaattctgttgcaacaaggacaaaaatcttggtcctggaaaaacagagctcataagcaccaaactctgatactgtaatggattaaggcaaagagaaggagaaacaaaagctaagagataaaataaatatcgaagaatctacagcacaaacccatcttcatcataatcatcatcatggctacaagtaccaaatttgatggagattaggtatttacagacttcttcttaaaccctaactttgtttgttctactcaaacaatttgagttccactcaagaggttatatataatgaggtaaaaacaacttatccacatcgataacacaaagtaaacccgagagaaaaaacgagacactgacgcaataacgacacagaccagaagagagtttttttagttgtttttaaattaagatactcctacactgtaaatccctttctagtgagagctagctactaccactggattcagtcttcaacaaattatcatatcctcaagcgcatcatcacaacaaacacttgtcatactagacaaacactccaataagcttctgtcacgtgtcccttatattcctccactccactccacttttgcccatgtcattcattgcgcatctctgttttcctataacaaatctcccgtatttgagaaatctttacctcaaggtagtttgagacagatgataaaacatctaatttgctaatttcaaaaattacatggactatggtgtcgcctatgcgatgtctactgcttcattgatcaacctcaaaagctaatccgaaaattatgaacaaaattctaacaacatagaacagaaacatacagctctctctatatcatttgatcagataatctcaacgaacccacctcagattatacaaaagcaaaaaaaacactagagattctttcgctgacaatccatacgctttttaaactattgatccctccagaactgtatccgatattcacagattttgccttgattttggaaggcggaggaggatagaccggtacggatgtcggtgaaaaaaacttggaatcgttatcgtgttggccaggtggtttttttttttttacacgtcagcatatttggccggtcctacttatctaaagtacagtaataatgtcatacacgtcagcgtaaactgatagatcttccttggacaaaatctacttccgataatgttgattcccttctgtctgaattctctctagtgtaaaaaatattctcttgaatccttggttttccatagcgtgtgtgtattgatttacaaatatagaatctacagaaaacaagattgagggtgcaaaaatgaaaatatattcagaattgagggagcaatttgttacatttcctctttccagtctatgtatatatctcgcaagaggaaagctgaagaaaagcaaaaccctagaaaataaataatattccgtggcgcctgcggcagagatcaatgacgataccggatctctgtaacgatttggtcgatgagatactctgtcgcgttccggcgaggaatctgaaacggttacgatctaccagcaaacgatggaaccgtttattcaaagatgataggagattcgcaagagagcacatgcataaagccccaaaggagtatctacctctcatgttgacaagcgagtacaggatctgtccggtgagcatcaatctccaaggagatgttccttctgtagtgttaaagagagagcttagcctaccagatccggattattcacatcaattcgatataggtcgagtctttcactgcgacggcttattggtatgcaaccacgtaggcaagaatccccgatacggatctaaaatcgtggtttggaacccgctgactggtcaaaccaggtggatcgaagccggctatcgttggaaggaatacgaagtcagatttgttctcggatactgctaccagcaagacgagaacaattcctgcagtaaaaaaatctacaaaattttgtgtttttatcctaatggccaagatacagaaatctacgagcttaactactctgataggtggacaaggacgattcctgatggtgatctcactccaggctggaccttgatatactcagagcagaccgtgtctatgaatggaaatctttacttgtttgcttcggagaaatcaaaaccccatcttggcgtgtccttgctcagatttgatttctcaacagagaaatcatctctatgtgtgactcttccctatcagcgtccaaggtatgaaattttgagtatttccgccgttagaggaggagagaatctttctctgttgttgcagctcgattttgaatctaagactgagatatgggtgacgaataagattgatgacaccaccaccaaaggagcagcagtctcttggaccaaggtcctagcatttgatttaagccctgatcttcaattattttcggaggaggtaaattttttgcttgacgaggataagaaagtcgctgtgtgttgtgagagatggttggaaccgcaagagcaccacaggtaccagtgcaggagagagtacaagatcaccgacaagatatacattctcggggaggataataaagtcgatgaagtaggttctggagagggagaggctacagattcacttgaaggaatttcgcaagttattctcaattacgctccaagtttggtccaaatcgagcaagccggaggaggcaaaacaaaaagaggtgacgactaaaacaacctctacatgtaatattagttttttgtgtttttcttaatttatttttgtcatattttttgaataatcccctgatcgagcgacctggaagtagaagaggcccttaaattttcttgttcatgttctttgaataatcctttgaactgatatctcaataagattgtaatattgtagttgtcccttgcttgatttacacacggttttcttttttttttaagttttatgatcaaaacatgtctggtacagtatatgtctagagaacaagtgttgtgtctaaaacttcaaccatttctaattcaatgacaaaagtaactcatgttcgaagctccgagtttctttttcacctaagtttcaagttgtacaaacaactagaagtcattattacccattcgcataaatctagcatatattggaccaaaacataacccacaaattatttaaaaccacagctaagcttgtggtttttttggggcatccaaagttgaaacatatcaaatgtttactcatgatactacactccttgattgtcgtttaacctagtgttatgcaaatataaacgcacgcatatcagcaagagatccatagagtttactgcagggattttgaccagcactgcatcttcctctcgtttcaattatgcatcccctgacatcagcatgacaatctaacagtcaaccacaatttagtggtgatcacatggttaagcatgtgccaattacgtaccgtaccttgtagctgtaagagcgggtgcctgcaccttgggaatctggatgttttcttatgtaatctactgcttcacctctgtatgtctgctaccacagttcccacctacaatcttatatatgcattttccttcaatactcccattttcaccagtatcctcaagcaaactgcatgaagagggtttccaattatctcagaggtgatcaaacaacaacttcatcaaattctagacgttggcttgaaggctattcttaagtttgttatctcaagttccctccttgtattccaccagaacagtttgtctttctactcaaatttgatggagattaggtatttacagacttcttcttaaaccctaactttgtttgttctactcaaacaatttgagttccactcaagaggttatatataatgaggtaaaaacaacttatccacatcgataacacaaagtaaacccgagagaaaaaacgagacactgacgcaataatgacacagaccagaagagagttttttagttgtttttaaattaagatactcctacacgacattgtacttgcaaatccagaatgatcacaccataatgctttgttcagacgtactcgttgactcgaaaggctgtcactttcaaaacgaaatctctggttctgagcagctcaaacacacagacgtctccttctcctaagttgttctctagagtgaattcgtaccatccttgactgaatttggctctcccggctttgtagagacatcgaacaggccattgtttctccgcaagctggactttgatgaacccggagatcccacttaggtacttctcagcaaacccagaaggaagatactgttgagagaaacagaaacagaaggcttcttttagagatcagtgaagacaccgataagattaagtcttcctaagatgtttttttattaccatgatgcaacctctgtatagataggatggtcgcagaaccactctgaagaaagggtttgttggttcgaacgttttggctgcattgatggctctctctctttcttctgcagtcacggttctctttctcgcagaagcactctcgtagaactttgaacggttctctggatcatcatctcgcggagctgatgagtttatttcctctgtaaggacaatatcaaaaggatatatgtatcatgaggaagaatctgtgaatcctctgaaaacgagtctgaagcatttcaaagaggaaaagtgcttaccaggatcagcatttttcttcttcctccctctctttttaggtatttttggggttggcgttggctcttcagctggagataaggaaaatatcaagcatcaacctcaaaagaatgataagacgcgtaatcagcgatagataaagggaatcagttggttataaatatcacctttaactggtccagtgaacaaggtttggatggctgaactagcataccctttgttggctggtactgtagactcaggaagtggtgatgggtacacagaagaaggaaagatgacctcggcatcttcatcttcaaggtcttcaaacaaacgggcgcgtttgaagtggttgtgagcggaatccatgagaccggtggaatggtaattgatctcagagtgggataaattgaaaatgtagacgctgaaggcagagtttccttcatatctaaaaatcaaaagataaccaatgcgaatggagtaacggtcaacaaactcttgccaaccatcttgaaaccaaattttgttgtcagctttccttagtcctacacgccaaacatgaccatcaggtactgtgagtgcaacagcaaccgaaagctcatccttgaatttactcacaaacttatctgggaccctctgcacaagcatgccggtatgagatataaagaagcatataatgatataaatgtccacaatatctataagaacagcacagaatattgcgagaacatcaaatcgaaacagacatttttcagcaaaaacatccaataaacacagtagctgaagaaacgacggctttacctaatttaaaaacacaaaccaaaaggccatatttcagtttagagaaggcatcaacaaggagacacagtccattagtacacatgtaaaatggtacatttatctctgaatagattgattacacgactcctatgatcttatcacattaataatttgcaaacttggttccacataaatgcctgtgttaatcgaaatcattattccagagaaaatctagtcacttaaatgccaaatggagagctaagcaaatttggatttgttcaaaacaatgctcttgggggaatctgtacaagtgatgactaatcactgtatcaaataaagtagacaactttaaaacataagcacaatacatagagaccttcaaaacaagtcaactactcagttttagggattcactcacaagccacacaatactcaataaggagtctaagatctcagacattcctaagtcaaacagagaaaacagtcaaaatagagtaaacaaaacagacatttataatagagaaaccataaacagatctcaactttttctcctcagaagaaatttgatcaatctgacagaatcaaatcgtcctccaaaagtcaaatcactcaaaaaaaaaaaaaaaattcccaaactacacacaatatgctgtcagagtacagatataccatcaaatacccaatttcccaccaaacacaaccaatgaccaaaagaaactgtcttgcagacttccattggaaacccacaaattctcatttgaccaataagacaacacaaagttcaaaaatggaacttcttttcattacccaaaacagggaagagtaagaagataaaagcacaaccttgactcgattcttacaaagaatcaatacaagtgaattgtaagaaatcaagcaagagtgtcacaaggcataatcttacaaactcgttcaccagattccaaaccttgaaaaccctcaatttcgcacaaaatcaaaactttgaaagatgaggagaaggagaacagagagagagagagagagagagagtaagttaccagacgtttttcttggatagtggatgagaaaatcaacttatggaagaaagggcgtggcatgttcagacacaacagtgacgaagtaagaaaaaatagaagaagaagaagaagaagagaagaccagagagtcagatcatgaaacgacgacggagaataaaaggacaaagagactaagagagaagaagaaccctttcagatctgaaggagttttgttgtgttaaaaaagttcattagattttagtcaaaggggttacaacacaacaatctctcttttctttctttcttttttacacacctgacctgaagagtgacccaaccaaacccaagaagatgaaaaaattaaaaaaaaaaaaaaaaaaccaacttgtcataaaacgaagctcgagcgagttgaatctgtgttagctcggtagactcgttgagtcgaatcggtaggtcactcgtgtggtttcttttattaactaatcaaaagccgaccgcccccacctactcccctttttcgaccatctttttttttcttaacaaatatttcttttttgtaacacgcaatatctcagaaaatatattattgccttataacaacaaatatatttgatactgttatatatacgtccttatttgcaaacagatcataccgttccggaaaatctcaattttatttagaacatataaaaacacttgtaaactagtgtaccgtgaagcctatagacaaatataggtggaaaggaaaacaaaactggtctccaaaagaaaagtcttatcataaactcatgcccacagtattaatggtatgtatatacttagagaatgacaagttaaaacatgtatagagaaatccaaatacaacatgtataatcgattgcaacatgtacgtatattcatggctacctcacatgcataaagttttatgtatttcttgtataaatctagctacagttaatagttatacttaagaataaatagcctatgcatacacacttaaatccaaaaagaagtttaacctctctaatgtatgtttagtatactattatttctccttagaatattggaacttgacttgtagttaattagtttgggctaaccgttggccatcattggtcataacattatgtttaaatggattccaatttatagtcagagagccttggttctgtcttctgacagtatccttatgagctgtaagaaaataaaggggtaaacgtaaacattcctcttttcaccagttcgcgtgcattttagaaattcttgatgcctaattaaaaattacaaagcaacaaactcgctgatttttaaaaatagaatccaaaagtagatccaatatcgcatgcatgtccaaaagcattttattcaagcataatgaaggaaattgcatcgtaattcatacataaattattcaacggtatgaaaatgtagatagaatcatagaaaagcaaaacatgtgtgtatatatgtatcacagtagaaaaaataatttgaataatcaagctctgaagtgattaatatgaatgtaacgtatcgtcaatttgaagtttgttgaaacacattagctagtattctttgtatctaagcaggttttgtcggtttataaacttcctctaatggcttaatcttggcttcttgtgacgggctgaagaagaatgatattgaaaatctcatttgaataactcattaacttgtatgtttaccaccactctgtgcttgtgtattcgtgggttaagttggtgttttagaagatttgttaaatctttgaaccgtggcaagttgaaggcaatcacgtgatttgtttggatgtatattttgtcttttgacaacgcatttatcaacttttcagatcggtttattatttaggattaacaaatgtaaaacactgatatatatacactaatgataaatatttgatgagaatttttcttaaatcccaattcgaattttaaacatgtgaaattaagaactatcgcatttatcaacattaggtcagtctacgtatatttggaaatgaaaaatgacgaagatcgcaaatgacacaacattctgatgaccgtttattttaaacataaacatgtaaaatctcgcgtgcattttgggaaatatgaacttggctaacttatataaaaagaacgaatagaaatcaacataaggtttaattataatgtgattaactaagccttgaagtgatcaatctggatattctcaacctcgagtttcttgaaatcacttctgtttcttgaaacaaagaactttccccaattgtactttttataacaaggcgggttttcctcacttataagctcctccaatggctcaatattggcttcatgtgatgggaagaagaagaatggtattgagaatctctctttgcttgtattcacgaccactctatgttcagcactccaatactcatcatttgtccacacctactccacaaaatcttattttcattcatcaactctaatataatacatcgaagatatattgacatgcaacttcgttcattgctaattggttttgagccgaaagtctacgtttacctgaatacaattgcccatgttaatgatcaaagcatccgagatcggtttcacggggatccattgtccatccgatctacgactcacttgtaatccacctacactatcttgggccaggacggttaaagctcctccatctttgtgacgtccaacacctaatgctagctcggggttcgggcaaggagggtaatggttaaaccgcaaaaaactagtttgctcattgaagaaaccggttagccgatcaccaggtagacccaaactaatggagacaagttccaatagcctaaaagctaacttctcaacttctcttgcatattcttggcatacctctctaccaatacacatgataaaaaaaaatcactttcaggataataaaatgaaattctaataaggcccaatgggcctaaactctcgatctcgtgattgaacgcaccaatcaataattcagtgagtgagagagaatcaagaaaatggtcacctgaaatgagaagggttttgaggccactggttcgtgagctttcggagctcagtatcttccggctccggtgacgccggaacgatcgtggaatcttgtaagaagaaatcgaaaatttccttccaatctctaacgttcttagtgtgttcttcgtcgtgataacccataggattcacttcgtctcttttcactttcctcttctcctccgtcgttagattgaaaaactcagcagctgtcttctctacacgatgccttaaagctgaaggcaagccatggttgatcacttgaaaaaatccccatctcttgcatgcctctgcaatctccttggcgatcgcagtcttgtcatgatgagtatcttcgagagaagagaggtcgatggtcgggatctcgtcggagaaaatgaaatcaccggagtttgtgaggtgagtgttgggtctgtgttctggagcttggataaaagcttcgtcgagttctcccatggcagttttggcagtgattcttgtggttattttttagagtaggctttggagatatcgatgattagtggtgcggttggtgttgctttataggataatgccacgtaagtagagtagaatttaatttctccctgaaataaaatgaatctatactaatttatgcaaaccactataggttattttttcctttggtctttatcgtagttcagctaaatgtcatttagggtcttcctattgttagacgtaaacatcacaatttgtttcgagtcaaatcaaataagttccttctaatagctcgaagggctgctctcttgcatattcttggcataccaacctatctataaacttgaggttaacaatcaaataaacttgaggttaacaagattcttatcaaactcaatgggcctttgttaaggcctttttagatgttcttgagaaattcttatctgaacaataatttttgattgtttttttcaagtttgatggaagaatcaaatttgcacaaagaaaaaggaagaatcaaatgaagaacacctgaaataatcacaatcgtcggatctccaaatttacatgtagggtgaagaatatagacctagtaactaggtaaaatacttattacttgtgaattctatacatgattaataaaaatttgaactctaaatccaacttcccacacgtgaacactgaacagagggtccacacttacattgttacatttaatttaagtggctcattaagtctactcactacacatcacatatgctataacgaatactcaaaaccaattaattttcaaaggaaatcgaattttgatgcaaatgatttgttcagggttttgcagcaaattcagctaagaaaattcttcaaaattagttaaagattttttctgtagtaaaaaatgcagaagtatgataaactaagccagggaaaaaaataactagaattgagcatgtataacatttaacaacaatatctaaaattaggacatagagaaatacaatttgcaaagatagctcagtggtcaagagaggaggaccacaagacgattttatctttgaatctggacgcaatcttatgtgtggtgccgaaattgaaatacattagtcaattctttaaaatgaagacattttatttgtttattctcttctaacggcctatatcgaccagagggatgtgcttaggacactaataattggtagtttggtactccaatattcaaaagtaatcaaatttattctttccgacacaaattaagtcccacacacattatttgattaatatcatagcttggtaaacaaaaaaaaagccgatacatagtatattaagttttaactttgaagtcatcgatttggatgttttcgatttccagttttcgaaaatcgcttctattcctactgacgtagaacttaccccatttatagcctttgtattttggagggttttcaggactcacaagttcttctaatggcttcacttccacatcgtgtgaaggcaacaagaagaatggtatcgagtatctctctcttgttgtgttcaccaccactctatgttcagcactccaatacttgtcattcgtccatatctacattatcatatttatgatatagtaatactcattaattatgaaagaatcttttaatgttatgtataacaaaagaatatgacataagttcaaggatattattacctccatacaattgcctatattgatgacaagagcattagggacgggtctaatcggaaaccaaacaccgtccgatctacgactaacttgtaatcctccaacatcatcttgagccaatagactaataacgtcggcatctttgtggtgaccaacacctaaagctaggtcaggtcttggacatggtggataacgatttatcctgaaaaaactcatttgttctttgaagtagtcatgaaaacgctcttttggcaagcctaagcttaacgaaatcagttccaagagcttgaacgctaatttttcagcgtgtctcgcatatacttcacatgcttccctaataataaattagaaccaaaaataaaattagctaacataactgaaaataaaaataatttcacctacacacatgtgtaacctatcatatacagtggtgggtgcagcgctggaagataggattcacgtgactccagtagatttgatcaaacatgtgaattgataaagtttctatttattgtctaaatatagaaagtatagaaaactaaagattaagaaggaaaaacatgtttaaggtcttggtattgtttgattatgaaaaatatacaagaaatcccccctaatccaataatttctcagatttcagggttttacacaaccctcaaatcatcttctaaagcagatccattcgttgtttgtcatataaacacaaatgtatatatatctaattaagagaaagtacctgaaatcagaaggagattgaggccacttgttgtaaacaagtcttaagccttcatcttcaggatcagtggttgaaggaatgaccattggatctttgaaataaatatcaaacacttctttccaatctttaacgttcttggtgtgttctccatcatgataccctacaggattcacatcgtctctcttcacctttatcttctcttccataggcaaatcgaaaaacatcttcacagtcttctccacacgttgccttgcgtcagaaggcacaccatgattaagcacctgaaaaaatccccatttttcacaagcatcaccgatctctgagataacgttttggacatcttcggggtcatcgaggcgcgagagatcaatcacgggtatttcttctggttggttagggatgaaattcgaatctgatctatgctctggtgcttggatgtaggttggatcaagatcctccattgcttgacgtaaaaagagtttggaggaagaaaaaaagtcaatagagctacttttatgctgtgtttggactttggatggatatctacaacgaaaatgtgctaattatatacaccactactttttttaagtaatatattattaggatacataaatcgattttgttttgtttttatatgcatatgtttttgttaatgatataagatactaaaactacaacgttttcttcgacgaccgctcaaagtaccgagacttttcctcgttgaatgatttttaaaacgagtaataataattaagccggtcagaggatctgtcggggtcgggtcatgaagtaattaacactcttattaaaaaaaaaaacacctattgaaaatatagtaaaattacagtcgaagtttgtattaggaataagaccatagaaactaaatcaatattgaaagttgaactaaatcatcaatatttgtttattagctgaacactattcttattttaatcttgaacatagatggagtttagctattacctattactgtacttctattccaaactaaggaatcgttttggatattaacctatttgaccatgatattaagtattaacaaacgatttggttacttgaccatgatatgaacaaacgatttggttaactagtcggaaaatattttaagcttaggttaaagtagtccaacatctaagtattgatgttagtctacatagtagcattttggtacctttttcagaggattgttccgatcagcccatcgggcaaagaaaatatctattcgaagatggtgattgatgagtcgaaatattgaaagttgaaaatgtgatagttgccaataaagaccagaaataaaagtataggtttttgcttaaggaaaacgaaaaataaatcaacgatctaagtcacgttgacgttgaccactaaataaactaaaatatttcaattctcaattaaggatttttctaagatgtcaaaataaagttgaaaatttctgttgatattaaaaacagtgcgaaaatatgaatggatatttatactttgaacattgaacaattttttttttatttttgtaaaagacaatttttgagagaagtagacacaaagaatgtgatgaatttacactataaaagtataaaacttagaattacagatatgttaatggttaattttgaaaatattcacttctaaaaatcatctacttacagattacaaatggtcaaattataaatgtatctttttttttgtttgttacaaattgcgttaaccggaaaaatgttggaccaaaatgtaaaatattaaaaatgtatggttcagtagcctgggaacatcggtggtggtggcgatgcatattggtgtccaatgtttggtgggaggatgaaattatcgccgtcgtcgttgtcttccgatggtggtgcagttacatctggtgatggatttgaagatggcggtgatgacgaaggggtggcttctgattgttttggtgcttcaacttctggttcgcttgatggtactggtgcttcaacttctggctcggaatctggtgatggagctggacttgatttgaacactggtgaatgatttgaatctgatggtgcttcgatgtcctcagagtctggggtcggagcttgaaccggtgttgagatttctcctgattctgatgatgaaggtgttggagcgtttgccattggcgatgttgctggtggtagaggcgttacaggtttcggtggcggtgagaaaactggaggaggaggagagtagataggtgacggaggtggtggagagtggactggtggtggtggagaatggactggaggcggcggggagtgaactggaggaggcggtgagtgaacaggaggaggtggtgagtggactggtggcggtggtggagagtggaccggtggaggcggggagtggactggtggaggaggaggtgagtagattggtgcaggcggtggtggagagaaaactggtggtggtggaggtgactggaccggtggaggaggagagtggactggtggaggaggagagtggactggtggtggtggtgaatggaccggtggaggaggagaatggactggtggtggtggtgaatgtactggtggtggaggagagtggactggtggtggtggaggagagtgtactggaggtggtggtgagtaaaccggtggtggaggagaatgcatcggaggaggaggtgaaaatacaggcggcggtggggaatgaaccggtggtggtggtggtggagagtgtactggaggagattgtggcgacgttgtctttgtctcttctgtcgagggtgatggtggttgaggacgacgttttttaatcggagatgcatcgtaaggatcatttggtaccggtgattccaatggaggcgaccccatttttggtgcctctgtctttggtggttgttcttgctttggtggttgaggcttaggtgactcctctggttttggggtctcttgctttggtggttgaggcttaggtgactcctctggttttggtgtctcttgctttggtggttgaggcttaggtgactcctctggttttggtgtctcttgctttggtggttgaggcttaggtgactcctctggttttggaggttccggtttaggagattcttctggttttggtggctcttgcttagacgactcttgttttggtgactcaggcttaggttttggctgttctggttttggtgcctcttgcttaggcgactcttgttttggtgactcaggcttaggttttggctgttccgtttttggagattcctgttttggtgactctggcttaggttcctttgggttagaaggctcatgtgatggtgtctcaggctttggactaggctgttgtggtttgggagattcttctggttttggcttagatggctcttctaagtttggtgggtttatttctttcttaggctccggtgcctttggtgttggtgttggttttggtgatgggtttgaaccaccgccacctccaccggcacacttgtctttactgcaatccacaggacggctaaccaccggcaaacattctttagccgacttctggtttggtctgttctgtaagcaattgctcgtgtcatcaaactgtttctcttggctcgatccaggcacacaactttgagcttctccattgaagaaattgtaagaaaatgtgaagtttgacaatttgggcaacttgcagatattgtctgtgacaaatccggtgaacttattgtacgagaaatccatttgttccacgttggctaagcccgacaaggtcgatggcaaacttccgacgaacccattgctgctagcatcaaacacagtcacattgttcaacgaaccgatttcgttcggtaagcaaccacttaggttgttcccaataaacacaatctcgttgaggttcttcatctggccaatggtttttgggatgcaaccgctaaatttattgtgtgcgaaggttacaacggaagctgttgatttaccaattgtctcggggatggtcgactcaaatctattgttgttcaagaagatggcgtcgagatctttatcaaagatctctggtggtagtttcccttcaaaatcattgtatcttatgtcaaggaatttcaaagacggccaagaaagagcaactgtcggaaacggaccaacgaaacggttattgctgacgtcgaattcatacattaacgttagcttcgaaagacttttcggaataactccgcaaaacctgttggaattaacgtgaaacaaggcgacatcggtcaataaacctagctcaggcggcaagtatccggctatatccgcatggttaaggtcaatccccgccacaaccaatacgcttgggtcgtcaagtgctggtgcacagaaaactcctttgtaagaacacacgtctggaccaacccaattagccgcagtgttgaacggatcagagtagaatgcctttttccaagcttgaagggcaatgtaagcccttttaagtctgttattagcaaatttgaggtctaaatcgacttcgtactcgatgtcgtcgggaagatctccgttttctgataatgccaaaagttggcgtcttgtaagaaaagaagcttcctcatcggtgagagccgctgcggaatagaaaaaaatggagatggtgaaacaaaagaggagaaggaagcagccaaaaggcttctccattgttcttcgggtcatggtgatgaaaaaacttggaaatggctctatggcttgcttaatagatgaatgttgtggagaggaagcctataatgaaacgaaggcaaacagaaaccattggattgttttgctatttttggtataacaaaatttatatagactaacgtttaaagggtacgaaaatagcaaactattgtagctaatttagaattagaggtcgttgacaacgtctttacaagtttagtttagttttaccattgttgaaatttggacgaccaatattttttacagtctggaaaaaaaaagtaaaaactcttttgcttagtgttgtgatttgtgaatatttcaaattttatttgacgtttgcgttttgaactctttgggaaaacagtgaaacaaattaaaacgttttcttgtaaaattgctgatactgtaggctatatttattgttgaaaattttaatttttgttaagaaaaaagactttcttagtagtatagtatttgaagaaaattttcaaaggattaaattaagaaaatgattccaactagtatatctgtttttataatcacttttaagaatgatcaaataatgtttttgtgatattaactgttcaatatgtcaacacctcgttatttagtttctactatataattgttttgaacattcgttcatcacaagctcgcaataaagtgaaaagaaaaaatggtgagcaaaacaaatagttacttaacctcaattcttgttatattgatcagccgatactaccgtcctatctccgccacgccacaacccgcaacatggccgggcccattttgtgatggttcatggagcttggtttttggtataaactataccattcttgaaatctcaaggccataacgtaactgcggtcaacttagcggcatccagaatcgatcaataacggcctgagactctacggttggttgcggagtctattgggcccttgatgggcctaatggagagtctaggtgaggatgagaaggtgattcttctggcacatagtttgagtggggcttgctattcctaaggccatggagttgttctacaaaaaggttcatatggctattttcgttattggtgaaagagtttcagcactggatgatcaagaacaaccctcctaaccacgtggagcatatccagaattctgatcatatggtcacgatttcaaggccgttagatcttggtgcctgtattttttctttggctaagaagtttgcttgaaaaatattgattttcaacattttgttagtgacacaataaaaaagtcaacattttgttatataagaatgtacgaaagaaaacatggtttgtaaggcctaagctgttttccaagtttttttttatatggttgatcattgatcaattccattcatatgtttcacgagccacactttttatacgtctattactttgccatatgtttgacttttcaacttcagctaatcctagtagattgtttcacaaaactaatcaaactacaaaacttagttgaccactttaattagcatgaggttatggaccctgagaagatttaaatgaaagcgattccagtttagattcgatgatttttttgtttttttttcatctgagacctgaattcgtttcaagaacatcaaatccagttctaagagtttaacacatatatatatatttttttaagaaaccaattaacttacttcacacctcatgacctcaagatgatttatgagtataattgtttctccataaaaagtgcttatttcttttcgtctataacttttttgctaaaatcgtctataactttgattatgttttccaatcttacgtaccttgcaaagaatggacatgttttgaagttgcaaaccgttcaaatctgtgattaatttgttcaatagatcttaaagaaaattaaaagcagttaatacacaagaattatataaacgtccacggttttgattcatctgtaaactcttcattatgttttggttatactttatacacaaataaacaatatccaaaacgccacaaggcacgggaactactaactttaatgaggccaaaaccaaaaaaaaataaaaaactaagaagctcatcacatgaatccaacaagaggaatgggaacggcggcgtaattattccggcgaccaccgtgaactgctggaagagacggtggaggcttacggaaagcttcttctactgattcagccacggtggtgacgaaaacaacagcaattttcaccaattcgatgcaaatctctagcttttgagacaccatgttgtttgtgcttaattcgtaggaagagaaatgtttttcttttcttcttgtttcgtgttttgcgctttttaggtttttttctttctatgttttccgcgtctagagaactcttgtctttgtgagtcgtcttacttgcaaaagccagagttatatatttatacagacaatcatcaatcagtgttcacttttttttttttttatgattggattattataatttaataattggttggttgatatgccatgtggcatttcactcgctaccaattttttctgggaagatgcttcgttgttgtcctttggtttatacaaagagctagccaatattatttgggggcatttctttacatacatgtgtaaaaaatgttcgcctaacgtcgcatgtaggtgcatgcgtgtatatatatgtatgtatgtataagtttgtttgttgtatatatgtactttatcgtagatccgagcatgcaaagtaaggttttacgtacgattaaatagaataacaaatatttaaattggataaaaaagtgaaaatatttaagtaaaaccaggatgtatatagctaaattgatagtctaatataacgatcgtaacttttcaagatcttttcctagaaaatcttttttttctttctggagtctagaaatgatttattatttcaatctacgaatcatatataaagagatattgtaaggtattcaagtctataatccacgtggaaacgtttgttaattatgatataaatacgttttagttaggaaatgatatctctatcatttacacggtttggttgaatcaaatggatgaggatgaaaaatttggaccaataggacacgaagacaataggaccatttgatgttgttttgattgaatatttaatgaatactttttgatcaacttgcgggatcttatacttgttaatttcctatgttcccctttgcagtgtaacgctgactaagaccttcattagtatatacatacatatacatcaaatgatgtaagttgatactttataatgaggaatcaaatgattcacaatatttaaaatcaaaaagtgttgatcataaagtgcatgagataatgattattaattagttttattctcgaatgattggtagttgtttattacataaagtcgaatctagatgtcactatatttttcgatatttgcaaatatggctaattgctgaaacaatgtgatcttcctaatgaaatcatactgattactgaccccaaatgaagaaaactatcacaaagtctaaaaccatttaaacgattaatttcactctaattcgatttcttttatgaatttagctagaataactctaaaatataaactcaaaacaatgaacaaaataggtgaccctaaaaaaaacttgggggttttaaactaaaatttccaagataggggtgaatatctaattcttcttaattcgtgggattggaatgaaaatcagtagagtgatagatgtgacgtagcaccaaacggtccaaacccaaaaaaatttgcataattaagaaattaagtagtgcatattgttgcgacttgcaagtagcatctcaaccattctttctttaactttattaagctttaaggcttagcttaattaaacaaaacaccaaaattagctaaccatatgttctaagagcccatggaaattatgccacgtgtcttcgtcggagttgttgaagtccctcctactttcatcctttttaagatcaaagtttatgtgttttgtctagtggtatatttttaaaattttagtacaaaatacaaaattttaaaagtaaccaatagataagacacagaatctcattacgagattctaacatcttcatggctttatcaaaaacatggttggccgagtgtaacaatattcactttgttctagagttaccataaaacagattaataaaacttggtgattgttttatcgaatttgaatttagaataatttccatcgccataaagtaattaaaatccttccatgttatgtaatagtgaaatacacgcacaagcgaagcaaaattaatcttccctaacaatgtttgtttagcaacttggataggagatagattatgcggaatgcgtgttatttgcatgtatatatcattgaatccgatttcatataatcatattccaaaaaaagaaagaaaaaacctctaaagtctaataatagtgtatataaaataaagattacggaaacgtaagcaaatcttatgatgcatggcgacctttaaagaccacatcttcctttttgatttttctattcttgatcagtcttatccacttattcctctaatttattttatataaaacaaacttgttataaaaagagcacgtaaaaaatgaatttaaactaatgatgactagaaattaaaaactgatgacgatcataagtatgctttaccttttggtatgttccgatccacttcaaactaatttgactatatatctatactataggtgtacaagtgtgtatatacaataagtttcaaatgcaaacatgcaattgaaaaacattaagacgtataattccatcattacataaataattacggtataatatgaaaataagaagttaagttttatgtaacgaaaatccaggatccaggcaactcttgcaaatttgtttcaaagactttgcaattttgtaaatgttcatcttgatcagataaaccagaatattaatcatatgcataaagctcctaagtatttcggtaattttacatttgtaatgcaattatagaaaaaaattatttcatcaaaaactaatttcgatattctcgtttgcaaagtgcgtaaatttcttccattaacagaaatcattaggagctacgctaaccccattttagcactctatctcaatgaatcactggaatctactatacctttctctgcttcttttaactcatctctatattcatccaacaagcgatcacatttcaccagcaactcatctgccaaaggcggtattgacaggttacgcccatcgttgtatagatgagcattgaacttgatctgccagacatcgtgtctaaattgctgtcggtcacggtactccatcctccgtaccttatcccggattgtcgagagatccattgggcatttcacaatttcaagatagttgggagcctcctttttcgtgaccggtttcaagaagaggtatgacacgtttacctctttgactctcagtgtgtccactatgctttccaagatgtttgctaggccaacctgtttgtaaatgaatagagaagaaaaaacaaagatgagtttcgcagagctattaggatcatgtatcacttggttttcatctagtttttagatttaaacttcaatgtctcctttcaatttatggcaagacaacaaaaacctacatgtgattgaataatcaattaggtaaaactgtgagttccagtttgatctcaacaacggtccggatgtaaacacatgaaactatgaaagcaagcaacgtggttatagagcaataacatttaagtgaacaaaagtaaaatatggaagcaacgaggattttgacctgtcctttttttcgtcgttttggttgaggtgcatactctgtcctgttcctttcaaagtcagagacacacaggctgttgatattctgaccactttctgaagatattccatcgtttcgtcgaggaggataattttcgagtattccgcgttgcagcttctttttctgcttggcttttcgtcgtttctcttcctccctctcactccgtataacctctctgtatcttctgctctcagctatctcactgcgttcttctgatacagtactatcatcgtaagctcttctcacctttccctccctgtgcagttccgtacttatatcttgttctttccgccattttctatcatcttttggtccccagtctagaaagttctctgacaatctgagtctctgctgcctctgaaaatctgccagttctgccattctttttgttttcctggactcaaattgtggagtctcttcaagactaccgctgtcatgatcagttatctcttttaaacgtttaataacaagtttcttctgcgaatgttcttttcctgttggcggccatataacgcgatgaggcctacaagattcagcttgatctttatctatgcttaaagatggctgcggaactgaagtagtgtacctacttgaggcagcctgatctgtctctgtacttggtaagagttgtccagaaacagaaggattgtgaagctcgctctcccctctctctctactatatgcaggcatcaatgaatggaaaggactgtcagattcaaccttcgatgctttaggttttgccttacttgaaattttgagtttcctagatgtcaacttagtcccagagtctatttcagaaacagctgctacgtcagaacttcctggagttttggaagttgaatcacctactttcgtagcttcatttacagaaatttttgttgcactttttggcgcaggcttcttgttgtcgataggtgtcagccagacctcgcctgatagatctgaagaactcggttttccagtagacttcttcatatccatactttccggctgggattctgtatttcttctgtattttgggcagtgtttattggttttcatgtgtccatgctggcatgaagataatagtcaaaacgtttctttttcgaagcaagtttagatttataatctagtctaacaagcaattctacctgaccacaggctccacagacgaagttcgctcttgctgttttttttcccatgaatacctggtatggacagagcaaaaataacacctcagagtgaccatacaatttaaaaaatatagtttacacatgttgacctgatttgattgtaccttttggttttccttcagtattttcttcatctggcatataggagtgccgatctcttttacctgtttatctttgggggacttagaagttgctttatcaacctgccaatttaggaggatacaagatacaagtttgtcaacaaaaatgcaagacctaatgagttgacacagtcatcgaaaaagaaaagaataatagcgttttaaattttccaaacttatacttacgtttttggtgtgtttgacggtgctctcattcacgattaagaaagatgcatcaggttcggtggcaatatatttcttgtcaatgaaaggttcaaaattggaccgtggaggaggaaaggatccaattccctctcccacatctttcaacttctttttcttcttatcattctcatctaaataagcaccaccagtgagtgattcattaagaagaggatctttagctgatagcgcaaatgcttagttaagcttcaaagcacgtaccttgcatcagcaatcggcataactcgacatattcagcagcctcatcttcaatttcttcgtctttctcaacttgagatggccaccgtctcatcttgagtcccttcactccatccaacttttcattcatagacttattagattcttccccctccccaccatcctcagcatcaagtagatcttccagatctccaacaaaggagtccaaatcactgtttgcctcattttcactttcgttcccatcatcatcacaagctgaaagggacagacgttgcctatcccaaatctcatgacacatttctcgggcctgctgttgcaactgtaggaaagacattctctggctacgggaaaacatacctactgttgtggggccaaccttaccaccagatgcagcctgctcacttgatatcttgcgtatcatagctgttcgatgccgttgagtttgcttggcaattatctcatcaggaacattgaacttaagaagaacctataaagagatccagccaaaccatatctcacattgtcaaatttcagatggcctttagtatggtagaagtctagaagaaatgggaaaaatagtaaaaaatatgagcccttttaggttcatagacaatctgaaataaagaagcaaacctctcgagctgcttccatgcttaatctgcgaggatcagcatctgtaccagtgacagttgggactccgcgacaggctgctgcctttttcttcttatgttcggatgcagctgatgattttggtgcaactcggacgtagctgaatcctagaccccgtccagagggatcaccaactccagtaatttccaaacgctctatattttctctgccctactcaaacccaaagaggaatatcagataaatgagcatcaaaccagcctagtaacaaaagcatgagaacttataaaactgatcaggaacgtcatattgacaggattcaaaatgactcttaacaaaactagagaaaatagagctgaaatagattctagtctttcttgcaaagaacttataatatatcaccagcgcgtatctataaatgagaacagattgatcatgcctttaatggattagggttacaacatatagataagagctcactggatttaaaattcccaatataagtgatgttcacctgagttgcacaagtaacaaaactactgctcagattccatggagttatctgcaactccctcgcaatatgtgatgcagcggcaatcctttcatctgggagctgagccaatgcagttgatatgctggcaggcaatgtaaaccgagtgatccctaaatgtttgagccggaacagcccagctagcatactctcataggaacacacctaggccaacaaaacatagaaaaccacgctcttgaaaatgatcttcccagaaaatagctctcaaaatctcactaactgtacccaaacagtacaaaacagatggcgtgtatgttaaacatgaaacaaactcgaaatcgagacttacatcctctggtgccaccagagtgttcaacccaagtggaatcttatcaaacttacgtttcttggaccagcaagccttgccatttgcatctctctgcatttttatgtccatgtcagaatgataatatgatacagaagcttgcatgatgaaatgatgatgaactgatgatgaaaaacaaagagaaagagtacgcatgcaactctaggtgccgcttatgagcaggtgagaatttgtacctctaaatcggaacaaacttgcatgtattttctgacagttgcatctgatatgttagaaaatgagaaagacagctcatcggcagcaatacggtcgcgatgcttaaactctcgatacacataggccatcattctgttcaccaaataagcatgaagattctttgatgcaggagacattatttccattcgaggttcctacggaaaatacatactcagtatgccggcagtgtgacagttaaaaatgaaagaaaaataagatgtggatgcattactaaatcacaagcatggacatatagactcattcttcaattttttttgttgagcaaaagactcattcttcaatactgtatatataagcagtaatactttctctgaacagaaattctaagagagaaatcttgcaaaacacaaacctgttgtccaacagcaactatcttgttaatacgccttagagagagctttcctttagcagaccggaccaacaaataatctgttgattgcaacctatgaggaaaaacaggtgctttgtacatgtttgtttcaacagatgactgactgcaaccaccgtgtacttccccaaggaaaggggatttgttcccatgttctagaataatcacactccctaaggtatcactttgattgcgcagcaagttcccatgttgatcctctggggatgacttctgataatacgtgcacaaatttgcacccattcctgcattgctgagcatcaacggcctctcttcacaatacctactcagattaatgaaaagtaacggtgacttatagacaaagatcaagataactacaagagccataaagtaacaaaacaaaagttccaaatttgacaggtaagtctcatatagaaattctcttactccatcaagaaaacatggccatcttgattagataggtcagatttcttcttgaaagccccaggaggtcgtaaagatttattttcgccaggaagcttttgtgcccatggccacagatgcaccttagtacgtaaaagatggacaagggaattgggttgaacattttgttcagcaagagacttttcatcctcaagttccttccccatataaaacatcttcactgcttctgtttccttaaaatctgcaacacaattgtagcaaatgagctctaagatttgcaagtgaatagtacagcatgttctccaaatagaatccatgtcataatggggtagacaaaaaatgaaaggaaaacaaacaacctagctttctagaagccttggcttttaaagaagagacagattcctctctgccgacggttagcagtgatcctttaccccccagactcttaacaacaattgtcatggaaccttgggtgggtaaaattttttgctgctttatggctagctcattgtcatgtggataccacagagctttgggccggtgaaaatttgctctctctttactgcaatgagttaaatcaaaactttttaacataaaccactaaaaaaatgtatttaaaaaatatatccagtggcaacattgagaccacacacgaatgtaacaatgaagcgtacaaatacaataagatgtaaaaattcaaatgactcacttacttgctcaatttgatcttcatcgtctgcaatttaatcgctggtgccgaatggaaaactctcaaactgtgtacggtagatttcttagcatttccttgcagtttctgagcgcttttcccattcatatagaatttgtcattagaaatattgaattgccacccagaatttgatccacagccttcttgaaaggatccgtccttggattttgaagatcgagatacaatcctagatccagcatgaagttgaagatattttctttccttattgttcggaacttcaaagatcatttgctcatcttgaagatcaaatattagtttagacctgctcaaatctttatctgactcccatattatgctatctaaccatgactcatcccacatatccctatcttgcaatgcaagtccactcaagcgcccacgagcgtcactattaagctgctttaaattctcccgtccagcatcgccattttccctataatgatcctcatcccactgagattctaatctaaggagttgtggatgatgtctacttttgttagtggactcatttgtagactgggaacctcttgagccaaaagactccaacggatttacaaaaaaaggctcgagcatgttgttattgtccccttgagtttgccctccagagttcatcacatttaagctttcttgttcagtcactgaatttgaagccctcacctgtaccattatacctgctgactcaagtccagatttgaagccctcacaacaattagcactaaattgaggagaaatttcccagagtattagatgttcccattcttgctggtctagagggaaaacttccattgttaattgagactgacagagagatgaattatcgtcttttaagtcctgcttcaacagttcacccatgatacatgaatcccttcctagcttggtaaactctctcgattctgatgtagtatcccttactatgccagattttaccagctgtgaacgctctctgattggtaagggaacatccagctgaatttgatcagtttttttcccatgagtgtcaatcctaccatggctcttcaggagtacctcctcatcgtcttcgataagctcagaaatatccatagatatgtatttgtctgtaccaaagaaggctatgatgtaagagtctcatatgataattgttttcatagaactttctcagctattctagttacattaaaagaagtgatgaattacaaacagaaaagaacaatgcagagagataacgagagaaacagagaaaataatgtatatcatttcagaagcaccaaatatacatatctactaaattcttgccaagaaaagacagagccacatacaaaaaacttctcatgctttcgacacctaatggcttttagaattgaacgggagatactgaaaatcttgagaaatcattgttgttgtagattttaacatcccaatggaaagcacaaaaaattcaaaggcttttgagaataaacaaaattaggaagccgttgcagatcacatacctctataagtgatacatctaatttctctcttctgccgtttcttctgtggctcttgtatagcaaatatctcagagaattgtaagatgaccataccatcatcttcaagatataacgtaggcagcggggtgacacgtttctcatccaaagtagcttctgataatccaaccaccaactcctgaacgtttcaatgagatcactaacagaacaaaatcattccacaacaaaaaaagatgttatctgagacaccgaaatcattcttgctgacctcctggacatctcctgtgtccatctgattcttatttcccaagatgctagcctccttttcatgctttacgggcttttcctccttcaagacaactgcgaaaataatgtttagtgtctcataatcactaacacaaaaggaatctaagaaaagttccaagagttctgatctctagtatttatgacgcactggactccaacttaacaagagattattttcccgagctaaacaagtataagtgttgagaaaactaaaccaatctgagattaatgaaatgacaaaacaaaagtagagaatagagtgtgctaatcgttttgttcaagaaacggaaatttcaaaagcaaacctggttccctctcttctgaatcaaaagatttctcaactggtacatgttccttctcttgtcctccttgttcatcataatcttcgtcgtcaaacacagaagctctggaatttaaaccactcaaagcaaatgcagctgataagtactctctttttggtagtaggtgatcttcctcagtaactacttgaagctcaggcccatcatactcttcatcattgctcccataatctacacgacatatcatcacaagtcagtgaagctgatgaccgggaattggtagtggcaaatagtttcagtttgtaactgctatgggtgggacttgttgcgtatatcaaaatctcaaacataaaaaccttctatttaattaactcaaaacgctgagcaataaattatcccacaataagtagattatgactagagcaaaactaggagaatgcaatacactaatgaagaaaccatgtaagaaactgcaaatataacctgcggaagtctcgttgtcgttggactcagacataataaaaccctcgaatgcaaagagtggcgtgacaattttgcttcccaaatagcaaaggaactactgaaaagaatcaggagcaagaacaaatccacgactcaacgaaaacctacaagggaaacataccaccatcaaattttccggtacaattagggaataacaacgttcatacccaagtaccaattttcgtcaaattttgttgtttagtaaggaaccaagaacaaaaccctcgttgatatctaaccgagacgacgacattcaacgttatgtgggattggcggtttcctaattgagagtatgtacacatttagccggaggaagtgaagcggagctcaatcgggtgattggaagatacaacggaaagaagaaatcgtctgagggatcaaagaggcgggtattaacatcggagtggtaatttatagggaaaagtttataacccgccccgattctgatttagttgtcccgggtcccatttttttttttgcacttcaaagattatgtttattaatggtccacagaatacagcccaataaaagcccatttagttacatatcccgggtccaataaagtaaataattagtcaaaaattatataattaagtaattaataattttgatggaaatttggcaagacaagtaaataaataagagtaaaagtgattttctcgcatattactcttcttctagattttggcgcttttttaaaatttacgttagaaatactaaataaaacaaacaaaacctatgccctgttcgttttcctgtcgctggatccagcgacagcgaccaacgaccagcgacagcaaccagcgacaacatatattgttcgattgtctgtcgctggactcagcgaccaattacatcaacaatcgctaataattgtcgttgtgttgttcgtttgactgtcgctataaacagtcgctatatttttttttaaaattaattatttttggtactaatttatattttaaaatcaaaatgtaaatcatatatatcatacaccatgagaaaaataaattaatagatttatttattttagttttatcaaatttaatttgactataattagtttatgttatttgaatttaatttattttaacttaatttaataagaattattttaattaaactagaactcaaacctttcttgatatcgcagagaaaaatattataaatttatttatataataatttctttaaaacaaatctaactccaaatgatgcatattctaaatttcgtagttattcaatagtatatatataactaaccggaaaaaataactgtaaatattttgacagaaaattacaatataggaaggttgcaataaaagacacaagcgagaaaaaacaaccatcaatattttttacggaaagttgcgattaaaagacacaaccgttcagagtgcaaaaagacatttattttaagtttaatttaatttaattctgtttaatttaattatttttaattattctttaatttatattttttgatcgctaaattgttcgtttgcatgtcgttggatccagcgactaaaaccagcgactaatcgctgaaatcagcgactgatcgctaaaaatttcagcgaccaaaaattgcggtcgctggtcgctggcgattgtcgttacttttgatcgctatgcaaacaaacaacttttggtcgttgtcgctggtttcagtcgtcagcgacaggcaaacgaacacagacaagcaaacgaacacaggcaaacgaacaggaccctaatttaccaaaatgaaacaaaatataattatccatgtccaaaaagaaaaagaagaacaataattgtcatatgacaaaattaaaggatatacttgttacggtgtatattgtatagtctctttatttcattcttatagtaacagacccaaaccaaaccaaatcctacgcaaaattagtctattttttttattttatctcgaactttgacataagccgctaggaaatatatattttaatcacgaggcgagataattcgaattaaaatggaccctctctagtctctactgcttttttcaatgtcttagccgtttgaatatttttgaaaaaataaaagaaaataggtttctcatttacgaaactaacctctacaagcctactttattacgtgagaaagccctttccaaattcaaattcgaacagcgcctcaaagtacaaaacataaagatgcaatctcagccgtccatttcatcttctttcttttacattcctttctccgtcctgcttcactgctcaaatcatgcgaatctagaaagagagagggagtgagagagaaagagagagagcgaactctttagaagctcgacaaattttggattttgttgctcaatttactacacaggtgagatctatttcagcctttaaacccaacgagcttcttagctttagctatggattccaagtttctaaacttatcatttctcgtgtgtcgatttcataaattttgaactgggttttgtttcagattagggtaatacaatgtcaaaggagaccaagctttcccgtagagattcagacaatcacgatgacgaaatcgagaatgttcctgaaaatctccgagcttcgcttttgtctctaaccagcaacgattcattgaagaatcctaaacacgagtgtggaagtaagattgatagaactccgtctaagcctagagcaaagaacccagatccagcattgcctttacggacgcctgataagtatcgatccgcagcggcgttttctaagaatcggtttggttggggagataagtgtgattctatcactaatacaacgaacgcggctttgttgaatacgactcctaaaactggtagagttgttgggagagcttattcggagaccaattcgactcagaatacgcctactaagagtgtatctaagcctccaggatcttgttacagagggaagttagatgggactggaactgttagagctggtggttatgcctcgttgtataaaggtttgtctagttcttctggacaagtttcaacagttgttaactcggtcgaagttcctcactttagccttaaggaagatccatctttctggatggatcacaacgtacaggtagcaatttgttcccatggtttacttttcgtttcttttggagtctttgaattgctgtactcttctcattgttcactgtccattagcttagctgcaccaagttgtgtcttttaacaacttgttttcgactttaagaagtttctgttaggcggcacacattgatggttactgaatgaattgcagattcttatacgtgtacgaccacttaatagcatggagaggagtataaatgggtacaataggtgcttaaagcaagaaagttcacaatgcgtagcatggattggaccaccagaaacacgatttcagttcgatcatgtggcgtgtgagacaattgaccaggtaagactcagaacgaaatcagaaaatttggtttccttttcttcacatatgtgaaagtatttttttgcatcctaaatttgtaggaaaccctttttcgggtagctggtctccccatggtggaaaattgcttgtctggctacaacagctgtatatttgcatatggccaggtatattactctgtgattctagagatagattatgagagtgatctactacctctgggtcaggctcaagctaaaaacactagcaagtttatttctgttaagccttgcgttttctggtgaccatggtaaagctgttttttgttttgtgatagagctgtaaagatgtcccaatttaggtaatttggtgaggacacttaattctaatatcatgtcctctttaagaaattatttgaaaatcctgacaaggttacaatcagatgggatagttaaattttcagaataggagttagtggggatagtttctttctttggccttatatttctttcagttcctaacttgcaataatttgttgggattgtgcagacaggaagtggaaagacatatacaatgcttggagaagtcggtgatttagaatttaaaccaagtcccaacagaggaatgatgcctcggatatttgagtttttatttgcaagaatacaagctgtaattctcttatgatatagcttttaccatatctattacagagatatcttaaccttgctaattgcatcttgcttcattgttcttgttgcaggaggaagagagcagaagagacgagagacttaaatacaattgcaaatgctctttccttgagatttacaatgaacaaattacagaccttcttgaaccgtcttcaacaaatttgcaggtaacttttatattcttttgttggtgaaagtccaagtagatgcgaaaggcgtagttctctaatgtgttttcactttttagcttcgagaggacattaagagcggtgtctatgtggaaaatctcactgaatgtgaagtacaaagtgttcaagacatcttagggcttatcacacaggttagtattgccgtctaccaaacagttttgtcttatgtttaatgttcctgagatcttatctgttgtacaatagggttctttgaatcgaagagtcggagcaacaaatatgaacagagaaagcagccgatcacatagtgtatttacatgcgtgattgagagcagatgggaaaaagactcaacagctaatatgcgttttgcaagactgaacttggttgatctcgctggatcagagaggtaactatagtgcgttttgcttggtattgccgtagaacctcatctaacattgtgcattctgtaacaggcagaaaacttctggcgctgagggtgaccgcctaaaagaagctgctagtatcaataaatcattatccacactagggtaatcaaggaatagtttattccctggcataactcagtatctcaactagctgttatgttaaatttgactattcgttattattgattgcagacatgtaattatggttcttgtggatgtggcaaatggtaaaccaaggcatattccatatcgtgattccaggctgacatttcttcttcaggttaaatctaaattcattggctttcttcactgaagttgatatctatcgttttatagcattataacggtaattattttatctacaggactcactgggtggcaattctaaaacaatgattattgctaatgccagtccttccgtcaggtattctttcaaagctaatttgatctagtgttacattaactcgtatagttagtaaaaaacttatcgcttctctcgtttatcactgacagttgtgcagcagagacgctcaacactcttaaatttgctcagagagcaaagctaatccagaacaatgtaagtttgcactgtaatccatattgtaagttttgagggagataaatcatgaataacctttggataactattatgtatcaaattatttaggccgtggtcaacgaagattccaacgaggatgtcctggaattacgccgtcaaatccgacttttaaaggcgtgtaacattttaaactgccgttaggtgctcgttatgtgaagctgtaataacgctaagacaattttttgtgtctgcggaacaggaagagctttccctcctcaagcgccagaacatatccagggcgttgtcatttggatcagcaacagccaacttcgcagaatcacaagtcgattcgccatcaagtgtaatgcatgagacaggacaacagcaggctggtaacttgcttgtgtatgaatctggaggctgtgtaaggatgtctagaaagcaggtatatcaacttgagaaagtatgttaggctttactgaggattcatatgcctctgtcttgggattccactaaaaatctgtatatgtttatatatcagttgaaatctttggagataacacttgctggctcattaagacgagaacatgtggctgatgcttcaattaagaagcttgaagcggagatagagcatctaaaccgtttggtaattctttttcacctacactgttcccattcccacttatgtttcagatatcgcctgaatccatttatgatcatttaactttaggttcgacaaagggaggaagatactaggagcacaaaaatgatgctcaggtttcgagaagacaagatacagaggctagaatcacttcttggcaaccatatatctgcagattcttttttgctggaagagaataacgtgttgtcagaagagattcagctgcttcaagctaaaattgataaaaatcctgaactgactcgctttgccctggaaaacataaggctactggatcaacttagaaggtgataaatcttcaaaaacatgtgatgccgacgttaaagataatgtgtgcttttttatatataaaaagttttgttattatggtacttgcagatttcaagagttttatgaggaaggtgagagagaaattctactgggcgaagtctcaaatctgcgaaaccaggtacctctagttagcacaacatcctggtatcgattcattcttcttttcgattgcaataccatccttaaccttagctattgctcatgcagctcttccagtttcttgatgaaaactctgactggcaaaaacatgttgatgatggaatagagccacaggttacatctatttacctctttctatatgttaatatctcttaatatccagcaggattgtgcttcattggttgcttgtcaataatatcttgttgtatttcgtatggcacagggtgcatcacgtatgagcaaagaaaattgttctctacaggaggaggtcgagtcactttctttctcttgtttcttgtgcatcacgtattttcaatttcattttcttaacgtcttttccattgcagttaaaaaagacctgttacgagcttgagaaatgcagaagtaaccttggttcttgcctggaagagaatgcaaagcttagtaggttagcaaatctgatttgatgattcttgggtttttcctggtatatggccaaatgagttctcattttccccataccctgatgagtcttctcgccattctcctgcagagaaatcaatgatctacaagctatggtcagcgatatcagagcttgcacacctgatgaacatagcagtgtgaacaaacaaaaggtttgaacaataagtacaatgtgatttactaatctgcccaaccatctgttttgttgtttctgcaggttaaccttgagcgtttcacttaacagttgaattttgtaaaaaaattgtaggcgctgttggggactcaaaattttgagccgcacgaaacacttgcttgtgagcaggccaattatgtcgaagaaatcatcaaactgcagcttgatctggacgtacaaaaaattatacttgatgaggaaagaacactacgtggtgatacagaggcacaagcagttcgcttaaaatttgatattgaagtgttgaaggaccaactacttttgataagcaagcagcaaaaaaatgtttatagcgagctgggggagacaaagtctgcagttgcagctctcgaatcgcagaacattatattgatccaagaagcagtggagttgaggagaataaaggagaactattttgagcttttaaaaaagcaagagcttgatatcccagcaatgaagtccaaacagtgcgatgagttcaaagataatcctgcagaggacagtgaaattgatacaaagtttaagaagatgcaagcatctcttgaaaaagctaagagattgaacatgctgtacaagagtgatatcgcttctaaggcatgtggagatgaagaaatggatgaagtttgcaagcaagctgaagctgcaactgctgaggtgattgtctgtttgcagaatgagcttgaagttcttcagaaggaggtcaatgatttccagtcaaaagaaaacgtgactgaaaagcaggtagagattttagaaactcagatggaggagctgcaggataaattacgagacacgaccatggataatgagcagttgcaagaacagctcagaggcaaagacatggaattactgatcatatcaaatgaaatggaacttctcacatctgagcttgaagaaattctgctgaatgggaatgaaggccttacagatgcgtgttaccaggctgatcttatttcgggttccttaccagataaaaggatatggatatctgaacaggttggaggattaataagaacactttctgagagggaattaatgattgaagatcttgaaagctgtttggaggatgccaataaaaagcgatgtgatatagaatccatgttgaagtctcttaaaggggcagcaatagtaatgaatgaagcgcaccagagagagttcgaggaaaaggagacagatgttctcctcctgaaatcgcagttgtgcacaaaaacagagacaatattaaggcttcaagagaagctgaagatggctgaaaggttgatttatgaagcatcagattgtgcaacagcttctctaataattgtcaaccgatattctgaggtaaccgaatcccatacttttgagttgaagcaaaaggattttcaggttgcggaatctactggaacaattctttctctgaagcaacaagtacaagatttggaagctacctgtaaggaatttagaagcaaacttctagaagaagaaaagaatgcttctgctatggaacaaaagcttgaagaaattgaggagactagcatttcagcgatgaaagagaagctttctgagctcaagggtggcgtatctgatctgagatcatgcattaccatgtgtcaagagcatgacaaatacactgaggcagagaattcactaagttctccagcccactgtagtgaaggacaggtgggctaaaactttttttatattaacgatcatgccttgttatgtatagtaatgttttagtcctttactgaaaaaaattccatacaggaacctggaaggaatgtagttgtctcctcttgcatagagaagactccaaacaacaatcatacagagtccatgagattgagcagtaaggtgtctagtgagagaggtaaagtgataatactgctaaagcaagaaatggaatctgcacttgcaagcttgaaggaggttcaagttgaaatggccaatctcaagggtgagaaggaagagctaaaggcatctgagaaaagaagcttaagcaacttgaacgatcttgctgcacagatttgcaaccttaatactgtgatgagtaatatggaagaacaatatgagcacaagatggaagtcacagatcataaacttaaggcaagtaactcgttattcttgtccctttcaaattactggatttaaaattatgatacgttattaaaaatcactagattaactgcacaaaactgagatggctcgcatactttgtacatttgctatcttcattacatcttttatgggagggagggtttcacctattctttacatctctctcagatgctataaattttctctctttttttttctgaaattattatgctattttacagactttggagcatgaaatagctaagatgaagatagaggctgaccaagaatatgtagaaaacttgtgtattcttaaaaaatttgaggaggctcaagggactattagagaagcagatatcacagtcaatgagctcgtaatagcgaacgaaaagatgagatttgacctggagaagcagaagaaaagaggaatcagcttggttggagagaaaaaagccttagttgaaaagctgcaggagctggaatccataaatgtcaaagaaaatgagaaacttgcgtaccttgagaagctattcgagtcaagtttgatgggaataggaaatcttgtcgaagagctggccactgttgtcagaaaattacaggatgaatcatctgtggccttgactggcatggccaaagatttatctgagttaaagtcttgggtttcagaaacaaactcagctagattattccttgaggatatctggtcagaaataatcatgaaggattgtgctatctcagttctgcacctatgccatatggggattttgttggaaacagttacagggatcaataccgaaaatggtttgcttcaacgtggtctgtgtgtatcaaactcttccatagccggattaagagataataatctaaggttaagaagggagctagaaatgtttgcaaatctgaagggtaaactactgactgatataaagaatggttttgaaagaatttcaagaaatgaagaagcaactaatctacttactacaaaattaagcagttttgatcagaaaatttcagggttacagtaccaggaggacctgatgttgcaaagatctaacagcatgggatctcagcttgatattttgctgaaagaaatagatttgagcaacggggaccttgcagaaactctgttggagcaagaacggcatttgaatcagaaaaatgatttctttgacactgaagttcagctttatttaatggacctttgctcaaaggatgttgagttgcttgttctggcgcaaacagcaaaagaatattcttcttgtctagcagttgtggatagagagcttcttgatcatcatgtcatcgttgaggatcttaaagagaaacttattgtttcccaggtggagggtgagctcaaagaccaatgtctggtagataacaaactggagaccgtttcagtgaaagaagagctgactgaagcacagagtaaaatcaaggttctctcatcggatcttgatcgcagtgtgcaaaaaatcgccgaaatagacgaagtaaacaaggattttggagaaagagtcatcttcttggagtctagcatcactggcctacagcaagaactggcgatgaaagcttctgaactttacagtctcgaacactcccggtcagtaactgcagaagaattggatatcaaagaaagggatgtccaagtttatgctgacattgtcagttcgttgaagaaggaaaacgtatcccttaagaacaagttcatacattttggtgaagatcaatttaaagcactagatgtcacgaggttaagcattgccaaatgctcacatctaactgaagatagcaagaaactggagaaactaaccagagatggtatggctatttctgataaaatgttgcaactgatatgtgaaaacgtcgataaggcttcagtattcgcagacactgttcaatctttgcagattgatgtacaagagttgttgtctgagaatctgaatctccacgatgagcttttgagaaaggatgatgttctaaaggggttgtcttttgacctcagcctactacaagaatctgcttccaattccagggacaagaaagatgaaacaaaggaaatcatggttcatgttgaagctttagaaaagacactagctttgaaaacctttgaactagaagatgctgtttctcacgcccaaatgcttgaagttcgactgcaagagagcaaagaaataacccgcaaccttgaagtggatactgaaaaggcaaggaagtgccaagaaaagctgtcagcggaaaataaagacattagagcggaagctgaagatctcttggcagaaaaatgctccctagaggaggaaatgatccagacaaagaaagtatcagagagcatggagatggagctctttaatctaagaaatgctctcggacaattgaatgatacagttgcgtttacccagagaaaactaaatgatgccatcgatgagagggataatctccaagatgaggttttgaatctgaaagaagaattcgggaagatgaaatctgaggctaaagaaatggaagctaggtacatagaagctcaacaggtagacaacaacacaattagatttgacaagacacgtccattttctcagtcctttttgcaatacttacttaaaatttgtttatcttcttctcacagattgctgaatcaagaaagacatatgccgacgagagagaagaagaagtgaagctattagaaggatcagttgaggaacttgagtatactatcaacgtactagaaaacaaggttaaaactaatcattttttactatgtaacagcttattttaatcgatgtgcttaattgtctgacggaggcgtatttcaataggttaacgttgtcaaagatgaagctgaaagacagcgtctgcaaagggaggagctggaaatggagcttcataccatacgccagcagatggaaagtgcaagaaatgctgatgaggaaatgaaaaggttagaaaaaattaagcaccttaaataggtatatgtttcaagcaactcatatcctttttttgtgtggtcaaagaattttagatgaaaagcatatggatcttgcgcaagctaagaagcatatagaagcgctggagagaaatacggctgaccaaaagaccgaggtaacaatatttgttattttgaacagagatggatccttaatgacagtttcaaaaaaattgatggtatatgtatgtttactctgcaacagattactcaactcagtgagcatatatcggaattaaatttgcatgcagaggctcaggctagtgaatacatgcataaggtaaagatagtttttaattgattgactacccttaaaagtttatcaaaagacttactaagagtgatccattgcaaacagttcaaggagttggaagcaatggctgagcaagtaaagccagaaatccatgtttctcaagctatagattcttcgttgagtaaaggttcagggaaacctcggggttctggctctcctttcagatgcatagggttgggaattacacaacaaatgagatctgagaaggacgaggagcttgctgctgcaaggctacgaattgaggagcttgaaactgtagtttcaacccggcagaaagaggtaactaatcgaaaatgttatctatatgctatattgaaacgtttggcatccatttggtattttcttttctaacctcgtatttctgctccccagatatttttattgaattcaaaactcgccaaggtggatagcatgacacatgatattaatcgagttttgctgggagtcaaacagaatgtgacaaattgtgcggtaagtagttatttaacttttctttttcttgacatgttgtgtagcttttacatgttttctgcttctgtaatgaaaaataaagatctatctttaatctctgtggaacctggttacattagtcattgtcttgtcacttgctgtataaaccagtaaatggtaaatgaaagtcaatgaccttttttccttctttcgctttttttttcagtcattcttggatagtcaacaagtattgaagatagcagagatgcttcaacataatagttcagattcacgagaaagggtaattttctttggatagaactgcaggaagaaatattaataagtaagtggtaataatcaaacgtatcttgcctgaaattttatgtaaataggatcttgaagtctctcatctcaagcagcaactcaatgaatacaatgagaaaaggcaagggtaagcaagtgttgcactctgtcaaaccttcaatagcagaaaatatgggttttggccaattcgagatgtttgaccataagttcgcttacaatatctcgatgcagatggatagaggaaatcgaaggaaagcagacagaattagttactgcgcagataaaactcgaggaacatcggcagtatcagcagctgcttaagaaagagaatgaattactaaaggttaaaataggcaccgtttttttattttagtgttacgcattatacaaaagtcgtgacagaccatatcttaatcttcttactttcaacagaaggagaattttagtcataaaataaaagtgatggaacttgaaggagaagtgaagaagctatcgtctcatcaaaaccctgagtggagaactcgtgatcaagctcgaatcaaggcaagaaatctctaacttctctgtgtatttatttaattactcttttttattctgatacttattttctttggtgtcatatgcaacaggaagaaaacaatgtgttgaaacttcagctagatgagctcaatttgaagttacggagagcagatgtgagtgtttctcgtgccaaagaagagcttgctttttaccgagcatcttctgtaaagaacccgcattcaaattttgacaagacgcatcagttaagtaccaaactgaaggaaaccgaagaggatagaatgcagcttgctcaggagctattaagtctctgcaccagtatcctaaaggtaagaggaacagtcatagtttttcactgtaaataaactccaaaacgtacgtcaacataatagaattctaaacatctttttgtggactgaaatttccctcaggcagcaggtgtaacaggagaagactttacagacataaaccctgaagttgctgaagaggcacttgaacagctcaagacaaaacttggtttacttgaaagtgaagtacaccactttaggttaaaggtaagaagatatagttccatttgaagcttcaatccctgtagcttatcccaaaataagtattaagagatgattgaaaaaaatcatgatgcagggaaaagcaaagagcagaagaagtaggaatcctgagagaaagatgccttcaatgccttctcctcgaagatcatggagtcagagtccaagaagtatgtctcaggttccttttttctcttctttagacaggtgaaagaacggtatgtttgtatgagaacaatcagtcagtgtatatttatgaatgtttcatgtaactgttatgcgtgattagtaaataatttttataaacaattcaacgaaacatatattacgagcacttcttcttcttcttcttcaattactaacaagagtacaaatcaaaagccagcataacaaaaggaaacattcagaaacagagcacaaattcaacacgatgatgcaaccacgcaggtcctcctttaaactatcggagaggctgatagtttaaagaatggagtcttgattttgaaacattgttgatttgggaacatcatgccaatccatcaacaatttttttactgctaagctaataaaaactgtggtgcttaatttcttttattcgtttttttccccttagattatacactttgcttagggatttttccttaggaaaaaaaataaattcaatataataatcgagtgtttaagttagatatagttattaacatgtttttatccaacaacgaaaaatcaaaacggtggcgctatgatttaggatcgggagatcttcttgttggcgaaataaaacaaatatttacattttgattttgattttctctacaaaacaaattaaatatatatattttgattttctcttcaaaattttatcaaacaaatttctctacaaagacaaatgttaaccttatgaatatacaaacaaaagtagggtttgtgtttggtgaaaaagagagagtagagagacgatagatctcgtccttcaagatggtgcattcgtatagtttagaattgttcccaattcgtcatcctcgtcctcgtccaagattttactcaccctacacgaggtattatatatgtctagtagtattttcatttttaaaatttcttttattgtgtttttgattattaattatccttccaataatattctagaacacttgcttctcctccaagccacccttcacattcaatcccaaggaggaagaattgttttgaatttctcgaagaagtcttcaaactcgaatcagtttcagaacaaatatccagaattgacgaacgaattcaggaactcgaagtgaagcagatgaaaagagatgcaggtaaaaatttatatattttttgatatctctatttgatcaattctttctattgcatgagaatcatgtctatttttttattttattttgcagtcattgccaatgtgtctaggatgataacggagttacaaatgagaaccatggaggagcgtaggaatatcgacgaggatgagaggattaccaccgaggtacttaggaatatggaagcgatgagaaaataagtctaacaactgattttacatcaatagactgtttcttatactagctacattggtatatatatattaatgattacttttgctattttatataggtcattattaatggagactcaactcctgaacaagatgtgaggatcaaacaagggtttaaaccggatttatgttttttttacttgatcaagttttatttaagaaaaaaaatagtgatttgcattaattttatcatatgcaatttttcagttatgaaaaaataaagaaagattcgtttagagtaattcagattattagagacaaaaagcacaaaagctcaaaaaagacaaagttggacggaaaaatctatatatgattaaagcaacgaaaaacaaagaaaaaatcaaacacacacattgtgtaattttttgtgtatatggaagaataaagtgaggcgatcggaatgaacatcattgatcatgctttctcaaattcttctctgatcctaaaaccaataaaatgttgtgttaacttataaatatcatccatcagtttttacattgtagtgtatcgtctctagtagagttcagcagtgatcatgatcatcactaatagttatggcgttcaattttcgttttctctaaatgtttttaagaattatcgaaggaaacaaatatatacattaaatgcttctttaaaatatataaactctgtttagaatttcagtattgaaatctaaattatagtttgtttagattttactaaagatcctagtactccaataaatacaatctttgtatttttaaataacactgatattattgatcttatccctatcattaaattcaacgacaaaagtaaactttgttgcaaaagagaagaagactataatagagagacgacagatctcgttctcaagatggtgcactcgcattacacatttgaaatccgacaggcccgttcacatttattcttaattcgtcatcctcgtccaggatactttaagaagaggtaatttctaggtttttaatgtgttttttccactctgatttaaaatcctttcttctctcccaagcttccctttgctttcaatccccaggagctggaaggattgtaatgagttcgagcaagaaatctcaaaaatcgaatcatttccggaaataatatccagaattgatgaatatgttgcacaacttaaggaggaggtggcctatctaaagataggtatttattcagagtatctatttgatcattctttctattttattctccttttttatctttatgtgtttcatattcgtgtagccaaggcgattgtcgaagagagggctaggattcgctccataaaaagagcggaggcgcgtaaggttttagaaaagtaagtttaacaattgacgactttttagagaaatttttaatgatattgacgacttagatgattaattatgatcattatcaaccgtttaatgattacttttactttaatagtttaaggcaaactctactcggggagatgaggaagaggaaggctgacgaggatctatgagaactgatgatcacataaacttcatgctacatgcaataaacgcggttaattgggttttgttttttcttcaacatcaacccgacctagctagggtattatctatatatatgggacatcttatcatctgatctgcatgtacctatttttattattataaatgcttcatatattaagaagaaaagttgtaggcttgtagcaaccgattcatagtggaaaatccttttttttttttttatgaaaatcagatcggccgcaaaaacaactttcaccatgcacgaagctagaaactgcattgatgtaccgtgtacgctgtttttaatataaaataattgcagttttattagttaggctacaaatatgaaatcaggagaaatataccaattaatgtacgtcctaattgcttggtatgttacataaccttaagttgtataatatttattaatttattttatactggagttgatagctttaaaagttgagagcaaagtaacttgagaccattttagagttagcaaagtaatggagaaaataagaaaaatcacacgcatgcagcatgatgtataattattggaaacatgtatttccaagaaagtaatcagttctctgtacgcctgaattcgattttcataaagctcacttccttggattgctagagcaaacatttatattgatatctgcgttaacatcataacatgtgggtttttagtaattctcaacagtatgggtatttttgctctctctagagagggtaaatttgtgattccatctgcaaattattcctcctatatatatatagaacgtgatgaatcaaatttcttaagttgcaagccatgactaatcttgatgagtttcttgaagagctaagttctattgaatcacattctcagaaaatcgtgaagatagatgagcatttaaaaaagttggatgaagagacgaaagaagatgaagatgaagatgcggcgaagataattcaagatcggagtaccgcgagagaagcaggttaatttcttctccttcaccttgtaatttaaagttgttcctctctcattctcaaatcttgttgggtcttggaaacgcagaaattgctctacttatggatctccgtcagaactttcttccaccaccatcgatgtcatcctcctctcttcaaccaccgtcatcgtcaactctcgcaccatcgtcatcatcctctcttcaaccacccgcaccgttgatagacttctttcggtcatcagtgtcatactctcatcaaccaccgtcatcttcaactctcgcaacatcatcgtcaccgtctcttcaaccaccgtcgatgtcatcctcctctcttcaaccacccgcatctttgagggaattctttacgtcgtcagtgtcatactctcatcagccatcttcatcttcaactctcgcaacatcttcgttctttccgtcgtcaatgccatactctgttcgacctcccgattcgtctgatcgaccatctttgagggaattctttccgtcgtcaccatcatcctctattcagccacccgaatcatcatcatctaagcgagcacggcttagtaacatctttccgtcacctttatcctcctctccgtcaccgtttgttaacccgtttctccgtccgcaggcccaagaaccaacaataccaaatttcataaacccaataccacagatctctccaggcctacctgctctattcccaaaccctaaccctaatcctaaccctaacccaatcccaaacccaatccgaaacccagacttggtgtggacaaataggcttcaactagtgtttgatgacgcagttgtcagacttgggggattattcagtatgcaactttataatttttttatttattttgtttattctttcaactcctaactattttcctaattttttttttttttttcaggtgcaacacccaaagccataaacgaactaatttctgaagagggtctcactggtgaccagatccgtagccacttacaagtcttgcgggatcgtcaaaaggctattgcagacaaattagccttggagtgaagaaaatattgaagatgagagataggattaaatagaaagagtgatagtatagaacgtttctttttcttttgttgttaatcttgcatattacaaacaattactatatcataatagaatttatgttaatgttggagttattaaaaaaaaaaaagttaaccataataacattcttactgtacgcatgagtgatcatttatcacaatctattagagcaaccccaatgggtgggatgatgacagtccctaaaaaaccaaaaaataataatattttaattttttaacatagtttgacaactaaaaaacctacacatgtacatttaatcttcaggtcccttatataagggtttttggagcccttctctcctgtgtcccttccattttaattattttttttttttttatattgtaagggaccttaagagagaccaccattgctggtgcaggctgtagaaaaatttgtttagcttctccttcttttcttaattttgacagataagtctcagcctctctccccccataagggtatgtcttgacatttagattcgttgaatcaaaagtttttcatgtttgttcatattgtggtctaatcttcttaggcagatatgacctcagggaagaaagattattatgagttgctcaaaactacaatctttaaataaatatttgggtgatgaaacttctagttcttttttttttttggtctaaaatgaaactattacttctagaagagaaatatccaactcttttttttattccaagcaaatgataaccaaaaatgcaataaaggtgttaatttttatcataaatatattctaactatggtcgtaacttgtaatggaacacctaggcattttttatttttttggtgcacacctaattcgaggaaaaaggttgaagtaatcataattacataagtttctaactatggtcgtaatcgaacacatctaaggcgtagtaataattaaggaaaaaggttgaagtagcaaaacgacgaggttacgatttgtaaattccataaatgccctctctcattttcaacctcaaagaatcgtttttggctttcatcagccgcttcgtatttttgttttcttcagtaacggaaaaaatggtttccgacttggacctcgtgacccgactccgtgagattctcggtagctccgacctgaacacggcgactccggcaagcgtccgtcgtcagttggaggcggatttcggtgtggacttgacagataaaaaagcgtatattagggatcaaatcgatacttttctcgagagcaatggcgcggtagaagacaaacctgagagtcccaaggtagaagaatacattaatgccgacgaaatcaaggcggaaattgaaggaggcgatggagaagacctcgacggagatggaagtggaagtgaggaagagaaggaagaacggtaattactcttgtaatgattgtgctttatgtgaaattggatttttgaaattcaaatatcgatgaatcagtgatcatacacacacacaaagattgagtatttataggaatctttagcatttttcaatcgaaccaatcaaaatgcttccgatgcatttctaatcaaagaccacttgtttaatgacttaagtttaagggattattgttcattgatgtgttaggccagtaaaggccaagaagcgaggtggtggcattaccaaagtatctcagttatctccacaacttgagaaagttgttggagcatctcagttaggtcgaaccgaggtaattttcatcttcttccgacaactgttctgcgaagcggaattgtactttagtcttttgtgttgtgtatatttatcaggttgtgaagaaaatgtgggcatatatccgagagaaggatttgcaagacccaaaggataggaggaagatagtgtgtgacgagttgttgcattccttgttccgtgttaagaccattaatatgtttcaaatgaacaaggcattaaccaagcatatttggcccttaggtgatggagatggtaattcttccttgtcattatacaattcagaaaactttcacatgagactgcatgatatctgtatatatatccctagtcttcctgttcagtcagtcattgatcctaaatagctagatcagctaaatatccctagtcttcctgttcagtcagtcattgtatcatgtgtctgaaatcaagtaccccactgtagagagtgatcatgtgtaattgtgtggaaatagtgttcatcaactgttaatagtgttgaatattgatattttccctcagcgtttgagttgttaggatgcttatatatttgttcaagagacctctctaatgaacatcaattttgtttagtaaaacagtattatagatttcgggttggagacagcagttcctgagtttgtgttacccaagtacaatgaaatgatttattttttccagggtgtgctaacgatgtgaaagaagaagatgaagatgaggcatcagagggaacagataagaaaggggagcagagcgaagaagtggaagagaataaggaagaagaaagtgaagagcaggaagttaggagtttgcggaaacgcaagagaaaaaagtttgttttctctttctccctcagttcttgtaattgtacagctagttatcgccaccctgtgcccataaactaagttttctctattaaataggccagccaagtcggtagagaagcccaagagaaaaggaggaggcggctttgctaaagtttgcagcctctcgccagagcttcaggcgtttactggggtgacagaattagccaggacagaggtacatgtctgactcgagggaatcagtttctcttcgttattgaactcaagctctgagcctaaatttctaagctacttgtctaattttcttaaccaagtctcttgttttgacattttgtctggtgaatggtttcaggttgtgaaattgctttggaagtacataaaggagaacaatttacaagatccgaatgataaacgctctataatatgcgacgaatcatttcgatctctgttccctgtcgagtccatcaatatgtttcaaatgaataaacagctaacaaagcacatatggcctttagaggataatgcaggtatttgatgactggaagttcttacatgttctgggagccatctttttccggtttaggctttttaaccgtatactaactgttgtttgtctctggtctaggagaatcagttagctctaagtctccaaagaatggaaagcaaaaaatggaatcagatggaggtaagaaagctagatgaatttaaacttatcccatttctcatcactgtataaacaaagcatatgcattcggtcagacacagatagtgaggaaccaaatgagaaagataaaaagcagaagaaagaagttcttgctccccttccactttcagatgctcttgtcaagttcttgggtgatggagaaaactcgctgtcgagggcggatgtggtaaagagattgtgggagtacataaatcataatgatcttcaggtatgccatttgctctctacactctgttttttcttacttacctgcttctttacaccattttcttaacttaggatccttctgacaagaggagagtcatatgcgatgagaagctgaaagaactctttgaagttgattcattcgaagacacatcagtctcaaaacttctgaccaaccacttcatcaaggccgaacaatgactctttaggaagtagccagttttccacgtaggcaaaacccagttctcctttcctggacattttttttggatcagtagaggtcggttcaggacttgtaacgcgcgacaaagccattttggatttgatttggtctcctccttcactttactggtaagttaaagactaaaaaggtatctcgattgtgagacttgtaagcattgcgttttctgaatttgcttgcaagtgcagcctttttgagttctttcaaatgtttgccctttttggtatatagtgacagaaaccaaattcaaggataatatatgttttaagaccaaaccaattgttttgatcatttcctcgttttgcatattcttagttgtacagtgaattttgttatgcatcagaatccgaaaatgttgttacaaggttttgtcgctgattgaatatgctcagcagttggtcatagcgttttgttaaatctcatataagtttaagttctctattaaagttattagtaatttacaaaactttaccatcaaaacatgtcaaagattattgcatagaatggctcatgtttcaaattctcgtgccgtgaaatgaccatgaccatttgacgaaaattgtggctttacacatgattctaccaaccaattgacaatagttcacttcaataactagaaactctaaatacctaatgatagaattagagaaagcagacaagtattcttttcaaaacagtggttgagcgcggagtccaacatttagatgtggagtctcttatggatcgttctggccgagattacatgactgagctgaattataacagcaacacattggtgtctttgaagcttgcaaacgtagggattatggatttggatcccccgcttggtgtttctcttccttgtctcaagagcatgcatcttgcagacatttcgtacgatgatggagaaactcatcgcaggttgtcctgttcttgaagactttgccttaattctgcctgatgatgagcgccacaaagctatgccttctctgcgtgtgaggtctcagactttaaagagctttctgttcgcgtttgagtttaataccactggtaaagcttttgcagttgagattgatgctccagcactcaagtgtatgactttcagtgatagtcaatctgataagattgtgttgaagaatctgaattctctttccatggtcgatatcaatagtgactttcatcttaagtatgggaaaactttgggtccaagaaagagaaacgttatccgcgattttctcattggtatctctagtgtgagacatatgatcatctctaagcttactctagaggtaatatatattcacttccatgcatacttctagcattcaaatatagtttaatgatcttccttgatgtaaatttgtttctttctttcgtgtaggtcctctttcgatattccaaattgggacggaaatttcccaaatttgataacttgactcgtttggaagctacactctctagatccatgttagaactatttccatcctttcttgagagcttcccgaacctgaaaaatctcatataggtaagaatctgtttgaatctgtgattttgttaattagtaggaagtacattaattgttggatatatattgtcaggtgctttctgatttaagagaggcaaaggaaatcaaacttagccatgtgcctcagtgtatgttattgaatctggagagtgttgagatcaatctgcagtatggtgagatcaagagagtgattatcatggaagaaaccgtgaaggaactagtgagatattttcttgagaattcagtagttctcatcaagaaactgattctgtgttttgaagatctttctaaagcaaaccaagattcagatatcttcaaggagcttcttaaattcactaagctt

SEQ ID NO: 1299 - DNA, 5840 bp, Arabidopsis thaliana
attgtgttgaagaatctgaattctctttccatggtcgatatcaatagtgactttcatcttaagtatgggaaaactttgggtccaagaaagagaaacgttatccgcgattttctcattggtatctctagtgtgagacatatgatcatctctaagcttactctagaggtaatatatattcacttccatgcatacttctagcattcaaatatagtttaatgatcttccttgatgtaaatttgtttctttctttcgtgtaggtcctctttcgatattccaaattgggacggaaatttcccaaatttgataacttgactcgtttggaagctacactctctagatccatgttagaactatttccatcctttcttgagagcttcccgaacctgaaaaatctcatataggtaagaatctgtttgaatctgtgattttgttaattagtaggaagtacattaattgttggatatatattgtcaggtgctttctgatttaagagaggcaaaggaaatcaaacttagccatgtgcctcagtgtatgttattgaatctggagagtgttgagatcaatctgcagtatggtgagatcaagagagtgattatcatggaagaaaccgtgaaggaactagtgagatattttcttgagaattcagtagttctcatcaagaaactgattctgtgttttgaagatctttctaaagcaaaccaagattcagatatcttcaaggagcttcttaaattcactaagctttacccgcgttgtcagatcattatccactgaaaatgtcattcatgaatatctacttagaaatcttttgttatgataaatatggagacatgagtaacatttgttgttttctacattttggtttaaatcattcggttatgttctctacaatgtttcaatcaaaatggcaaaatcaactaaatttgggtattaaatcgggaagtcaacaaaagtacactattgtacgattccaaacttagcaattttacggcgagtagaattgaaacattcttgcatcacaacttcttgtgattccaaacttagcaatcgggaagacaacaaaagtacaaaatcaaccctgggcttttgtcttgtttgtgattccaaacttagcaatttacagtcagcaagtaaaattaacatttttttatctattaatatgggtcgacaaataaaacatacattacatggtcaattataatgacaaaaaaaaataccaaatcagaacaaaagcaatatgaatctttatattagttctttattaatgtatattgtgtaaatttcattttatatatgtaacaaaatgtgttattacttagaaagagatagctaaataatttgagagaaaaaaaaaaaggagagttaaatacacagtcaaacgtggacgcttatttatctcgttaaaaatccatagtttgcgcgaaaaaacaaggcttcaaaagttttcccatgttttaatattattgggagagtgagaaataaccgagaagaacaaatcaaatcaatagaaaaaaagtataaacaaaattcaaaactattcagtattgatatttgtttacattgaaaaaaaaattaacttaaaaaatatagtttacacaaaaaagaaaaaccaaaaaaaaaattgttagagattttttcagagtagtgagaggaaaatggcgcagatgcagcgagaagaagtagagtccgtcacgacggagaagaaaagattagacggaggcggtggatcttccggcgctcaggcaacggcgttcaaattcaacgctcaagcgccggaatttgtaccgcgatcacataccaccgcaccagcaccgcaggtttctcctgtctccggttacttttatccttgttttcattacaacggtggttgcataggaggatgtggcggcggagtctgcggtggtggagggaccggcgttggtactcagtcgtcggattggatctacgtgggaggaggagatcctactgctcagcatcaacatgttcatgatccagcggctgcgttttacatttcgaatccggcggttcagtttccggctagtcagaactcgtcttcttcgtcgaagaatctgctttccgatgatctccgccttaagatcgtcaaacaggttttcacttttttttttttttttttttactttaatgataggtaaaatattgaaaatcattatgtcatgagatcttaagatcatatatgatttacattagcctatcaattttcataaaatagaaaacctaacttgactcacaagaaaccacttttataggttgagtaccagtttacggacatgagtctcctagccaacgagtccatttcaaagcatataagcaaagaccctgaaggttatggtaagcctaaattttttttcatttaacttgtatatgatccttgagatctctgctctgttttgcattaatatatatgtttaaaatatgatccttgagatttctgctctgttttgcatattcatatatatgtttaaaacgcagtgcccgtatcctatatcgcttcgaccaagaagatcaaggctttaacgagtaatcaccacctagtttcacttgctctacgctcctcttcaaaacttgtaagctgcttctttctttactctcgacttaccaactaaatattataagatccaagtatactgagagatctttgtgaacacaattaaggttgtgagtgaagacggcaagaaagttaagcgtacaagtcaatttactgatagagacagagaggaattgcaggtaaatttgaatatcactaaagcttcattgtatttattatcaactatatatgagttcttgttactctttactgttctgcagggccggactgtcgttgcagagaatttgccagatgatcattcttaccagaaccttgagaagatctttggagttgttggaaagtaagaaggctttttactttcattttaaacattttctctacatcaataaacaacaactctggatgcaatttgtctcagcgtcaaagcgattcgtatatgtcatcctccagaatccaactcgtctcgtccaaaaggcgatttcttgatgagcaacaaagtaagtaccaagtcctgtttctacttatcacgtcaacttaaagagcttaacatatccatcttgttttactctaaagattcacgcccttatcgagtatgacaacactgttatcgcggacaaagcagtgagtaaatctctactttcaactatcttttgatccaaggctctgtctattagtttctgagatatatagcaaatgcgatcttaccaggtagagaagctaaacgatgaaagaaactggaggaaagggcttcgtgtgaggctgcttcttagatgctcggttgatttctatattctcttcttaagtcacacatttctctctagacgttctgagattaatttcgttgatatactttgtgtgctacagccaaaatcggtgctcaagaaccgaagaaacttcgatggaatcctcatcgatgatgaactcccttcttatgaatcaggagaagactctccgcgtctccatttaaccgaatcacagcttgataacgatgttagtactgttgcttaagtcccacgaaatgtttttccatatatatatagaaactaaattttcttgctgtgcacgttagggtgatgacaacaatgttggtggactgtggggtaaagggagaggaaaaggacgaggacgatccccaagaagctacgcagtaggaggaggaggacgtagcttcgggattgggctcggagtcagcctcgggatacccagcctggggtcacacgaatcttcgtctcctaaaacagcaacaaagggaccaagaatgcctgatggaaccagaggcttcaccatgggacgtggcaaaccttccatctcactctcacctaacaatctctaaatagttacccaccacaaggactgctatttataattgatttattataatagaggtaaaagattttagagttaattaaccaaataatacatatggattggttttcctaagatgcattcaaaagaagcaaggcacatgacttgggagaagatagtgaaggcacggtgacgttttttgagggttcgttttatataacttttttcattttttgaggcaatttcttttctgtatgtttaatatgttttatttttgtgagattattatttgaataataaaggggtaatttatatagcacaagaattgcaaccctctcaactctttgttttgatttagatgagtaatggatttgaataagtgactgaaagattgggtgaaacttgaaaactaatcaattttctttctaaagaaaaactaaaaaaacatgatgaatagtttataaaaagcacaagcacaagaaaggaaataatcaggtaaaatgttactatcttcttgcatcctaactaattccagtaacttgtatctattgacattcccaaatggttttttaaccggtttgatatatattaatttttaagacatattcgacaattctttaacaaccttgaagaaggcggagtcacttattgaatccattattcatctcaatcaatataaggaagtgggttttgtttacaataattgccatttttcgattggattttgtttacaaaacccaatacttgaaaagacatttttcaatgaccttagattggattcaatgttgtgaaaaaaaaaaaaaaatggattcaatgtacaatttttttctaaaaataagtgaaaagacaaatgagtattgagataacaaaagttcttgccaaggttgtctagtaatttcataacctatggtagttgtcaaacaaactaatttatagtatcatattaattataataaatgtataatctttaattgaaacaaaacctaattttactcccaaattaatagaaaaccttcaaaggatggaaattgttggacatgtatttacatgaaaccaaacatgcaatatcagtaaaccaacttcatagtctatactaaattacgtaccgattggtagatagaaataatgataactaaactgatcttaacgattggtattggagagagattttcaaatcaagagttagtaagaaaaagaaaaaaagaacttagagatgtggatcaaatattttgaaaatgatgaaatcttattaaaaattgaaattgatatacgacctgtccagatacaatgaagttgttaggttacaacatcagcatgtttcaaaaagggtcaagcaggtacatccaatcaatttatataacgtaaatcctgattttcagagcaatattatttgtatcttttataacctccctagttaattagtaataaaatatttaatttagtagtatcacaagatggagctttaaaagttatctttaattcccacttttgaaaatgataacgtccataaatacatttcaaaacgtttttattctcccaataagatatcaaaaagacaatatcaacaacaaaaaagacaagaaaaaaagacaaaaaataatgatagataaaatacaaaagcaaaagaaaacgtatagtattgcttagagaaagaacaaacatattgtgaattaaaaagaaaaaaaaagagggacaaaagtagaaagacgtggcaaaaagcaaactaaatttcgaccaatccacatctaaaatctaaccttcttcatcagatggaaggaagctacttcaccacccgcagattctgccatgtggcttctctctcttctacagctcacttcttctctctctgtctctctctaactacattgaaaccaaaccagagtgcttcaatgtcattgctgtgattctctttaagtccagacataactcccatatcttcttcttctgtctttttttatttctttgaacc

SEQ ID NO: 1300 - DNA, 23377 bp, Arabidopsis thaliana
tcagcaagagcttcaagcaaatcaagcttcctcggctctggaagctggtacaaaaaggatttgttaaatactaagatgaccaaaaaaactcacttctaaagtaacgatatagattgcccaagctctggaaaaattggaaaaatgtcagaaaacggctaaaagaagaaagccatgcaaaaaaacaaacaaggagaactacatgtggctaatgatgattggcctaaccttattgatcaaatcggataatgtgtcctgctgaaataatgacataaaagtctcatgcacagcttcatgctgctcctgttgatctatttgcatgcatcatataacttcgagtcagatggtgaaaacaaaataggtaaatcaaagctaaacgactaaaaatctcagaattaccaatggctagacactgtactaggacatcaattatcttagatacaagctcaggtgcatctttgcagaacagtggaagcttgcggatggcttgaactcgtacctacaaataagaagaacatgataagttttcaaggaaagaacaatatcacacaaccaagaaactgagaattgtgcagaatcaggctgtatcctcttggaaataagaaaaaattggccccgattccagtctcctttcaaagtcatgtgtcactccaaaacaaacagttaagaacaacacacacagatttttttaaaaaaaaacttcttttgattctgctgtttgaaagagaatccagcttatctatcctaagtgaaactaagtttgagcactgaagttcccttgtggatacacaagcgcaactaaatctaccatgtccttgtagataattagcctatgtgaaaaagactatgtacataccgtaagattcacatccactgcctcgattatatctttgtacgcatcaaaagcttggtttgagtgactggtgtagaactggaagtaccgaggaatcagatccgctccaagctccttggtctcgatgctcgtcttggagaactcgataatccctaaataatctttaagattctgcaatttaagaggaactgtattgtcatataaacacagaaaacatcgaatctctttgggattgttactctgacctaaacaaagatgaataacacaataacacagaatttcccgtacagaaaacacaacctgagacttttctgtagactctctaagtcgcttctcaaaatctttaagcttctccatgtgattccgagaagaagatgaaatcgaaaaaatcaaagcaaatgcgtttgaagaaatcactgttctctcactccaaacgaagtaggaagaggaatgacccttgaaaaaaaaagaaagtaattaacgtctatcttgattcgggtcgggtttgggtcggatatttcgggttcaggtttttcgggtatagaaatttaagatccgttcggataatttaatatttcgggcgagttcgtggttcgggtttatttatatattgatgtaatttaatatttcgggcgagttcgtggttcgggtttatttatatattgatctatcaaaattttgtatgtaaatctattaaattatttgaaaattttaaaaaattctaaaataacacgagttgttttacttgaatatttaaaaatacataaaattaactaaaatatccaaaaaaattctaatattttctatatataagtataaatataactaatatatacttatatttgagatatgtttggatatctattcgggttcggatttttcaggttttgaagtttagacccgttcgggtattttaaaagtttgggttcggatcggatcgggtttttcgggtcgggttcggatttgttcttcgggttcgggtattatgcccaggcctacttaatttttgctcaggaagggcaaaccttctgaatcatttagtagttttgctttactcttttagattcgccacctaagcttaaaattactctttttggcattttgataagttctaggccttggcaaaaatatcggaccaaaaacccgaaccgaaactgacccgaaaaaactgctacggggtggatacgaagtgttagctatttatcctattgtgtcttgaattatcgtacatgtatatataggataaaactggatacaaacctgatatccaaatggatacccgcttacccgaaattacatatacttatataaaagtttattttatcgaaatacatttatatccaaatatccaagaataagtacgaaaaattaaatgtatttgtatttaaatacttaagatgaaatatttatatatgcaagatacttataagtgttttggatttttgaaaaaaatttcgtttattcgggtaaaatttggttatttgtgtaaatttttgggtaactgggtaaaattttgggtatttaggtataaaatactcgaacctaaaggatatctgattttttcaggtatttaatgattctgaaattctatatctgaactgatccaaacccaattgaatccaaagtaaaaccgaaccaatattttagatttactttattggatcctaaacttttttacccgaaaaacttatatccgatcgggttttacccgaatccgacccgaatgcccagtcctaggactacgttcaatgaatcagctgtttacagcaaacgcttcgaagtgaacgggaaactttccctccttgaacttaaaaatctagatagttctatagcaaagctgaagcatacctgtgaacaaatcccggcccttgggccaagcccgtgaatatctatatcagatatgagatttgggttgagaaggcccaacagaagccaataaatgaattcattccgtcggatgaatataatacgtataacgcctgaataaatctttcagacctgcgtcgacggttcgctgccgccgaaatttccgatcaaccttaataaggaatatgacgtctctgtcggtaaatgatcggaaggattttgtagatgggcagatgaagtactggcgtcaaatagccgaatccgatgtacgttcttctttcatttttatgatctaatttcgtctagtttttttttggtagcaaacctataattaactgagatgagagattgattgcttagggtttcgatatcgatgatgttccagtaccaagaggaaccagagctggactgtggtctgtcgactgtaaacacccacgttttaggcttagggcttgtttacccaagatttatgctatggttggtcttcaccgttacaatttgctcagggtaaagcttaattagtcccctcttgctacttacttgttaaatttcttgctacttgtttaatcagtctcatcttgcttgctacttagttgttcaataatattaatttatacaacaacaacattcaatttcattctcaggggacaaacttcgagcaccttgagttactaaaatacaacgagtcaatgaactgtgtgtgctcttactatataacttcggttgcagtagatctttctagccagttgcagaaaacttttcagattcgagttgatgaaaaaagttttggagatttggatttgacggtctctgttgctagacctaatgatgaagagaaaggtgacttccttattgttcattgtttttttagtataaaatctttgactgattgattcttattgatgttgcgtagtgaccaccgagaagcgtttcatacatcactttcattgtgaagcagctgcggatgatttctacaaaggtgcattgcctgattggccgtcagttggtgatctgaataatcaaaaacgattttacatggtaagattatttaagacattgatcatcgtttcttttggtttgctctagatcagttaagcagtgatctgtttttattgttgctttttgtaggtgaagaaatgcgagttgcaatccaatgattggatccgtctatatttggaacttgcagttggtgtacgttatcagcagacttcagaggtttttgtgtctcttttgcaaaacaatgacatacaatgatcagtgccattgttgttaacaataattaacaggtttggtttgcttcaaactgttgctgcatgcagagtgatctgtccaagttgcaggttctgaaagtggcaatagaaactaaggaagaagatgtgcagccaccgaataggagactcaagtccaaaagtctacatgtctacataacgtttaagggcttggccaaggctcctattggtgatgagattggtgagcatgttgaacgcaaagctatagttcgaagagtcattgatgagcgttcaggacacttgacgcttctcggtgggttttccaatgcgaaaaatgatttgaatcagtcctctgacgatgagcagccttttggaaagcgacgtcgcatatagctgagatgataaactaaagttatcgtgttaagtgcatttgtttctgtggggtgtttttgtaagtctactgtttctgaatacaatgaagttaatttatcttatgaatatactgtgactgtgtgcgcaaattaatagggagctatttttaacttcgcttagaacatcaagggacttgtatgtcactaaatccttttgactttttcatttttgctttgaagttcccttaattgaatcaatttgtctggttgttcttgacgaagatgagagtgtaacagactgtttgtttttgtttcttgtacaattgaatatcagattatatagaacacaaacactatgctacatttgatcttctttaaccttgttagatctaaatgtattaaaagtcaaatttgcttccgtaaatttatgtatatgtggaaatcttaagtcaaattctcaagttaatgtatcattgtactgagaatgtctcctttgtaatctcataacactagacgagtttaagtttgttgttttgtttctcctacatgaaaagaatatacaatccatcttctttatgactatatatatatatatatatatatgtctttacttaactcctccaaagtaaaacagagacacaaactgcttctatcatgaaaagcaggggaacaaatttatcttgcttcctcgctagaaatctctccatcagaatcaaataaagagactcgatcaggaaggcttccttcagcacagagtgtgtccaggtgctgaaaaaaatctctaattttaaccttcaaaattctgtggctcgttcaagctctttctattttctaggctacaataaaaagtccataatcaacaatactgactgaaatcagaaacaaaaactcacaaatgatacatagtcgctcgaataacacttgaatgaataaggggaaaagaaaagaaaaaaacaaatgtcaccgagggacaaaccttgtacctttccagccttcttacgaatatgcatcaattagttttttctcctagttaattaatccggtttagaaagtttctttttgattcttgtgtactcattacccttctctaacttctccaggtgcggaactagcagcaaccaaagatgatgtagcagcttctttatatatctgagccctcttgtgacttgaaaatagcatcctttcctccaagcctctttgaactcgtggctgcatccaagaccggtggctttcaaattctccacggcaatgaagaccaatgacaagttcatttggcatgtcactccctccctgcatgtgatgttttgccttgttcagatacgttgtaaatagttggattaacctcttctccacattctccatttatctgctccaaacctgatcccctattactcttagttacccgtttacttacctctatgcattttctttatccagctatgtttgttctgctttccacgaagatatgcactcaggcgtttctagatcagcaaggttaaatacttgatcagattcttaaacctgtatccaacgtattaactgaacaaatgagaagcaaaatatgtaaaacagaatcgttaccaactggttaaagatcagaatcaatatgagtaagcaaacccaagaaaacgccaatctagctaaaacgaggtgggattgggacagtcgttactcgttagaaagccaaaagcaagaaaattacaatttacaagaaccctaattacaagaatttagtggatgtatttggtgggttttctttaacaaacttacaatatacatctacttaattctaacacgtctttgttacgtaaactttctttttgtttataaaattgttacgtaaatttgacaacctatgcatgacaataccttttctttttctatgacatcattatggaccagacagacgaatatatttaacaaggtttcgattcttctttgtttatgtttattgaatctcccattcaagtcatttcgccgtcaagatcttgaacaaggtctcgctccaatatcccgctcggtctagttcaccaatgtcagccctctcacctggcggagttgatcaatatttagatttcactgcacttttttcttctataggcataaaccaatctagactctctttttttcgaataaaaaaaaaaaatcgtctaataaaaattaaataatggtccgaaaaagaaaaaaaaattaaaagtattttacattagttttcaaatgtgttaaacatctataaacaaaaattcattatttaaaaaaaaaactcggtcgcactatacataaaaacatatttagaaaagaaaaacaaataattttaacaagatagaaacaaaaaaatttgcttgactcactttgttttccaaacacaaataaaaatttcacattacaactatatgtgtgcactaattaatggggagaaattcttcttggttttatctatgtacgtaagatcatcaaaggagttacaagaattgtgttaagctttatgttgctctctccaaataaaaagacgattctttgaatgcaatgaaggaaagcggttgatttagatgattagtgaaaaaaaaattggtttgattgatgcgaattcgagtggttcaatattatgcttagaggaaattattagatttagtgcaactattacattacatgtatcattaactcttaacgttttttctgtataagaaatactgaaaagtcatttgaacacctacttgtaattgtttggatgcctacttgatttagtagctgacttattgggttccctatcagaatctaagtccactatatatgtttggccgtttgggtgaccaatattctttggtttcatactcgtcttataaccttttttataagtttgaagggctaatagaattctacgaataaaacaattaacaaaagcaaatcaaagattaattattttcttaattacaaagaccaaccacttcgtctttaagaacgaccaatattacagagataaacatggtccctcccatcgaatttatttagtacacaaatgagtcattcttaattgtacaagacaattttaattttttccttcgaccaggaaattttatatactttttaaataagtcctaccttagctgtaaccactatcacacactgaaaaagttaacgcgtatgcgtttttttttctcttctttgctcttttgaccattcgaaacgaatttcaaagacattcacgtgctccttgtccttctatttctcacgcttcaaacgttattagttatcttcagattacttattttttgtttactagtatggcttttcatttttgggatttttccatcaattagtctctagattatggtttagttattttatggataagaatatatcctctataagtactttgacaaaagaaaaatgcatcctccagaagtacatatactatattctggttaggcctcattcaaacataatcgattcgacataattagagtcgggatgttactgtgctacagtgtggttgcatgcctcgaagtcataattataaacatatcggtacaagtgtaactatcaaaatcaatcgttaatcaatacttaagtaatagtaataaaaactagttgatctaagagaatattacgccattaataccttgaagactaaaaagttctcgtcacatggaatgagatagagacattgtataagttcgaaattaattgctacgtaaatattcttggaaatgtttttgttaattattttgtttgagaggagatgataacattaatattcacaggaattaaatggaggttataatgaacattcatggtttagttatttccttgcaaacgaaatatcaagatggatgttgaagccctacactactactaattgactattgacaaaatttaataattcagtttctttatttatatactttccacgtccatttaacattttttacgtgattttaaaaaataatctattatgtcctacataaaaagttgaatttcttagttttattagaaactacattttcttattttaattacgggtaaaaagttttttttttaatcaaaagatatattaaaatcacaaggagtacttttcaaagttatttcacacatactaccaaattatgaacatttgtattatatcatttatgaatatatttttgttcttctcctaaaaatatagaaataaatttactatataaaattatattaaattttgaaattatatgtataaaatacaaaacaacattgttctgacacacaattttgattttaaacgatatttagttttgagtagtatagtataattataatagatcaataattccgtagtcatttggccgatgattgaatgttttttttttcgggtatcattagtaaaatagcagagtagacaaatgatcaagtaacataaacattctagctgaacatagttattggaaataattaagatgctaatacatagtttttatagattatatttttaacatgtttatcttatatataacgaaatcactttaaaaagtgatgaataatgaaaaatagtagaatcacattttgtttttaaaacgtgaaattacgtataaaaatagaataaatatttttgtaagacaatttttctcctaacagagtaacaggttgaggcttgagggtatgatatacgtaccagctatatttgtttcgttgttgttggcatcgcttttattttattcagctgatcattacttatttgaagaagcagaaaataaaagatatgaaaagtgttcccctacaaaacagaatacaaattaaatcagttcttaaaagctaccattgaatctccaaataatgttagtataatgtaagaagccaaattatattcacataatgccctaagcatgtatatgtgaggagtgtgttcaatcattattacattacagaacgaaagtgataattgcaaaacaaattacatttttaaaagatatataaacatatataaggaagagttgctatctttacgcaattggccaatgaaaacatacacaaatggttgttctgtctgtcggataaagaagaaacctctcctaagacctcttttttgttcctttctcttgaagaaacacactactcaaataataaaatttaatctctttatatctctatatccatttgtgaaataaataatatctccaattatcttctgtgtgagacatatatactttactagaatcccaaaggaactatatacttgattggaatgtttctttcctattcgcaactattgttcaatagtttgggaaacaaaatgaagaaaaatatgtatacttgccatgtgatgcgtgtattctctattaaaagtcaggacaaaaaaactcaggacttgtgaagagatatatagtcaagacttattacgagataatttaccatattagaatcaatgatctgttttaaaagatcatcaatttgcaagtatctacgtactatctagctagttagccacattcgagtttacatgataaaccttatctgccttctctttagtttggaaagcattttgagatggaaatagtggtctaagtaacacatttctttaaagatcccgacatgtagtatagggaattttgttagggtctaaaatatgatatatcaactatatatctttaaattgatagaaaacttaattataatgtgaactaagattagagaacgaatttcacaatctagaaactcattgtaaactttttaaatagtaagaacaccctgttttcttaaggtctatgattagcccaagatctatcactcttgttagtaatctagattcaaacccatgaaaatgaccatttggaaagaaaataacaaattgattaccattaacacatgaaacaatttataaaccaaccgatcagaagaagccgacatttttgtacaagaacatttatagaaatgttttgttaaacagtacaaaaaagaattgcaagataatctgtttttttttttttaatagagaaattgcaaaatgtacaaatcgaatttaggctacaggttaaaaaaagtaggttaaacagtcctcttcctaattaaccgctgccacttttactacttttttattttcactgtgaaaacttaacgacacactgtccttttttttattattcctgagacttaacgaaaactgttaaaaaaaatagatcgtccaccatccttaacggcgcaaaccccacaaaaacctagcgagtaccgttaaactccaacactcgccatctcagaccatccacgtgtccctcatgcgtagccaggttggaaagaatatatcaccggcgcgtgaaattgtcagaacgcgcgtggctttcctcaattggaaatttcacagacaagtagagggtaaaatagtcatttaacatcacccctgagagatcactgtcttcctctttcgctttcctcttcttaaaaaaagagttaaataaagagaagagaagagactctctcctcttcacttcgcgaactcagaaaaatcaaatctttctctctctctctctcgttgaaaacccatttctgtattgtgttgaagctacgttactactaagaagaagtgaagcaaaaacagaggtttttgaaaatggagaaaaaacaaggctttttctctgctctcagacacgaagttgtgagaggtctttcgccgtcacgatccagagcaaggtctcgttccgttagtcccgctaggtctagttcacccatgtcagctctcacttggggaagaaagaacttaactggaggaggcggtggtggtggtggcggaggttactatttagcgcaaccagagcagttaattgggagatccggaagtttgagacctgtaatggaaggtcctgatccagatgaaggaggaggaggtggtaatataggagaatctaaacgactcgggtcgggtttaggtcactgggttaaagggcagctgtctcgtgctccgtctgttgctgcgacggcggcttatcggagaaatgatctgagacttcttcttggtgtaatgggagctcctcttgctcctattcatgtctcttcctctgatcctttgcctcatcttagtatcaaaaacactccaatcgttagtctcactctctcctccttcttcttccttgtaaagttcagatttttcatcattttccttcagatttgcaagttcatgactttgaaatcttttttagtggtggttggttttattaatcgaattttctttacttgagaatgtttttcattggtcgttggttggtggaaattgatgtcatattctttggtgggatttgatttttcttacaaaccattggagtattaaaccaaagttttgatttttcttctttggtttcttcttctgagccttatttgaacactttactgtttatcatttttactgaatcttctttgttcttactatttcttgcaggaaacatcatctgctcagtatattcttcaacagtacactgcagcttctggtggtcagaagctacaaaactccattaaaaacgcttatgcgatggggaagctcaagatgattacttcagagcttgaaactgctacaagaaccgttaggaatcgaaacccatctaaggctgagactggaggttttgttctttggcagatgaatccagacatgtggtatgttgagcttgctgttgggggtagtaaggttcgtgctggctgcaatggcaagcttgtatggagacacactccttggctcggatctcatactgctaaaggacctgtcagacctctccgccgtggacttcaggtaaaagtcttgactttttaggtgttttagtagttcgagagatcaaagagatccttaagtgttttttggatgattcagggactagatccgagaacaactgctgcaatgtttgcggaagcgaagtgtataggagagaagaaggtgaatggtgaagattgcttcattttgaagttatgcactgaccctgaaacactaaaagcgaggagcgaaggaccggctgagatcattaggcatgtcctctttggctacttcagtcagaaaacagggctcttggttcacattgaggattcacatttgacccggattcaatctaacggtggagagactgttttctgggagaccacatacaactcgtccctagacgattaccgtcaggtcgaaggaatcatgattgctcactcgggacattcagttgtgacactattcagatttggggaagtggcgacgagccatacgaggacaaagatggaagaaagctggacgattgaggaagttgcgtttaacgttcctggtctgtctctcgattgctttataccaccagctgatcttaagaccggttctttaaccgaatcctgcgagtacccacaagaggaaagaggcaagaacaacacactcgcattgtctgcagctcacagggccaaagttgcagccttggagaacgggagcttggaagatcaccgcccggtttggcatactgatgtctaacgcttaaagagagagcttatgactaaaaacaacctttgaaggtagcattagccaaggatgattctcaaagatcagatgcaatgtgtttatatgccggtaactcaagctaaccccttttagcagctttatcgattaggaatcaggttcgttagcttaaccgatgatttgcgggttcaaacagaactcaaatgaatcatcctttttactcaaaatctcaggagaatgagatggagtttggatttggtttttacttaatctttcagtttgggtttatttttttaattctcaccttcaatatttttgagtaaggtgaaggcaagagaaggagaattgccctgcttttacttatatagtttctagcattttaagtgtttgtgttttaatcaaccctctaactacgaatcttgaattgttccatctttctttttcaatctatggagatatgtttggcttttttaccttttcttatcttcaaatcttttgttaatgcctttggtctctctgccatgatctaatccaataatcctcttggcaacttgtagaaaaaaagtgcagaacataatgtgaacaaaacaagaaagaagccaaagagaaaataaccaaatagtaaaatttcacattcgtcaagataatgtgaaaatggtgtatttggatttggcctttggggtttaatcaatagtaataataatgtgaacatagatattagatagactctgctcctacttgtttggcaacttatgaaagagaaagagagagagagaggaccctcgagagtcgcatacacacacacggccacatttatgactatttacactcaagatctcctttgcatggttttaacaattttcaaagatagtttgtgcaattagttatcatcaatattttgatatttctggatacgaagttgagtttttttgtgaaaggtatttattacttcttaaaccgccatcgaattactaaatacaattgaattgtgtggggataagatcttataaatgtagaagaagagggtccattttgactcttctttgaatgcttgggggactaactttctgcttttggtaaaattaatgactctttttttttttcagattacaactgtcttcgctttcctctacttttgttttgttttgtatctcctctgtactgtgtgtatgtgtataaaagtcattatacaagaggatatatatttcagaatatatgtatttattaatgttttcatgttttcaataggatttgttggataaagattaagattcatgatggtttgttgtcctttagtagtgggcacctcatgctgcaaaattcgcagtcccttcgcttataagatatgccttttttttctttctcttttcggtaaaaagtctgagcaaatgtgtttaaaaaaagtgttgaaaatatttagagaaaagcttatgttgtagggtttgtgttgaatttcttcattttggctatttggttttatcccatcacaatgaaaactattttagggacgtcattttaagtacaccataaaattaaaagagtggataccccaaaatctaattggactcaaagcatgtatggctagtccaaattttttttgattctcattagtatttcacagggtttgagaggagatttttttaaaaatatcaaggttggatcgtaaaacatatattatgatttttattattattacatatttttacaaaaaaacaagtgatcgaatcacaaagatctttacacataaatcataaatgtgcattgttaagctgacattttgggttaataagtttcatctaacttcaacatcaacagggttaaaagttgccactaacacgttttgaatttgaaccccttttttaaaaaaagtatcgcttactttgtaccaaacactttacaaaaagtcaataatattatgatccaaagtccatatagatccaaacttagagatcattgcataattaaattatgattagaatacatatattccaattagattaattgcctataagattcaagatatttacgaaaatgatgtaattaacctttagagactagtcaagtaaacatgatgataattaatacattgtttgtaagcctagcgacatgaatacaagggtcaagtgacaattcatcgattagaaataaggaactattcgcctacattgaattgatcataaaatccaaaaggcttcaagagaataaacaaacgaacgacctccaacgacgaaggagagaaggagaccatgatgttcttatatctatagataaatagtaatatacatttaatatttgatggttatgtaagaaaaatagatcaactagtttaacagtgttttccatgccattgccagattcaagttcaaaactggtttaaagaatgatatttaggctttgtggagttgtcacaagtatgtcaaagattgattctaattttgaatcgtatgacaagaatgataaacatttttttgttaaggaaaaaaacaaaggaaaataagacatattactacagatagaataataaaaaatgaattaacataagaaagaaatggaagggcacatgtgaaagaacgtgggaaggtttgagagcatatgatttgagacatggacatggtagaagctttgatgcactgtcacactattcactaagccactctgtgttttttgactgctttttactctcacctcttgtcttttatcccattatacacaccaactctttggaatctatctttttttttttaaactctcactctctctctctcccaacaaaaaataatttgttagaaccgtactctttacattttgtagatatattctaattatatcgtatctatatacttaatttatgctctaagtttaggaatacaacgtaacttatttatccaagaagagctcaattgttaaaagtggattcgtttcatagatgagaatctaattcactatcttcattttcatatctcaaatcacaagaaaggaaaatgtttgagaagaagttaacatttgagataaacatatataagaacataactgtaaacttgttaaggcactttaaaactaaacctagctttaacgccaaaataaaatgaaactaattgtcggcaaagattggtaaatgtgatggtacaaaagaaataaaggaaatgaaaagggggtgggtttcagtcattcattgatgtgaataatgccattttgaatgttgacagttctgttcttgaatttatttctatgaaagacttgtaatattacccatatctaagggcaccccaacgttgaacaatcctctttttttatctcttcattttttctggtaggagtgcccaccacctatagaataaatatacattgaatccacaaatcttacattttgattatcatattgtatagtatatagcagcaatcttaccattaaaaaagatcgatcataatttccgagccaatattgctaagatgtagcattttatcattatatagtgttaacaattcaattttgattgatattccataccatttttttttctgtagaaaactagtattgatgtaatagtgatgtcacctgaagagaagataggtcacaataatttttcttgaccgattagcttccgtcaattgagttacaaatattttgattgatatcaaatataaaaacaaaaacaaagaaacaaaagaggcatgtggtgataatcataaaaaagtccagagacatgactaactatgagtaccaacagttcatcaattggttttatgtactcaagaagtattggaattattgacacacatcttaattttatatattcggaatttgatgatttttggaagaaaaaaaatcccagaaggatttagacattaaaatccatgaaaacgagaagtgttctaaactatgacaaatacaagaccgagtttattaaggtcttgtgtattcttgttacactctgagccctgagggccgggcctttttaggtgaaagatcgggaaactgcgagttcaaacttcttacgtagctgggatttaattacgatttcaaaactatataattcatatatagatttcaaaactgtaaaaaagagagtgaaagagtctggccatacttaccatatcaatctctcaagaaaacactaatacagctaattaaaacaagtacatctagaccaatcttttaacactgtttcgtaggatctagaacaaagcagttaatagattcagcaagattcgaaacaatattacagttttcatcaaatttcataaaccaaagtaatagagagcagccagtatttggtagcaataaaaaagcagaggaatttgggatttttttacttcaaaatataagctgctttaaacaattttgatatatttatcaactttttttttttttgatatattccaatattaccttcttattttactccacttgtcccacagacaaaaatgtacttttatcgtttttttttggtaaatcaccttatagatttgttaatggttttctttttaccatgcatgcagttgaaatacgagatcacatctaagaaaaaataatattatttttacattagttattggttaaattcttttcacattagtcgctgtgtaaattacctcgcacacacacaagaccataatcacaagtgtgaagtcacaacgaatatctattgagtttgagcctcttcatccatcatatgaaaacgatcacaatgaaatgttgttgtaaacttgtacgtatccattcctcatttccttgagattatttaatatagttacatgtagtatatagtgtccccttatgacgatttcatttctcaatgaaacaatcataagataagcaataccatattaattttgtttataattaataaggaagatgatgaagatcaggatcaggtttatcaacaccgtcaacgttcctaagccaaaacgtcatgtcgaaggaggcagcaccattagggacatcttccatcaccgactcttgtcccggcggaaagaatattccggtgcgtgggtgtgggacccagctctcctcttcgccgctaaatttgagattatggtcggaaatatcttcaaagtagtcgacgatcatcgggtttgattttgcagctttgctgcttatccctgctcgcccttgaaattgcttccaactcctaaatcatcattaattatcacaaaattacatttacttctttttaaatttgttacacattttatagcttgttatagtgtgtatcaaaattttagaaaaaatctttggtaagaaacttgttttttttttaacaactgaattgtaagaaattattttatgaatttattttagctagatttgacaaaatgataactttttttttggtaaagttaaaatttccaaaataaaatatatgaagagaaaattatatctattaagcaattaacttgatgatttatgtgtatgtgggtactgtccacctatgttttgtggctaatagcatttgattaatgaaaataaaagaagaatgatgagaaaagatatggttttgaccttaacagcagctttggtgctttggcgatcccagttcttcccatcaactgtgtataagcctacgaaactcaaattgtttctaaatactttattatgttaatatggaatcagagtatttatatattgatattagtacgagtatatttctatcaatctataacttgatcttgtgttctgacatctctttggtctattctatatataaacttcagaaactgtacgggtagagaatcttgagagtggaggaataagagaagaggatagtaatttaaaagttattcatcagttgttccttgtttttttgtttggttagcttaaaagttgttacttgtagtttgaaagagtttataacgtgatcaatgtattaagagattcaacataattaggagagtggaatattatggaggtatttatttttaatgtaaatttcaacatgtttctgtttgaattttatatgatgtttcgtctatggcatttgtgaatagtttagactcgtttataaaaaaaaagaattttggtgttaaaatataaagaaaaaagttaaagagttttgactgcaaaaaagtcttcaagaatatcaaaacaaagtacaaaagtgttattgtttatttaaataaattaatgtcgattaatgagtgccattggttctaaagaagttccgaatttaatccgattatgataccggatggtgattatattggaagaagtatatatgtttcaacatcacttgtatagttgtagatgttaatgcttctacaaagaaaatcaaagctaggtaagagataaaagaaacaaaccagtacttcaaaacagttaggaaactctgatcataatcaacaaagttttagtagtacatgcatgaggtttatgctattttcttaaagctttttgatctccgacattaagaaacactgagcggagttaataagtaatcaactcaaaaaaatatgcatatcctacaaggtaaaacacaaaatcgcaagtacaaattaacttgaaggagctaaaacaccaatttgccaattatacagtgtaaagattaaggacattatgccacagttgccacttcaagggcgttatatatgctatagacaatatttcgtgtttgtcattgctactttctttaccaaaagtttgtgttaacataaactatttgagtttacattacatattaacatatacattttactatttataaaatgtcgtttcagaaatgtcttaaaatgctgttcataaaatgttttagtgtcgtggtggttccttttgttttgtttttttgcttatttacgttccaaaagtttcaccatggaactttattacaattttgtgaactgtacatacgtatgtatatgtgtataaataactaaaatttagagtacttattacttaatttggttacaacttttttaataggaatcttagaatatattccgtaatgcacattgtgcagcttcataaggaaaaatgcgaaatccaatggaagaaattagttttgaaaaaaggtgaagctgttttacgacagacaaattcaattcaactaatcctttcttttgtatattttagtaaaaagttgcgaacaaacactcaacattgatcttaattagttatatatgctacatacaattggttgttacatcttataaccaatctttatcaaagatacccaccttctgaaaaacatgcattttgtggggcttacaaagttttaagaaactattctatcctaatacgttacaatgacattttagtagttattctaatccaacgtatcatcgacccaaatccctccggactttgaacaattttgagagctatattacttatcacacccaacaaaatatgaaggaatagtggaaggcaaatatacagtatatagttttgcaagaaaaatcaaaactacaaaagttctaatccgaaactatagaaagaaacgttaattagatgcctttgttattattggtgttagaacctctcatctcaagttctcaacctcaggtgcgaatcttttcaaactttttttttgtttttccttatcatcgcttcctctcgatgcgacataaatttagaattatgctttcaatttataacctctcaagggcaaagtctagctttaactaaaaccaaaaaaaaaaaaaaaaaaaatggttcaagaaagctaaagaaacgaaaaagcataaatgatttatcatatgatttttatgttacgcttatcataaaacctataaaaatatagtcttaacattgtttttatctctcaagacaatttcctcccaaaagagctagcataaggacacatatttttgtaaagagactctacaagaacgtcaagatatacattagattctttttgtcatcattttgagcttgatgtttcgaatcacattcattacataaaatagcaagtaatgagtgatgtagccatttgtggttttaattgagtctttgccttaagtaagtaaccaaaagctgcagaaacatattatatggtaaagagtaaaaacatgactccaaaaggtccaataagcaaagagaagcagagaagatgtcgaagcaagaaacctaaagcgactgtgcaactgttttaaactcaagaattggaattagaatttgggcagaaatcaacaaaaaattgaatgaatttactcacgtttttacaaattataaccataagcaatacatgtttggacacttgactcaggtacaaaccctcctgcttctacactctttttgttctgttttctgtactataattcaaagctgaacaagacataaataaatttcattcttaattacaactgtacatgacttaccatgcgcttttaaagacttgtgcaataaattaatcacacacttttgttggtggggatcatgggagaaggctagcagcagactcatctccatgttcttcatccaactgtgactctgatgaaactcctgaaactggtcttgtttcctccgggataaatctcgcccactgcttctccttaacgagtgttaagaatgggtacaagcagaatccaagaactatgatcacaccgctgatcagaaatgtcttcggggcggccaaaaccatcacaagaatgacaagcaaagaaggaggcaggcacagcattgaaactccaaaggtgtttaagggaactctataaggtcggtgaagatccggtttcttgatccttagtttgacaaaagctgcgaactcaagaagcattcctaatgcgtacaagaaattcagaaactctatgatctcttgaaagctcatccatgacaagaatatgactcctgtagctgagcacagaatactgattgttggtgtcccatactttgacctgcaaacacaaacaacgttcaaccgagtatttttcaagggcataaccaaaaacacactcatggggattaactaactgacctctgagcaaaaaatgcagggagcatcccaatctcactcataccgagaagctgaaaagcatcactactcatttcagcttcaaacaatccaagattagacattgcagcagcagcttgtatccatcccttgagccagacacctccaataagcattccaacctcagcaaaatacccatcactccattctccagaagtggatgagcttaaagctccagtccctgccatgaggggaatcaaatatgaccccatgaccaacaaaaccgctccaaacaaagcctttggaaacgtcttcccgggtctatcaacttctcctgcaagagtactagctttgtcccaatagttcagattccaaaacatagtattgaagtagcctctccaattaatcttctgagtatcaacaaacaaccaacgcttaggcctgatattaggaaccgcaagcaaagccataacaacgaaaggacagagcgagaaaaccgcaagcacaacagctgaaaaaccaacaatatgcaatcctctatagttcaaatacgtcagtgagaatgtaatcaccaacagagcaggaacacgagctgctacatgatccaaaacagggaacgaatgtttcaagtaatcaagaaacaatacagggtataaagcattgtccataacaccactgaaccatttccaaaacccttcttggaatccccaaaatggaccaaaagctgaagagatccaaaccacgtagccaccattctcagggaagcttgtagcgagttctgctgtgaccagagcttcgggtatactccaaatcagagggaaaatcaagaagcctaaaagggctaagagaggaccaccacctgatttcacagaatcctccacaccaaaaggtccaccagaaacttcatagaagatgagaaataccagaggcaacagtgtcagctttggacttggttttggcttagagctgttttcatcgtttacgattgtctcttcttcacccatcaaacaaatatcaccgacagagagacagagagctctcggtgattctgtcaaaaacaaacaaaaagatacttttcagtagagattttggatggattcaataaaaatcaatcctttccttaagaaaacatcaaaaatttagagactttagaaagtctctgttcaaaagtcagaggaattgcaaaacagagtgtcaaattaatcaatgggtggttctgttcgagagaattaacctgtagatcgaagtgagcttggtacaatggatctctgaatggctctctctttctctgatgaacccttcaaaattggaaggagatgaaattgactggaaagattaagctgaacaagttatcatctcagattcaaagattggaaaatgacgtttgatcaaaaatatcattgtatagttgttattggcgtaggacttggacttgcattagttttgttaagtaaagacgccacatggctccaccactactaccccatcactctacgacttcgtcaacttttgcttcccttgttttcatgataaacaaatatcattagtctatacaataattaattatatttttattgtcacgtgaagtacattttcggtttagcagctcactggctccatgaagactgtccggtctaaccgaccagtcacatgcattacatcgtcgaatgttctctcttgctgttgtaaaggtcgtcgtagtactatatatgtctaatcgcctatggagccaaaggaaacaagga

SEQ ID NO: 1301 - DNA, 31522 bp, Arabidopsis thaliana
tattcacataaatttcatgaactagtttactcaaaagttttgagtcaaaacacaagatctattattaatttctattttcacattcgtttagcaactacaaaaaagtttgaaagaaaccaaaaaagtgtgagggaatattccaaatatgatatgtatgtgtactaattcgaattaagaacattaaaagaggaaaatatcagcattaaaaatctgtgatcatataatttgaaactcaaaaaataaaataaaacatcagttaaaaaaatactgtaataaacaagggtattatcgtcatttcgcaaacacgtaaggtgctgaaaattgatcttttcaaaaattgaaagttcagttggtggcaaaaacccaaagacattcaaaattgtcggataattttaaatttacaaaaaaaaaaaaaaaaactgttaattcctctcagacagagaaaaaaaaaagaaattaaaaatctgttttctctctttttcttttcttttcttcctttgttttttttttcttgtgaagcagagaaaaagttgtatcttcttcattctgtacttttttgcgattttttctccacaatcttctcagtaaaattgaaatcgctcaagcagtctcagttgctacttgagagatttatactcttttctttttgtattttcacttccaccgcattttcttaccccttttttctctcatttccggagtttatagaatcagaagtttcttctgtgggggtggatttggtgtgtctgagatctatctccagaaaaagttgaatcctttctgagaatctgaagtttttctactgaaggtgctgctgattggctttgctctaattttggaaggtatttaaagccagggtcttgaagtttataatgggtttaagttttaactcttaaatcgaacaaatttcaaatatttctgcttttgttttgtttctcttttaatgaattctgatcaaattgagaaatttcgtaccgtcttctgtttggtttgtgtgtagtgtgacataggaattagtctttgtatctctcaagatttgagctaaatttgtttgctttttgtgaatctctgattaatttttgattgttgaaactttcagcaagaaagctcttaaatgtcaaccaggcaagcaagccttagatattttggtttcttctttgtttactttcatgtgactctctttacttatctcaatctctagatatttgtattgtttactccaccaagttaaacgtttcatctgcaaagtctctagcttggtctaacattgcttatttccttgtccaattttgattggggaacttcaaaacagtgactgaagattcagaaaaagtatttcagtctatgtcctaaagtattggtccccgccattatgttcatgaaattagatagggcttttgagtggggttcttcttcaaaagcttgatggaaaccaactatagattgtcatgtatgactagattgttttattttttcttcaacatttcccatttgagcttataagtttcgttctttcttgcagcaaaatgtctcagaaggttactccattcatgcagtcacttaaatctttgccagcagactatagatttgatggttcaccagtctctgaccgccttgaaaattcttctggtgcaagtgttcgcttgaccaattcgaatgttccaagaaaaggtggcttaaggaatggtgttagtcgaactgatactgctgctggggatagtgaggattcaccatatagcgggcacggtgtttttgttgaagagcagtctttaacggatgatgtagattctggagctgctacaatgcccttgcctcagagtgatgaacgcaggtggagtgacactagtgcatatgctcgaaagaaggtattccttagatttacattttgtgattctcgaggcttgagggttttgtggtggatttcttgctaatttgagaataaacttattgcttctaaagttataagaatatgggatgaaattttgacagtttttaactttagatactgcaatcttggattcaacttccaaatggtaactgggagcttgggaagatattgtcaacttcaggggaggagtctgttatatctttgcccgaaggaaaagtaagtaactttttgtatttctaaggtagccaggttaatttttgaagtatttgatctgaaactactttcaaacttgaaacaggttataaaagtcatatcagagactctagtacctgcaaatcctgatattcttgatggagtggacgatcttatgcagcttagttacttaaatgagccatcagtgttgtacaacctcaactataggtacaaccaagacatgatatatgtaagtcttttgttgtgatatttttttttgctcatcaggataatagtctttcccctgaatctgttactatatatgttccagcatctactcttgcttggctaacctttttcctttatggtgctagacaaaagcagggccagttttggtggctgtgaatccttttaaggaggttcctttatacggaaatcgatacattgaagcatacaggaagaaatcaaatgagagtcctcatgtgtatgcaattgcagatacagcaattcgcgaaatgatacgcggtgggttcatgtttcattcttttgttaattgttgaacgttaacattgcaattctcataagctgaaaaaaatatttcaattctctcactattttatcttttccaatccagatgaagttaaccaatctatcattatcaggttagtagaactgtcctcttttatgcttagtttttgctaattttcatgcctattggatttcaaatggcactagcatgagaatacttgtttttggactaaagatgtatttgtattcatgagtccatgacctgtaaagttgcattagttgtgagacactgagactagtggatctgttgaataaagtggtgcttccagtttgtgtattttgtggtgtatccttatcacaagattctatttcttcttccagcggcgagagtggagcagggaaaactgagactgctaaaatagctatgcaatacttggctgctcttggaggcggaagcgggatcgaatatgagatacttaagactaatcccattttggaagcatttggaaatgcaaaaacattgagaaatgataattctagtcgttttgtaagcccttcatcattctgatttttgtatatttttaattatcttatgctaagtcgttgagagttttaggtcttcgtacgtctcacaatgttgttttgatattaaaatatacaggggaagctaatagagattcattttagtgaaagtggaaagatatcgggtgctcaaattcaaacctgtaagtgtaacccttacagttgtgcaacttcactttgttttttcatttctacagagctaacttagcttcttttttcttattgcatgttcttcaaattttgcagttttactagaaaaggtagcttctttggatgattttatttgcttgatttctttcctttttaaacatgattcattaacattgacattttttctttgtatgttgactcattttaacagtctagagtggtccaatgtgctgaaggggaaaggtcatatcatattttttatcaactttgtgctggggcttcacctgcacttagaggtatggttagtaataatgaaatactataaaagagtcttataaagaagattaaaagaggagaatataaagtgtttttgacagctaaaacaatcattcttctattcaaaaaaataaaataaaacaatcattctttaaaaacattcaacctaattgttgatgtcttatgttggttttaggattagcttttgatggagttggattagctttgtgtgcttaatatattgtcgctagcatctccataagtgaaaataaaattgtgtcaactatcagttcttaaagtcaattatcgtaattttcggtggtacctatgttattgtaactggtggacagttattgatttatgttctttttccccacattcatcatttgaatgcagagaagctaaatctgacaagcgcccatgagtataaatatttgggacagagtaattgttattcaattaacggagttgacgatgctgaacgttttcacactgttaaggtaattctctctttcagttagatactttcttcctcctcttctctactcatttcagacctttatttttctgtttattgatttaaaagtttctgttgttgcaggaagctctggacattgtgcatgttagtaaagaagatcaagaaagtgtatttgcaatgcttgctgcagttttatggctgggaaacgtttccttcaccgttattgacaatgaaaaccatgttgaacctgtagcagatgaaagtaagcctcttcagtccctaattagtgatgcctatattgtttgagttaaatgtttcgtgtgaacgttgattctgcatgcccactaggcttttctatgttgttgcttactgatttcttttgtatattcctgatatttcttttacgattgttatcttggaaggttttttgtttcattctcttgggtcctggtgttggaaacaagaatgtttgctgcataatatgtgtatgcatttgtgggcatgcagattcaatctggcagggagattatttacgtgctgcatttgttttttttcaggtttgtcaactgttgctaaattgattgggtgcaacatcaatgagcttacgctaactttatcgaaacgtaacatgagagttaggaatgataccattgtacagaagctaacgctaccacaggtatatgcctttaacaagattttcttacattttgttggtgtattattagacttgaagtagggtttgtagagtcaatatagagaggcaacctagtaaatgagaggttgaaatttttatgatctggtttatgtctacattcttaagtgttatattcttatttgggtccatgcttcacattaatatggaattaatgttttaaatttcgtttggcatcaagtctcacagcagacttttaattcctccgaagacgatgattgtatttttagtcccgtccttcttttactttaaattttacattttcttgatattctttttttttttttcaggccattgatgcaagagatgctttagcaaaatcaatctattcgtgcctgtttgactggctggttgaacagatcaacaaatctcttgctgtgggaaagaggcgaactggcagatctatcagtattcttgatatctacggctttgaatcatttgatgtatgttcctgttctctggctctctgagctttctcctgaaaaagattacaattgctaccagctatcattagaccttcagtttgcaatgataccaaacagtgccaaatagtagaactctatatctatgtgcttttgtgtttccatttcttgatttatgtgtcttattgatttgctatacgactttcattcctctgcagaaaaatagcttcgagcagttctgtataaattatgcaaatgagagattgcagcaacactttaaccgtcatctattcaagctggagcaagaggtaaagttgctcctttataaatgaactatacgggcacatgtattaaatatactaggtcgtgcattcacatagaactacaacctaaaagctcaactttctgtcatccaagttattaatgttctttctactgtttcaggaatatatccaggatggcattgactggacaagggttgattttgaggacaaccaaaattgtctgagtctttttgaaaaggtatataatcagaaaacaatagactaggaagcgatatggataacctaattagaagatatagagtttaactattacacactataaaaccgtagttaattggtgaaatgcttactttagtcaaacatttattttaaggcacttacgtctgttgtctgtgcagaaaccattggggctgctctcccttttggatgaggaatctacatttccgaatggcacagatttgacacttgcaaacaagctaaaacagcatctacagtctaattcatgtttcagaggagataaagggaagcttttcacagttgtgcattatgcaggagaggtaacagctcttgaactctctgtgacacaaacacagttttgcgttattcaaaaacaggaacctagtctcggtctgaatgcttcttgacagcttgctttttttcacttgcttctccgaatcaggttacatatgagacgactggatttctagagaagaatagagacttgttgcattcggattctattcaacttttgtcctcttgttcttgcctccttcctcaagcatttgcttctagcatgctgatccaatctgaaaaacccgttgtgggtcctttatacaaagcaggtggtgctgattcccagcgtttgagtgtagctactaaatttaaggtgagtgtttggccttaaactcaaacctgatgtttggctaccttactttaaagctcataacttgcatacatgtgataacaagtattctgctttaaattgttcaaagcttgttgtggtttgtgtcaagattaccaaattttgccatgcttacgctatgaaagaaaaagccaatatatcatcctctatgatatttgattattaatgaccttacctggattttttttccagagtcaactcttccaattgatgcaacgtttaggaaacactaccccacatttcattcgctgtatcaagccaaataacatccagtctcccggggtgtatgagcaagggcttgttttacagcagctaagatgttgtggggtcctagaagtggttcgaatttcacggtctggatttcctacaagaatgtctcatcagaaattttcccgaaggtgacaatgccattcatcattagtagttgtgcaagggaccgtacaagcgtttcttcataagttttaatcacattgatcatattgcagatatggttttcttctggtggagaacattgctgatagagatcctctaagtgtttcagttgcgattctccatcagtttaatatcttgccggagatgtatcaagttggctacacaaagttgtttttcagaactggccaggtataatagcttgtcggctggtgtcaaagacttttattttataaggggcaggaataagagtctcatgtgcattgcagattggggttcttgaggacacaaggaaccgtactctccacggcattttacgtgttcaaagttcttttagaggataccaagcacgctgtctcctgaaggaacttaaaaggggaatttctattctccaatcatgtataacacttttgtctcaagtcattaccctggttttgcatcttaatctcattgtaatggagatactttgagcttacctgagatatggctcgtcccacctctttttcttcagttgttcgtggagagaagataagaaaagagtttgctgagttacgaaggaggcataaggctgctgctactatacagagccaagttaaaagcaagattgctaggatacagtataagggcatagccgatgcatcagttgtgatacaatcaggtaaaagggtttattgtattgcttagatgctgcatatcttctcattaagaaaaatgcttaagcttattcaacgttgatactgaattcttataacctttttgcagcaattcgtggttggttggttagaagatgttcaggggatattggatggttaaaatctggaggtgccaaggtaaaataattgttatatatcacattcctttcttctcactgtgtctaattattttctttcatctcataaacttttgaactatttttgctttggcattaaccaactgcgcagacaaatgagttaggtgaggtgctagtgaaagcatcagtactttccgagctccaacgcagggtacttaaagcggaagctgctctgcgtgaaaaggaagaagagaacgacattcttcagcagaggcttcaacaatatgagaaccggtggtcagagtatgagacaaagatgaaatcaatggaagaaatctggcaaaagcaaatgaggtcgttgcagtccagtctttccatagcaaagaaaagcttagctgttgaggactcagcgagaaactcagatgcatctgtcaatgcgagtgatgcaacagattgggattcaagcagtaatcagttcaggagccaaacaagcaatggagtagggtcaagactacagcctatgagcgcagggctgagcgtgattgggcggttagcagaagaattcgagcagagagctcaagtgtttggtgatgatgcaaagttcttggtggaagtgaaatctggtcaggtggaagcaaacttggacccagacagagaactgaggaggctgaaacagatgtttgagacgtggaaaaaggattatggagggagattgcgggaaacgaaactgatactgagcaagctcgggagcgaagagagcagtggttcgatggagaaagtgaagaggaagtggtggggaaggagaaatagcaccaggtattgatgaaggagaagactattcttacaggcaaacttaggtcgtttgctaattaaggatttggcgggttttatctggtaaaagtagttaaatgatgttcttgagacaacctcgtatttgcctctcaatgttaaggattctgtgattatacaaacaaaaacaaatcttaatttaagtttgtaaattttgtttttctttaatataacaaaagtcacgatttggcgagttatatatatactcccatgcagaagagaaaagcttagtcacttttgtttccggtatttgaccggatttgtgaatattctcgtctatgtacgagatcaataaattccggcttggagtcggactgttcctaccgtctatgtccggttctctgtctcgctcttagcgagattcgatctctattctatctatacatcttcaccgtatttctttgtttatcttccaatttctctctgtttccccaattgatcgaggagtaatatcttcatcactctccttttgctcaaatcgtgtgagcaaagatggatcttagctacaccaaattgggtgtaactggtggtggagcttccccggattggtgttaccaagagaattttgaagcaactttatagaatcgaaccaaaagaatttcggtgctatctatctttcggattggagatcggcggaagggaaaaggatttacatcgttctaggacagatcgacggtggttagtcagaatacggcgatgtccggcaacgttaacggtgatgcttgaggagtggacgcgtgggctggagcaatatacgtcttctacacgtgtctaatactaaagcatatgtgcaacttttgtttatcttatgtttttagtgggctgttaactttgttgtaatcctctggacttaatcccttctgtaattgccaattgggcctttgaatgaaaatgaattgccgacaaaaaaaaaaaatatatatatactcccatgcttccattttttaacccaaaatttcaaaattttatatgataaaaaaaaaagtcaaattttggcttaaagatactgacattgattataaggaaagtaaaattaataaattttggcttaaagacgatgtaaaagagttgcttccagccttgacatgacgtgttatcattcttaaaatgaatgatagtaagatatttgtgtacattttttttcctcatttgtgtacattataatttgaagaatttctaaattctatttttttcgccaattttggagagtcatgtttgtcttctaataaaaaatagtaattaatatcttaaattcttagtaggatattagaataatgatacaatcagaattcgatacctttttgtgtaaattaagcgatctactaaatggctattcgattaagagagtttaggaataaaccattattacaaatccgaaacccatggagaaaatggaaacggtggtggggacaacttggcgtgatgtaaaaccaagattctctaattaaaaattttattggatatccaaatcgaatattctttttttacgttcaaaagttctttgcaccgtccacacgagttttttttccagccacaagaaaattcgtaaactgtcttcttcgaaactctagcgtgacagcgtctcaaacattcaactggtatgaatcacacacggtgttggaatatttatttttagtttggtgcataattcaatagaaatcaaatcccctatattaaaaatattaaaacagtcacaagtttatgcaaaacatctaagtatctaacacacataagaaatatatcaagataagaaaaaatgtccgtatgacagcaaataagttgtcttattttgaacccatacttaaatggtatggctttctctagttcggttctttatttgaaggcagtagtatataataaacattatcatttctgttttttttttggggtcatacaataaaaattgtgtttcttttttgccctaaaccaaaaatttcatctctcttttccctcttcccgtctctatctctctggtgagtttttcttctctcctttctccaattcgtattttctctcagattcttcaattgtacgttgattaatcttctgaaattcgattatttatcgcacccaatttatacgcggttttggattctgggggaaaaaatgagttttttggtttcggtcggtttatcattgtcttattcggtgcctcttctcccgtagaatgggaaggtcgccatcgccacgtcgtgttgcatttcttttcgggagaaatttatgccattgattttagctcttttaggctttttcttagtttttgggaaaattcttgtggtgggtcctttgcaaatctggggattcaatctctttttttttcattgttccataggtttttgaggatacaaaatttcattgttcataggtttttctcatgatttctgggggaagagaataaataattccatctataaaaatcatctttttttcattgttggaggtgggatcctcatatgattttagagatcaaataatagaagagaagagaaaagcttgtttcttttcccctttgtgtcaacatcatacgaaatcgtttcttttagtatcaagcttcaaagagatgttttgacttgaaacgattgttgtcttgcagagaagcgttttttcggtggagagaaagagagatttgactctgtcaagttattagtacattgaggtcgggctgtcaaaacttgacagcccgagtttgaagcttccaggtaatttacaccatgtccttacaatcttggactcttacacgcgttttaaacatgtgtgtttgtttatgtttgtgtgtctatacttattacaaatctatctcatcttatataacaggactctttttctattaatgagattggtatgctagatttggagtgtattggattagattgtggcgatcatgggttctttgtctgggatcattcaacggccacttgttgctgctgctgctgtgattacagcttctgtgtctgcagatgtctctgagaggttctcatctcttagatcactagttcgaggttctgaatcagagcagattgctccttcagtgtctggtttagttcaggaagaaaggtccttgtgggtttctcaagtctcggcctccaagcttgcagatttatcttttgtgtcgaggatttgtgttcctgtaccaaatgttgatctcctagcttctaatcctagctgtagtctcgctacttctgttacttctctgtccgctcttcgtagtgtttatcagtctgcagagttggctaaagcatcgaaaccggttgcattcacaatcggtgcctcacttgtggttcctgatatttcctacagatggcatttacctgagcctagtgcagtcgatatgtctggttcttcgagttgtgtgtctgaaaagaatagaactgttgtggttttgcttggatggcttggatcaaagcagaagcatctgaagaaatatgctgattggtacacttcaaagggttaccatgtcattacatttactcttccgatgaatgagattatgagttatcaagttggagggaaagcagagaagaacatcgagtcgctggttaatcacttggctgattggttggatgaagagcaaaagaaaaatctcgtctttcacaccttcagcaacaccgggtggttaacgtgagtttaatatctctgtttttttcatgtgcttacatagttacatggcggttttacattttactaagcgagtttctcatctatgcagatatggagccattttggaaaagtttcagaagcaagattcatcattgatgggaagagttaaaggttgcatagtggactcagctcctgttgctgctgcagatcctacggtaagcgatgattcttgcattcatagccatgtttatatggtcatttggcttgtgctaaatcataggcttggatacctgatttgctagacgctgatgggtgctattctttttatagatttctgcactattcgcttgaactttctggatactaatttggctttgttaaaacaggtatgggcatcaggtttctcagctgcgttcttgaagaaaagcagtgtagccactaaaggatctgcgagctcatcatatgagtcaaacggtataaacatctcccagcctaaacccgctgcaacagaaacagctttgcttttggttcttgaaaagttctttgcggtgattctaaatcttcccaaagtaaacaggtaacatacaataaaactccgcgtttcgtcactcattcttttacccaaatcctatgatttcacactaacaaatgcgggcaatcatatctcttcactcattcttgtcacccatatcctatgatttcacactaacaaatgcgtgcaatcatatttttaacaggagacttgccgatgttcttgacacattatcaacagcacaaccaagttgtccacagttatacatttacagctctgcagacagagttataccggtggaacaagttgaatcattcattgtagagcagaggaaagcaggacatgaggtccgtgcttgcaacttcatatcttcacctcatgtagaccatttccggagtaacccagaactgtatacagctgagctcaaccatttcatgaacaactttgtcctttcttgctgccaccattcttcatagcgacttccacaagtgttgttgttgctaaccatttttggggtccttttaactcttatacaagaaagagaaaaatagttactgattgatgattctttttggtttggattggtttatagattcaaattcattattcctttgtaaattgttggatattgtacatttaggagaatgaagattcaagaaagtgacgtccttgtcctttgtagtggagatttggatcttatggttgtcttttgttatttgttcaaagagggttgttaagaacccaatcataaagtttttggcaattctcataatttttagaagtatgagggatcacaatcgtatttcttatgagacgctggttcgtcaacgattgcgttttgacaaacgcaaaagtttgatttgcgttggaagcggcagagatcgatctgggatctttttttctttttgccgtatgtgtcattttgtgaaactcgaacctctcattctctctttcatctcctcctcttacgtaaccctaacgaagtcgaagattctctggtagatctatctcgattcgattcgattcctcttttttcccagaaaagtcgctattgaaatcgaacgaaagtgttgaagattttaccagtcagaggtatatatatatagagagagagttatggatttggatcaatggatttccaaggttaaagatggtcagcatctctccgaagacgagcttcagcttctctgcgaatacgtacgccttcttcttcttcttcttcttacttgatttcttctcttggtcgattaagcttcttgtgctcttctctgcttggtttgatctgtatttatataccttagtggaacgtgacttcgatctggtctgtagtgattttaggatttttctttcttttcaactatggaggcatcaattttgtagtttagataccattttatggtctcctttctcagcgattgatttatagatttgcgaagatgaatcatggtgttaaccagaagatgtttatcataatgttatacaggtgaaagagattctgattgaggagtcaaacgtacagcctgtaaacagtccagtcaccgtatgtggtgatatccatggccagtttcatgatcttatgaagctttttcagaccggaggtcatgttcccgacaccaattacatttttatggtaccgagttttcttttgtggtgtcttgtatgacatattgatatgaaattatgaatacaatcataatctggtgtgggaaattcgcagggggacttcgtggatagaggttacaacagccttgaagtcttcactattcttttacttcttaaagctaggtaaggtgctcataaatgttctggagattcctgttatcattgaatctttgcctttaagtttttttttgttcgtgcttaatacgaacttattgtttattaagcaattaatcttgataattatttatctttctttggaagaaatagtcccagtaacgtattgcattcaaaattagtccaaacgagaatgatattgtttctttagcatctcatgtttctctgttctttgtattctaatatgtagatatccagccaatattacacttttgcgcggaaatcatgaaagtaggcagctaacgcaggtatgtgttattctgttccacttatatctattattctgcttttcacgctgttcctaggaggtaagcaatgttgattatcttctcgttgttacagcagggttttgaaagttctgattttgtactacatgtggcaatgtcatgtcagatgtagacatcgatgttagctaagatgcattttatgtgaatcaagtattggaaagctaatttcagaaggtgcttcatatagtaccagtctcctttttagcatgtgtgtaatccttagtgttctagttgatacataggtttttaaggaagaaagtgtggtgataattttgtatttgaatgcattcctggcaaacctttactaagacttagtctgcaatcatacctcttaaagtgcaattcaaatatgcatttcgtgaatctgctgactagatgatcaaaattatacatggattctcgacattgaactcctttataacacagaaccatttgatttacttttttaggtgtatggtttctatgacgaatgccagaggaagtatggtaacgctaatgcgtggcgatattgcacagatgtttttgactatcttaccctgtcagctattatagatggcacagtaagtgatttcttagcaacttggcattgttgatgagaacacatatagctgtatgttatactaaaatagtttgctttgtctaggttctatgtgttcacggtggcctttccccggatgtccggacaattgatcaggttaaactctgcttttattgcttgtggctttcacccgtcaattatgcttctagcttggcatgttattaaggtcctccactcacatagatttgctgtgggctctagataagactgatcgagcgaaattgcgaaattcctcatgaagggcccttttgcgatcttatgtggagtgatcctgaagatattgaaacatgggcggttagtccacgtggagctggttggcttttcggatccagggttaccactgaggtatgtttactttctcaaaagcttgaattgatactgtaactaagaaattaatttcacatctctgatctttggttctggcttcttgtgcagtttaaccatatcaacaagctggatctagtatgccgcgcgcaccaacttgtacaagaaggtcttaagtacatgttccaagataaaggccttgtaactgtgagtgtcctgcttctaatgaattgatattttttattagtgggcgttttgaaactctgcttagtgattgttaattttgttttgtttgtgaaggtatggtctgcacctaattactgttaccgctgtgggaatgtcgcttctatattgagtttcaatgacaacatggtgagcctctcttagtctttcctaaatgaatactctaatcttctctgtcagcaagaagggattctattacttcagtgattttaatcatttcttttaagattctactctatcaaaatatgtacactcttgttgatttgctatgtgcctctttgaattaatggatctaggaagattatagaaagtaatttagagaatttaaatcaagtaagccatgtgcaatgaggtttgaatatctgtgtgagccatagattctgtttctgcatttgtagtggattttcattgaccatagattcaagctgtctgtgctactaggatcctccttcctgcatgggttagtgatgaaatcgattgaaatgtttgtattaccaggaaagggaagtgaagttcttcacagagacagaagagaacaatcaaatgagagggccaaggactggagttccgtatttcctatgaagaatcacacttattatatttgctgtgatgatgaagccattgctgccattggcaatatgttcagttcaatgtggaaaaggttaatatatgattatatatattatctactgatgggtttcgcttactatcattatttttgtcctttaggttacatttcccttgtgaaagttacaagtcaaacactttggtaatagtcttagtcattttgattctctgctctcttttctttcccccaatctttcttctgtaatgttatttttttcattgttcacttgtactgtttcctctgtttttgttgttgttgttgtgaagatgacattaattctaaaataatcaaacatcgttacaaatgggacagtatcgcaacaataaatgaatacctgtcggtctcgagctattcaatcatttcattcggcttttggtgtgttgcctttcagatctatgatacagattgttgtctcaagtaatggagagaggggtagtccttacaataaaaaaaaaaagttattatatgcagtcatgaatgtggtaaaaagaattgcaatttttagtttgtaattttcagttaattaatcttcactatataactacactcctatgagttgctcagtgagttgcatgcttgtatgatttaaaattaatagtaactctttttattacaaaacagtgaaacactatgagaagtgggggagttcagttcttgttctgtttgccgatgaacatcaatgttgcttggtcatctaatagagggaaatcataaaatattaacctggtggtcctggtcaatggtttttttaaaagagtcattgtttaagtcttttttttttttttttaatgctaataaaaaggtttaatcctccatgctggagaagcgatcatcatcaaccgaaagagagtaatagagacaaaatgggttcatcatcatctccatccccgaacgacgccgtactggaatcagcccgaccttttctccgaggagagcttgaaaagatcgaccccaaactcccgtcgttaatcgccgtcctcaaaagcgtcggtgccggcgagtgttggcacaaacacggaagcttcctagatcacttaatcgatatctacaagatcctcaagctatggaaagctcctgaatccgtctgtctctgtggtctattccactctgcttactccaattcctatgtcaatttagctattttcgatccttccactggtcgtgacgtcgtccgtgatcacgtcggtgaagctgccgagtcgttgatccatctcttctgcgttgtaccgagacaaactctgattcacgatgagcttttgtttaagtactctgattgtgagctcgttgagcatcttgattgttctgaggtttcgttgaggaacgcaaaggagaaagggatttttgatggagatgaagagtggaggaagaagattaatgctttggttcctgagaacggtgttgttgtgaagcatatcaagacaggtgaagaaatcgttgtttcgaggagagttgttggtgttttcttgttaatgacaatggcggattttagtgatcagctttttgggttccaagatgagttgttctgtaatcatgatgggagacttgagtttagagggaacaacgtgactgcgttgtggcctgggaatgggaagcctggactgtggatgaattctaattcgagaatgggagcgatttatagtttgattgtgagagaagaggagattttgatggaagagaggagaagggcttttggttctgggtttgaagtgaggaaggaaagagatgaggatatagatcttgtcgtgcctccagttttcagcttctgcaccaaggtattcttagttagctaaattggttctgtctcatgtcatgatcattggtgttccggtgtctaggattgtatcttctttaatttagtagctttcacacttattggtagtggtaggtaactatagtgtcttgatagcttcatatgtaatggaccaggtattggatgcaaaagagcagatagaagcaagggagatgtactgggaagttgtgagcagtgacacaagcaaagaagggtacttggagagagcagaggagagattgttgggttgtattgagaagaacccatttgtgggagagccacatgtgttgttgagtcaagtgtacttgggaaagaagagattcaaagaagcagagagagaggcagagaaagggcttcttctgctcttgcaatggggaagtccttgggacaagagaatgtcatgggaaggttggattgcttgggttagggttcttctcatgaagtcacaggatcaatcttggcctgatgtttcttggggtatcttgaacttgggtctcgtgcgctaataagattgttcttcacaacttccacatccttaataatcataaagaatgttttaataaagagattaataaaggaagccatgtatgtatgtagtagatcaagtcttcttgacattggtatgtctgaaatattattaagcctttcggtcactttttaagagtcttgtttcacccaaatgagaagataagattctgattaaccacaagacaacacacttccacaaactacattttaaacctggtaaaaaatttgacaatagtaaaaagatagaccactttcattgcattttttttatataaataacttctactgtattaaattgattgggatgctcaagagtttatttagccgcttaagaggttggaattaattaggtgcaagacaggcgaacgaggggtcccgacacggttcgagattaagaccaaaccgggaaaaaccagaaaatggtataattacaaaacccttaccaagactcgcctccaagctgaagaaaacccttaattctctttctcttgttccatttcgtcccattttgttctttctactgtcgccgtaaaggatattcaaaagcggtagaggcggcgatggcggatcttttaccacctcttacggcggcacaagtcgatgctaagactaaagtcgatgagaaagtcgattactcgaacctcccttctcctgttccctatgaggaactccaccgtgaagctctcagttcagtatatcctaaatcccttttccgatctagtttttcaatcgtctttctttcttttgcttccattgtaacttcagttgtattccttgatatctctatttgttgtttcttgatctggagataaaatgagtgtggctttgagtgcattgtattggactgtttgagatttagctttcttctgtttgaattgggtaaagtctagcacattagtcgtttctaattgtttttcatgtatcatttcatggtcttaggagatttacatacaatagaaatgatataaaatgattaagattgttcaattgatctggattagattctgtgaaccgattttgcctgcgtcagagtgagtcaaaattcatttctcagacagaactagaagatgacaacggccacataaagtttgtgatgtcttaatccatatggttaagtatgtgtgatgaagcatttagatttttggttttctttgttttttaactggtttgattttgctttgcagtgtctttaaagtcggacaattttgagggtttacgcttcgactttaccagggcgttgaatcagaagttttctctcagtcataggtatgtagcttgtatttatagttattgttgtaccatctatttatttgtggtcttcgctaagcatgtgtactgatggttaaacagtgtaatgatggggccaaccgaagttcctgctcagtcacctgaaactactatcaaaattccaacagcccattatgagtttggtgccaattattatgacccaaaggtaacgtttttggtaatcagctgttttaatatttttattgtcatgaaaaatatgtgaaaatgacaaagtaaatatgcagttgctgctcatcggaagggtaatgactgatggtagactaaatgcgagactgaaagcagatttaactgataagttagttgtgaaggcgaatgctctggtaagtaccacaactttagaaaatctgttttttctaggtgtagctggaaattacgttcgttctctctgtaatattgtgtttgtcatctttgtttactttctttaccagataacaaatgaggaacatatgtcacaagcaatgttcaactttgattacatggtatgaaaattctctgtatataataatttcctatccttgtgatgtacctttttattatacagtatttggttcattgagtttttttaactgtttttatctcacatttatgtagggatcagactacagagctcagcttcaacttggacagagtgccctaattggagcaacttatatccaggtaagtttgacttgtcccgtgctacagtggaaactttctagatttttctgtgtagtcaaatagccagggaaaggttactaaccatctctgagtgttttaaccgtgtactgtttgccttgattcgtctagctgtgacatagatgagaggtgaaccttacgtcgttctattagactttgtgattatgtcatgcttagtttctgtggtcaaagttatatatatatcttttatctgtgggcagtctttcttttgatcagtaatagttaaaattttaagtaaggaatgtatctgtttttttctattcattaaattatcataatttttttgtacagagtgttacaaaccatttatccttgggtggtgaaattttctgggctggtgtgcctcggaagtcgggaataggctatgctgctagatacgagacagataaaatggtagtgcttcatctcagttggtttattatacaaattgcaaggttcaaaaactcagttagctgaaagtagatcagaattttgaacactttgagtttatatacccatcatattaagaactgttcttgatgaacaggttgcttctggtcaagttgctagcacgggtgctgttgttatgaactatgttcagaagatttcagataaggtgatgtaccgttctcatttgattgcatcttaaaaccttgtagagttgagagatatatcatgacacattcaatctttttcatgaatcatgacacacaggtgtcacttgccactgatttcatgtacaactacttttcaagagatgtaacagctagtgtgggttatgactatatgcttagacaggtaagtaacattgccatattttccctggattgtaagtgaattgaaaacaagcaacaaaagaacattctaaatccgtattattctaataatatgggttttgtttcaggctcgtgtgcggggtaagatcgattcaaacggtgttgcatccgctctccttgaagaaagattgagtatgggactcaattttcttctttctgcagaggtacacaaatgatctgctacttagatttccgctggttcctgtattgattctcctttaaaactctggtttcgttttgttcgatccagctggatcataagaagaaggactacaagtttggtttcggattaacagttggttaaaagaccgaataaaaaccggcacacaataagcctggcgcacagagcagattgcagcagtagtggtttcagctgcgaggatttcggttaaaatttattctatttcagtttaggctttttggtgaagttgggaagataaacggtaacgatgttgtgttgttatttgaggtttaggatttgtttccaagaaccattttataaaagaagaagaagcaaatgaggtttttgttttacttccttgctctaagatctcgtgaacttccgagagaggtgtatcatttcatttccttgccataaaaaaaaacgaattctttttttcttcctcgttcgttgtctgatttgttgaaaatattttattcgaatataaaatcacctgagatttgttgcttttgacgtggaaatataagatgggccgagatagacgtcacagtgggccgagatagacgtcacagtgggccgagaaaatgtgagtttttacttggatgaaattgaaattgtacgttgggtttttgtactcatcatctctttctccgtcgtaaccgcaaacatttgtgagagattccgagcgaaaaaaaccctagtgtacagtggcgtctttcttctccaactcgcttcttccctggtactgttcctttccctccattttttccgattcgagctctttctcgtcttcctcttctactttttctgttttttttttttgttttacttttcttacatttacctcatcgtgtagggttttacatttctgaatcccgcattgcttgatttcttttgtttatggccttctttcgctttccgtgttgctaaattagtttccgatttcagcgaaatagcgtttttgttccgttgatcatccatttcgaggtttatgccaagtcgtcaaccttacaccgttttcaaaaatcaacttattttgtggtgctgattgttgatttttgttgttgcttaggatgctttgttttcgaatgttagttcaaatggtggctttgtagtgggtttcatttggagaataacacaaatcttttgcttcgcaggctgattcggtttcttaaaagacctattactgattcttctgaggagactgacgttgaaggagattttgtaatggattctgctattgaaattagttcaggtagtgatagtgatgacgaagtaccaccgcagcctgtttggccacaaactcgaaccaggatggatcccacatggctaagtatagtttttggcatatctttgtcaatttcggtctttctggtgaggttagttttggtagctttatggactgatcgactttgatgctgtgtttttttctttgcaggcaggagacctttgcctacagtggatagccatgctagagctgaacatacaaatcaggctcctcccaatggtgcctcgagtgatacttctcggcctggagtctctaagcctttcacagggaatgggaacactgtaaactcgagaatttccagtggatctggtgctgattatgtgagactgtcttctgagcaagctctgaaaagaactcttccaccctcttttaattcccctccccttcctgccagaagtggcactaacaatataagtaatgctagtggaagtcgtgttggtgtggattatgagagaccattgtctcagcaagctctgaaaagaactcttccaccctcttttaatccccctccccttccttccagaagtggcacaaacaatatacgtaatgctggtgggagtcgctttggtgccgattatagtcatccagctgtgtcagctgtaggcaacaagagtacctttggtgatcattatagtggagcccatgctgagataggaattcaacgtggcgtgaatggggttaggatcctgcctccatctctgacgcatggaacatctgcttctgttttgcatcatgctggttcgagtgatccaatgcacaggtttggtggtggtgaagataggaatcctgataacgatgaaaggctggtttatcaggctgcactacaggtattcatcctcagcacaaccctttgttatttgtggacttcaacacttaagctcttcttttgtgcttgcatatctagttatcgttgccccttgtaccagctttacattttgccggctcttttgaatctcttaatatgattgtcatagagtataatggagcaataattgactctaaatctggctcatttttttttgttaaatatttttctgaggtgcatggtgcatgaaacgttttataagcgtttgcatgtctcattgatgcttcggtcatactaccatgctggatcaactcaattttatactgactatcttaaaataataatgtagctgcattcgttttcttcatgtctgagaaataatgataattaataataatttggatcattgacaatagatgtagcatttattttccgattttactctggtacattataagggtgttgagagctcggtgttgttccataatctacctgatatgaaatggcgtggtaagtgcatttttgattatcaagtactttaatcctgcaggttttgaatcaacccatgactgaaagtgatctacctcctggtactctttcagttcctcttatgaggcatcaggtagtagcatgttttaagtttccatttattggccgttggtattggtttgtgtattaagtactactggtcttcagaaaattgcgttggcatggatgtttcagaaggaaacaagtagtttcaactgtccaggagggatactagcagatgatcaggtcacatttgattaaatttcttgactaataaatatctgtgatactgtgagtctgctgcttggatatttacctcaaactatgtaacgtctactctgcagggacttggtaagacggtctcgacgattgctcttatcctaaagcaaaagattgtgtcacaactgaagtccgaaagttcatgcaagcaagaaactgaggcattagtcctggatgctgatgatgagtcagacaatgcaaagcatgaaagtggtagtcatgtaaaaccagagctcaaggtttcaagcaacagtgagacctcggttctgagtgcatgtggtaatgatgagaatgacagttcagatatggagaaagccgaagatgaagaagctaattcttcaacacgagcatttcagtggaagagaccagctgctggtacattaattgtttgcccagcgagtgttgtaaggcagtgggcaagagagcttgatgagaaggtttctgaagaatccaaactttctgtgttagtctaccatggtagtaataggaccaaagatcctaatgaattagcagaatacgatgtggttgtgacaacgtacgctattgttactaatgaagctcccaacaaattcttggtggatgaggatgagaacgatgaaaaaaatactgacagatatggtcttgcctctggcttctccaacaataagaaacggaaagtcgtggtgggtgctagtaagaagagtaaaagaagaggtagaaaaagcactaacgatacttcttctgagcctgattgtggtcctctaggaaaggttgggtggttcagaatagtactagatgaagctcagacaattaagaactatagaacacaaatggcaagatcatgttgcactcttcgagccaaaaggaggtggtgcttgtctggaacaccaatacaaaatacgattgatgatttatatagctatttcaggtttcttagatatgatccatatgcggtgtacaagtcattttacagtacaatcaaggttccaatttccagaaattcttgtcaaggttacaagaagcttcaagctgttctaagggctataatgctgcgccgcaccaaaggtactctgatcatctctttattctctttgatggttggttgagttgtttatgtggccgggacttctcaatcattactattaatattatctatgttatcttgacactttgtgattttatcggcttatctataatgtactcaataaagagagtacctgttagtttattgaacctgtcacctgagttagtcctccggtcatgtggttaataaaataacaattttgtcttctcatctgtacatttttccttttgtcttctcatctgttcatttttattttgatattttctgtttgatggtagatttttactttgctcctattatattcgtacgtggttgtgctgcacttgatggtttctgctaaatatctactgttctgctatctaggaacattgcttgatgggaaacccataattaatctacctccaaaggtagtaaatttgagccaggtagacttttcagtggctgagcgctctttctacaagaagcttgaagctgattcacgttcacagttcaaggttctcctattttttcccccacaaagtatctgttcatacttggtttacaattgatgtgcacttttttggttaagaagatccatttatagcaactaaatgcttaataaatgtgaccttgtagttatgcagcaattttattggagatccatgtttctgagtgtcttgcaagtcttcatttcgtcctatgagagaacacaaactagtagctgtacccgataggatgataaattcattttccctgcaggcctatgctgatgcgggaactttgagtcaaaactacgcaaatattcttctgttgcttttgcgactacgccaagcttgtgaccacccacaacttgttaaaagatataactcagatcctgttggaaaagtatcagaagcagcagttagaagactccctagggaggctcgaagcagactgatcaatcgcttagagtcatcatctgccatctgctatgagtgcaatgtaagtgcagaagtgcagagtaaatgagacctagaaatagcatgtcctcaggctcactattctctagttcttaggtcttgtcctgactatctttgcttctttttttttcatatttattcgcaggagccaccagaaaaacctgttgttacgttgtgtggccatatattttgctatgaatgtgttttagaatacataactggggatgagaacacgtgccctgtaccgagatgcaaacaacagcttgcgcgtgatgttgttttctctgaatcttctcttagaaattgcacttctgatgattcgggctgtagttcctctcatgataatggtcttgatagatcggtatttcaaaaaagagacttttgttcatcaaaaattaaagctgtcctcgatatcctgcagtcgctttcccaaccagacagtccaaactcagctcagcatggtcaaatgccatcttcctcacggccatatgatgacgatgatgttaccattgtagagccaatgcgtcttcactcatcttcacctagccagggggcagtaaagacgataatattttctcagtggactggtatgcttgacttggttgagctgcgtattcttgaaagtggtattgaattcagaagattagatggcacaatgagtctagcagcaagagacagggcggttaaagaattcagtaaaaaaccagatgtaagtgatgtaaatatcttagatatgttttctaaaacaatatactaatcgtttctctgaaatatggaatgttcatggagtattgatcctgaagctctctaaaagcgcaaaaaaaattttattaggtaaaggtgatgctgatgtcgctaaaagctggaaaccttgggctgaatatggtagctgcatgtcatgttattctcttggatctttggtggaatccaactaccgaagatcaggcgattgatcgtgcacatcgtattggacaaactcggccagttactgtaactcgcataactataaaagacaccgttgaggatagaattttgaagcttcaggtattctctaaactctatctgctcattgtcgctgggttttgggttcccttggtttccttttcagatttatatttacagtaattttttcaagctaattactaaagagagtttttgtggtagactatgaagggcttatgaattttctcgtttaccatttttttttcaggaagagaaaaggacaatggttgcatcggcctttggtgaagaacatggtggaagctctgcgacacgtctaacagtagacgatctcaagtatctgtttatggtgtagactactcgttgtatggtctaagcgtagccttctaatcgcctcttgaactaggttgcttagtacagtacatatgggagatttagcccagaattttgatcaggaagaaacctctagctgcttttgtaatggatatccaatactgtggcactcctttggttttgtaaggtttgaacccaatctatgcatttttggtgtttccaaagtgcatcgattggaaacaggccataagtaaataactaaaatcggttcatggtatatataccacgtaggattttgaccttaaatgtaaaagatcaattgcttaaaagtttgttctgtatttcacgtctctcttatatcatgacattccacgcattgttttcagcttgaaggcagtctcatgtatgctttggaaacattagtttgtgaagccagccgtacaatttggtcaatctttgtattgtgctaacttcttccagcaatgtggattagatgagagatcctctgtatgtatattcatagcttgttgccttgttccttcatggtacattgtttataaccgatgattggagagtggactcaacctacatacggttttacggtttaggacagacacctagctgttaagaggaaggtatgcagaagagaaaatgcagaaccccctttctttcttgaaaaggtagatacactctaggaaggtttagaacaaatgaatgagaaaactctgcattgtaggttcaagaaacactaataagaaatccacatgtttactgattagtgagaaaccaagttatagatgtagggatagatacagtgatacataaataagaaagatgagtggaaactgcaaagaaagtgaaagtttggttgtgtgtaagaaacagctttgggattcaagatgatgaatcattagaattatacagtggttgaacttttttgttgattaaatgccctatgaaggggacaacatagaagattatgggaccccttattttttatgtatgactttctttcacttttcttttgccctttagtcatttctctttttttccatttttcaccagatgttttttatttggtttaatttttcactagaggttgataattgaattgattcattggtatgaacgcacgtgcttctcgtcggtttgtgctctgctaattttgatctcttgtttttttttttaacaagttacagtgtgaaaagaattgactgtgtttgttaagttttcaaggtatgcaacggctaagtaaatatcattaaaaaaaaaaagaaggaaaagagaaattattctgacaatgttataggtacaattctgggctccttcatccatgattcaactaaatttgggtccttggttttgagtctgttgtagttatcatgaaacccacttcaggatattttgacacaaaaggtgataatgggagttggaaaaatagaaaaagtatcacggggaagtgatgaattgaagaggtgtgtgtagcccaagtgattcacacgattgtgacaagagattattaagtttgctttaaatgattcattcatatcgctttttcaataataaaatttccagcttttgtgggtctttctcgctcaggtactctcgctcatatgtacaaagcttaaagactggcacgagataatgtgcccataaggcttcttccatccatcccaaacttttttagtaaaaacatactttttctgttccttttttttttgtttagaaaaaaaaattatttctaaaaaatttattttttaagttttccatgtaatctttattggttagtattgataaattgtaatttttaaaaaaaatagttaattatcattggtttaaaattatagaaaactgtaaaatactaaaaataatacatttataattaatatttaatatgtttttttaatatgtgtgtttttctaaacaatcaaacaaaaaagaacgtaaggagtatcagattatgtgtatgcctaactgggccatgactaaacttggaaaaacattggagcatgtgatgctaattaagtaattagtaaaacttagttactgttaatgtgaacattggtaaaatagaaaagttcactccccaatgtcttcacgcttcaccacaaagtgttagcaattttttaaccttttgtctgtgtagtactttttgacttggtgctctaaaaggtgtttcacttcattcatacaatacaacaaaccaaacagtaactcaaaataatagattccaaaccaatcagaaatcaaaagacaaatttggtcaaaacatatacatttttgttatctctctatactaatcagatttattaaaaactcaaaccaaactaataagaaagaaaaaaagagacaaatacatatatagttttgagacaaaagctttttacttactagcaaacaaaaatcgtaatttctctatcttaaccgctagcaaacgttggggccaaaaccaacaaagccattggctccgtcgaaagatacttgaatcccttcttgttgtatgttccctattattgacaaacccgtcggagacgccgcaaacgcaaaacaatacgttcccgaatcatccaccggcatcagaaaattcctcgccggtaatgtcaaaaccggaccttccgtgaaatagaacgacacggtcgggactcgtaccgaaacaaaccctgacagatcataacacgtgtcgaatatcgatacaccggaagcccgcggcaaattcgctgtctgcgacttgaatccatctcgaaaagcgacgtaagccgccgtgggaagtcttgtgacggctgttccggtatccataaccacaccaccgtcaccggtttcagtcaggtcaaaaacaccatccggtaacggaatccggacgcctcctactccaaggcccttgagcccaacgtagtaaaaacttggagcccgcgggttccggaccaacgggacccacgaggcaccaacgggcaacgcttcccgcccgaataccaatgaaccggtcgagtcagtgccacgactcactaaacaataaccgaacgcaccaccggtttgaccgcttaattgacccacaaacgacattgaaccgcctccgatacccaataaaccggcagctccaataaacattcctctattccggtgaccacatcccatcgcaacgtttctaaccaccgtcttagcaaacgtcagcgtttcgagagctaacgttcccttcgtgtaagacccgtctccgtacatgacctcgtaacggcacccaccggagtgacaaccggagttttcaatccggtcacagacggaagagccacaagagactccagtgtaagacccggatttagccgggtcaaaaaccgggtcggattgtttgtaacagagcttacaaggctgacattgaacccaaaccatatcgctaccggaatcaatgaccatgtactgatctctcggaggacttccgacgccgattctgacgaaatactcaccacttcctt

SEQ ID NO: 1302 - DNA, 33442 bp, Arabidopsis thaliana
tgttttgatttaagttatataagtgaaaaagaaatatgggcaatggcatctaccttgaaataaatgaatgggtagagaaaacaatctgcatcgtagctgccaagtagcaactggcaaaagaaaagaaatgggcataagacatcaacaaggaaacgaaatccctgacaatttttccattagagtacctgttcccaagattgacaagtccggtatatccaggtccaaaaactggcaccaattcttttccactctcttgtatacggttccaatcaaaatttgtattttgatcaagttctctttcagcagttgtcatttcagtctgtgaaaattgtagcaaacatttcaagaaagttaacattattcagattaaaaccagcatgggatatctttagcaaagatgatgatcaaggcagtacaaacaagaaaacaaatacaggtgactataaaacctatgctttgggaaatgaagcctcttaacttaagcagtacatggagcaaggaaaaatgaggaaaaaagacacaatacagtttactattgtaaatgtttacatgtgacgcaacaattacaagtaaacagactgaacgcgtgaatgggaattattgtctcaaaacgacctgaaattacattctccaagtgcactgcgtctttttaatcgcaattataaaaaagtacgcaataacactgatgtgagtctacttgctcttggtaaagaaacatttagtctcagacatattccatgtttctacagttgttttgtggcaattgatactgaagaaagaaatgaacacaagacataagctttctagtacaaccagcacttgccaatgcaacccaggatgggtatcttaacaaaccatatcattatgggaatacctaagcttgagtatctaataaaaatgcagtacacgaaattcattaccacagacaaacaacaatataaagtgtcagacaagatccactcttcacttttatactttaacagaaccatgaaccatcattactaaccttctgcatcgacgagaagtcaattccaaaatgggccagatgctcagccaggagcgggtccaaaacactgtcatcttccggataggaataaacatctgagctgccaaaaaatttgcaatgattaagtgctgaagaaatcaaaacccatccaaagaacaagataatccacatgcatcaacattaaaaaaaaaaaacaaagtgatgcaggaagtcccccttatccaccccaaagagacaactatcaactgatattagccatacacaaaagtgaagtttaatgactaatctctggttctacgaataaggaaacaagacaactttacctgctgcttctaagtcagcagtgatagttccaagctttacagcaagagggtaggctgtctctttgtagtgctcaacagcatggttgtttccaccagttccatcccagttttttcttccacagagaatcattccatcggtaagattaagccagagattctccgtcttatcacacttagaacatttccaaccagagggaggaatgacaatgccactcttgatttgctgcagtgtcaatgcatgttcactaattaactttttctcagctgtccaagctgcaacttgctctttccgctcagcaccaacggcattcactacagtatcgacagcaatcctcacctgcaataacaaatcacaaaaagctaaatacatgcaatgtgttttccataaaccactctctgataacacacctaaaatcaacaacatagtgctaacaaacaccttctctggtagctcaacagaaggaaacgggagtgaaacaaaatccggaagtatgactatgctataagactcctcgtactctggctcattgttatcaaagcctccatcaacacctgcaaattgattaacagttcaaaaccaatctctcgactctatgttcaaaaatcagtatagatacggcattgtaatcatcattgtatatatacctatagcgagcagagtcggtttcttgagaggccgatcctcgggaatagacttcctagtctgcttaatatgaagataaacagggtttccagtcttctcatagttccaagaaacataatccttcccgaaagcaagaaaactattcatatcaacgaacaatcctccttcggatctctgaaaatcatcattgcgaattcatcaaaaccgaagaaaacgagagaagagtcgagagtagtcggaatttgaagaagaaaacgaagtgagagagaggctttaccggagtatcgaaggagatgcaacactcatgcttgtagatgcgatgagtaggttcagggatctgaaccctagacaagttggatcggaggagctccatagggtttttgcgaaatcggcgaaagaaactctctgacgacggagagacagatatgtgttgttgagtgatatcacacgtctccgttacaacttaacaaggaaggtacggatgatgagaaacgtcgtcgtccttctaaattcctttcttattgcctgaggttttggggagaattgcaataaagcaaaagttgttgtcaatttggggaaatttcgttaaccgactttttgttgggttaattttgaaaatattctaaattaaggatagagtttggatacacaaaaagaatattgtacagcccattagagtttgtatttacccaatagacccaagactatttgattgacccatatgcatggatgtagaatgaatcaaaagaagaaaccataaatcacaatgtggccaatgtgggttttacatgttcttgttcaacacgaaaattactaagtgtgaggatatcgtttgatgatttttgaaatgaaaaaaaaaaggtggatgtctactcttgggaaaaagaggtattcaaagttcatgtaatatatgaatgcttatgatttatgaagaatgaacaatggtgatgaatcagatccaactccacaaagattccttggttcttctagcatgctaaaatgttttggttcaactcgattgtttaattaatgtgtttttgggctacttagctaattaaagttgtcttgttttcataaggccaattccaatcacggaatatcacaagtctgtacatttctcagaatttaaaatcaaatacatccacaacagtgtcgacgaaaactatatttacgaaacaagacaactttacatgtggtgctgaaaactataatactaataatagtccgagtatatatcgtttatcaatgactcaatgtataacttatgcatgaactagtggtaatttgatgaatagtataaatgagaatcgcgggataacaatactctaaagagaacagaagtcacctttttcagttacctcaattttagaaatttttcatattttttttacggacaatgatatatcaaaatcaaactggaattgataggtcagtgatctaacttcatgtccttagatctcactgtgttggttcaaatttctatataagaagttaaaaaggcctaaatccactagagttgttgacaacaaaatagcagagccgatttttttccatacaagtttctccatatagaaaactatttctcttttgaaaatactcgtatccctttaaacaataattcagtttaatgaaaatgtaaggaggcggatttttgggaagcatgaaatgctttttttttctttaacaagtgttcaataaagaacctttctgatataaaagtaaaaaccattgtgggccatatcttacttccactaacattattccaaagttataaaaatatatctgtcccaagatttttttcctcttgtccaatcaaaatatgcatattaacacattactctctcttattcgtggaatctaattattccctttcaaaaattagaatagctaaaaaaaggaagaaacaaaagctccttttctccataattaaatcacctttctccttctctgaatcaatgaagacaatacttacattatagatccctacattcttctctaacgaataacttaacatctatctttcatacataacatctattcttctctgaatcaatgtttatactctttggagggaacggaacactcgtctgcacacttcttcttcgagacctgctgctggactgattatggagataaagaatcttattcgcactcatcttgatcctctctcacgagctcaacgtattggccccaatggtttatcgtacctcgccacttggttcggtctctttatttgatcatatgctttgttttacttttctttgttgttttgtaggtgttactcgttttggaggcggtgtgtattcgatttcgttttataaatgaaggtaatgttaaaaaaaaaaaaaaaaaaaaaaaaaaaaaacatctatctttcatacataactattataaccccccaaaaaaacctatagatatatgtttggaattaatttggtcgtgtgaaaaaatacatgtcaaatctcaatagctcttatatatctatgcatggttcttcaattacacattattttttagttctatgaataagaagtataaatggacaacacgtttcacttgtccattaacttatctcctcttcgtttaaaaatgcggtgattcttatcagcaatcaacgtatatattataagttaaaaaagatacgtacgttacccgacatctaatatacgattttccgtctatatatctatctaaaagtcccaccaaatgtaggagtccagaaatctactgtagtatcgtgtgtcactggaaatgtgcttgaaactggcactaagcataaacctcgacttctaagatctggttcttctgatacttctagctctgtggaatgatcactctgcatcatcattagaaaacaaagaaaaaatataagttgcaaatgatttcttttttcgttgcaaaaaccgtctcgctacattgtttcttggaataatgctttattgtccaatcttaaagatgaagcaaccatattaaatacatgtaataaagaatgcgaacgagagccatacgtttattcaatggtataataataataacagtatgataatggtttaataatgtatacataaaattatataattaaaatattacctgttgatgttgtaaagaagctccacttttcatgtatgggttgctcagagcctgagttataatcatttgcaggtttgttgtacatcagtagaagaaatacaataactaactaaactgtagcagaaaatgtttgtgtactaaaaatacgaaggagtgggctaacttacagaaacttgttggtgtaagaacttaatgtattcaatggcttcagagagcactgaggctgcatcagtctgacacaaaagcacatgagattcagtaaaacaaaatctaagaaatggtatatcattcattcatctccaacataaatatctattgaaatagaccttacatataaaataaatccataaagatataataacaataacatgataagtaataatgacagtatacaaatatactaatacacactcatcatctttctgaaaggtaaagcaaaaatttgcagacaatgagagagagagagatagtacctttccgaaaggtgaaaccaattgttggagcgcagcgattctgtcccccattttctctttcctctaattcagcaaaattttatcaaaacaaatccttgttataaaaaaaatactatgaagtaaaaaaactaaagagatctagtataagcaattatgcaagaattgtgggaagaatgtttgttttcttgatataaaataaaacaacttcgcaataaaagaatgtttcataatatcctatcatgcatatactttggtggtaaatgataaacctaattttattgttcaaattagggtttcggttttgtttaatagaaagattcggattgttttggcaaaaccatggaaagctggttttatttcaatgtcgttaaagatgcttttattttcataccaaaaagaagctttattgtttattttccccttatttaaaaaataatatcaacaaagcaaaataccttgaaagctggtgacggagacgctgcttcgctcttagctcttttcgccgccggctgatgatcgtttcctcctctctttacttcgttgctacttgaatctctaatctccgatatattctacgaccaaccaatacatataaattatatagatcatatccataaatctaaataaagtagttcgtgtagctataaatatatacctttggttgttcgtcaaaactctgcggatgaatctgcggcggttgtaacgccgggaaaaagttagaagacgcgtcatgaggaggaggagcaccggcgtttcccgcagccgcggggttccaaaacgttgcgttattagagaatctcaaaggactgtgtggttttggcggcggagaagatcttaaaaaccaagtcgatggtaacgctgacgccatttgatcatagtttccggtggatgatccaaactgagaatagccaagagatgactgttgatgattcctcgacggttgttgatcagaagagccaaaaccacctgcttgctgatgatgaaacataccggaagatgaattaggagttgttgttgttgctgcgtacatggcgtttgacgagttgtcaacagcgaaaccttgacatgttactgtgctactgtcggtacttgagctaccatgaggactgaactgatgatctaagaaaaacccgcgattaccaccactcgttaaaatctgcggtttgaaatcgctttgtggatctcgccacaaagcttgatgatggtgagaggaatcagattcttgcagctggtaagaagatgtggatgacgttgtgttagcgtttgcgtttgaagtggcatctaaattgagattctcttgaagcatcacaccaaagcttgtctccgctttactatctcctcgtcttttgttccccgcaaagaaaaagaaaacaaagacaaaacacataaatcttatgactgaaaccaaataaaaaaaaagaaacaaaattgagacttacaagagagattggttccattgatcaacaggtgattgtgaagaaagtcctaaaccaatcatctgaagatggtgatcagtagctaaagaatgatgatgaagcttatcatggaaaacagcagaaccaccagattcaatagagcttgctctcatggaagaagaagaagatggtgaagaagaagaagatactttccaccagcttcctgagttgatgaaatcatgatgatctcccatagcttctttttttctcactatatatatatatatatatatatgtgtgtgtgtattgatgttggatcttaatttgttgtgtcttctcagattgtggttacatgaaatgatgaggatccacacgagagagatacttatagttataaatatttatcaatttaaattggatattttttcctggtagggttttcgtgaactatttatgaagagtgaagacatccgattaatgtttggttgacattttttcaggtggctctcgctgactctcttgcccacgtcattcccaacttctgtttttgttttactaaagatattgttgatttttccattggttacaactaaaaagaataagtatttcatttctcctactttcctttatattttggtaaagtttccttttattcattttgcaagcatatattatatcactctttataatttaatttattttttggtcaccctactcgcaatgatacaataacaacattttgtaaaatatattttgtattaacatccttcaatttagtgaatgtaaatgtaacaaccttttaattcattaactagtaatgattgatacttgataggaaaacaaaataaatctagatttaagtatttcacattgagaagtaaaacactagctaatgaggaaatacaaattgactttgtagatagatttttgggataaaaaaggaggttgaaatggatttgacttattttaagcaagagagaccaaggatggactagaaggagcgggtcacagtcacggtcacagtcatagtcacaaaccactgagatatttttaaaataattctattcattttaatattttggcctttgagtttggctatgaaacttcagcgtttatttttttccagtcacagcaagtcaacgagtgggctccacgtggcgtgcgcgcgtgctttcacacttggaccccacttgtttcgtctcagagtcagagcctgaatatgactcttctcttttcttttctttttaaaaaatctttttgtttttcttttcggcatcttttattcttaatgttaattacggtaattttctctcttaactttttagaagattaattgtatataatttgtgttttattcactggtcgtctccctaatcattttcttttgcctaacgtttgtctcttctcattttccaattctcaacgagctcgaccaaaaaaaaagaagtcatatatattgatattgaattttgctgttaatattcgcattagtgtttgtaatttctatatagtcaaacaatatatcacatacgtactttcttctcttacaaccgcaaattttttttttttacagtttgcatgatcctgtttctgtctaaaacattacattcttaatacattggaatcattttttttttttttttgtaatgttaaattcattgaagatacattggaatcattttggagttactgaatccatcttacccgatttataaataaaaccattcgaataattgtttacaaaccaaaataatcgaaaatgtgggtttggtggtgtaatttaccttttagaatggggtgttgaatataatttacaaaatactttttttggagttgaatataagtttacattgattcaagaaaaatgaatgggggtgttgattgttcatttctctaaaataacattacaagcgaagtactaacgattacttacttattaaaagttgattgccattggagacacaatagttccacggcaacattccattgagttggtgatcttataatttgaagaagaagaagaagaataccaccattttttaacgtgcaacatttacaagaaaatgaaagattccattgcaaattcacccatgtaacttgagctcgtgagtagtgactatttgaatttactgcttagctctattttttattagaccactatggattaactcatcatgatctacgcattttaatttgctccaagtcaaatagttcaaaatccaattgcattgcttacaacattactctatacattgactactgcactacaaaaactagctagtgttactgctcaaggagaaaaaaaaacgatagacgacaatggaataaacttgtttccaaattgtctttacattggttatgtctccatcaattaatagaattatttaccagattgtgtcacacgacatgctcttcaaatgctattttttcgccgtccaaaaaccgttggtatacgttggatccatcacccctatgttttttgaaatgtaaaccttttagaattgatttgatatttacattataggtaagtagctagattgaggtagagaattgccgtcataatgacgtaagcgtgtggtgtgatgaaaaaggacaaaacatagagaagaagatgaacatgtaaattgtacagtgaagatttagaaagaaattaaagaaaagctgagagaaagagactgtcgcggagacaaacccacacggcctctctcatggccttccatcatcacatcatcaactatttatactccattatttatcattattatttttattgacaaaaaaaactgattttcgataaatttatttacttaagagtaataccacactcaatgatgattattgtttttctttcccatatggattaagcgaacaacgtgtaatatacacaaatatcatgcattatgattcgaaataatctctttatttcacgaatttgtgttccaccctaatggtgtaaaaaaaaaaaaaaaaaaactaacattttaagaaaagaaacttataatccatgcatgtttataatatactcaataaataatacgacaaaagtaaaatagttatatagatccaaaacgatcatcactccatcgattatataattgataagatctcgaccgtcataattttgtagggttttaaaatatttgtgtacacacacactggctctaaaagtttctcttatgctctcaactatacctgtcgcctgatcagtttgacatttatctcacagttcatctttctagtcaatctgtgagtgatttaatcgtttacatgttcagcattttgctttattattttattcttttgacttcagtttatcgtataatttttttatttttttttcaataagacgcatgcatatggtgctaattaattagactgtagtcactgtactatggtttattattccaactaaacattaaacatatatataagcatacatcacatttgaagtgattaatcttcatatatctatcactatataatatccccaattttctacaataaatataactaagtgcattgtatgtgtaatggagaaggtataattatatacgtagttagctagaatgttttatcaaattgaaatgaaataagtaaaatagtataacttggaggtaaatatttgacacgaagaagcaaagtcgtaccattcatattgacgtcaaatgttaaatgcttcagttaatgattagatcatagaaaaagttacatctatttgctatcacctatttcagtttctccactctccatgatttcgccatatataataagatatatataaccatgtgtatacatatacatatcagttatatatgattaaacaaccatattttaatgtacacggtaaatcatagattaacagagtagcaataaaattacatcttctttcgattatcttaagtcatttaacatctaacttataagtcatttattgaggtatatatgttagtatgtttgtattttttgtcattaaattcgtcgctattcacatatctttggtaagcatgtacgagggaatatttcatacatgctgatgcaataataataaatatttgtatacagtatagtaaattagtaatataagccgcccataagcactaagacgaaagaagaagaagagaaaaaaaaaaaggctgaaggaaatagaaacagctaggacttccacttggacagatcaaatggaattgttgtctgtctcaatatgtcttatataagtcttatataagtcattacgtgacaaaatccctttttgtaatacaatactactaatttttttttaatttttccaactaccttaagaaattaaatatatggattattaattaattacaattttgcgcactcaattcgtcgatttcttcattattaattttgttttgttttgtctttctttcaatcatatccccgccgtacttgcttattctagtagcacatcttcccccacacaaacgttttaattaattgattattatgtacataaatatacattatcatatatatatcttacttgcaagtactaatatgtaaaagttatatttaggtcagctagtggtagagttcatatctagattgatgacttctacatttggataatttaatcttagcttctgatttgttgttataaacgtgttttctcttggaaaaatcatgatttatgtcctttagtttaaaggaaaacgtaacaatcatatctgtttctaatacaacataatttatttactattactaaaagaaaacaaaaattacttattatctaaactaagttaaataataaaatgtctcggcttcggaattgtttatttgttattttaatttgtttgactaaaattataagaatattgaaagaatttgttttgatacattcaagaattttgaaacgttatatctttttgactaaaaatacattatataattatgtaagatgatttattatacctttaacatcttcctataagtgttataaaaaggaattgatatcatttgaggaaaacatactctaatcagaaatatgattttatatctagtgttattcatttgaattataacatcttaatcaaatatgtcatgaaatattaataatcgagattgataattctaatgaaagcataatgtattcatcgtcaccaactttcccacccgtcctaaccccacatatgtagaccaaatcataattcttctttctagagctaattaatcgatttatgatttttaattagtataattaggggttgacatatctacaaaaacttgctcgtcctctcgttaataatacgatcatttgattatgactctgatactgatgagttcaaataacttatttatttatataattggttattttcctctcatttgtttcttcaaaatatctcaaaaatgataaacaaaataaaagacaaattataagtgaaacggaagagtcagatagatttatgtcgtatcccgctggttaatcaatgttgagtgttaaagtttttgatttttcataagttcttttgttgtatcccgctggttaagttttgtcaccaaattgtctgactcataaaattagtttgagtttcttctccggaaattagggtaatgtgtcaatggaataatggattatctctgtggaaagatgaaacataaaaaaaatggaagcagtcgtttttagaaatcacagtatgataagttataacttaataataagtcaacaaataaataaatatgtaacatatccttttgaggagttgacatattaatttacctattttcaactagtgcttccaacaaaattatcttttaaacgttaatcttatcgatacatcaacaacaatataaaattgactcttctcaacaaaaacttggcaataaaaaaatatcatataagtgatatggacaactctaccggaaacctctatccgaacattctcttgacatttcttatatgggctcatttcttatttaaatctctatctactaaaaaggagttaattaggtcccaatctcgaatgaattgttcaaaactatatttacaaaattatgatacttgtatattatttttcatctactgtacatacataatatataaggacaattatcatataaaatataatgatacactcgatcatagtgggctagtgatcattaaatgatttattttggataggtatatatagatcagaattcgagttattctttcatttgtaatttgtaattatggatggattttggctcgagattcttcagttatcaatgttcataaatttttgatagtcatagttaattatcgaaactagaggtctagactaatcacttcaaaactaacaactgtttatatctattacgatattaatctttcgacttgtagctgtatacatctagtaaaattatatacaactttaactaacaacaaccattgttgagaaatgtgttactcattaggcagacgataagttgataaacttatagtagtactggaccatttcttgataatcacatacaaatcctgaagttgtaaaaagcataaattgtatttcgatacttctattttttttcataatcaaaagtacgaggaaaatcatcaatatgcgtggacaattagttagagcacaagaaagatcgaagttgtatgatagcaatacctcatttttgcatcataaaaataaataatttaagaccaaattttttttttttctaaggcaaggaaaaagaaaaatagaattgatgataacaatacgaagagagcaaataatggagcgactttttgttctacttttctcgatctgccatgattgattatattcttgagactatcttacttaattgaatatcatcttaaagagaaagtaaggtctttaattaaacattaattattggactttgtgcatttgattatcacataatgattaacctataaaaattataaaagtatatagtttgcctacgtctagagagatatttatcttttcgtaccaaaaagaattatatctttgtcatctactttgttattaaacttgggatgcttgcaacatcaacatgataaacgatgttgttagtgagaccgatacaagccaaatgatgttgtcggtgtaaaataaatggtgcaaatattgaaacatatttgttaagtgcttttaattgtgcaaatggggtcatgtttactagtttacatacacaaaagttttcaaattttgaaagaagaaatatgtgaaattgtgaacttagcacgcaatattaataatttaatataattaaactttttcttctataattactctcattaagcatgacgtggtattggtatcaattagtttacataaagtaattcagttcttatctacaggttctgttaatcagatgtgtttttaatttaggctctttggtttcatctctaatttaagagacatctactcgtgatatatttttcgggttttaaccgaaaattaaagaaacacaaatccataaaagaaaagtagagcacactagttcaaccagaggcttcgattggttaaatctattgcaaaagacatgaacaaaaactgaatgtttcacacaaaaaacaagaaccaaacaaagtcacatgctcgaccgactttgttcttgatcagaaagtacactcgacacctttgtgtggaagaacatgctttcaagtctctcccttgtggaattaaggagacaaaagacaaacaagtagtgattaagttttgtttgatctctcaattgtttaagctctattagaaactttcttgtatttgttctacctacgtaagagattgttgtaaggacaaacagaaaactcgtcaatcgtgcgtctttttagtgtaaaagaaagagaaactgacatcaaaaactaagagagtagtaacataacaaaagcttgaaatttttctcaatttcctctagttcaaactcgacctaatcccaaaagatagtaatacaaataaaaaggcatggaccttgttaaacaaagtacgctacgaatacatcacaatacaaatcatgaataatgatcatgatggtaaccatgttcatcatcctgatggtatatcaaagcctatacacttgaaaacacaagtgttcaacgactataatattatttggcttcttctcatcttctttcttgtgaacggatcagatttttctaaagtaatgcaatctctcaattcaaatggccaaaaacgtaagacaacgaagtgagaccaaaaacagagactctaagagtaaaagaaacactctttgacacttcagctatcgatatacaaaacatcatctttcgacaagttcattttcccattcttcctccgcccgctccttcgagctccatctgattctcccctctataaaatccacccgttaaatagacattaccgacgaagcaggaaaggtgaagattgaaagatgataaaaaggagacaaacctttctcaagacaaaagagaggtataaatatgcagcttcccattcatcagctgataatgtgcctggaaagatactaatcaagttagttttgttatctcgcatttggttagaatcaaaaggatgatatgaagcaagaatcgaacaaagacttactctgatcattgctaccatcacccaaagcaccaagccttctcatgagttcgacaaactctggctttttcatatactcatggacaaactcgtgggagttcttcacaaataccaactctaaatcatactatccaaaaattcatgggacaatgtcacactcacaaatatgaaccagtgtttttagcaattagaaggttttcacgttaacactgcatcaagtatttacctcctccgctaaagacttgaagacgttaaagggcacaatccattcaggacaatcaacagcatcctacaatacaagttcctatgttatattttctttttaacagcaaacatgacaagggaagtttctggaatctccatttaataggtagtcgtgttcttacaatatatttacacagatatagtttcctttacaatgcttaagtttctgcggtagactaagtgaatatctcaagaatactgtagataaattaggtacctcgagatgaaacacgtattcgataccaaatgggctgctagatttgaacttctgaaccatacaacgagaaactcatcattagaaccaggaaagaaaggactttccggaaaacggataaagtcaaaactaaggacaaagaaaggtcaccttttgggaatactcttcaccaaaacgaatccagtaaacactattaccaatctccaaaccttcagctgcgtattcagtatacaacaaataacagtttaatttccaaaaacccagaagcactgaggagaaactagaacaaaatgtataggagaaactagagcaactcaattttcagaggatcacagatcaaattctaagcaaagaaggaaaacgaaaataaccttctctgagtttttttataataacattggcatctggcattgttccgataaagacacctcctggacgaagtaaagctgaaacatttgccaaagctcgtcgtgcacgtgcctcagtagtccatgagtaatgcatagcaaactacacagttaaacaatgacttggtaactttagaatccataactacacaactaactatatttcaaccacgctacaacttcaatatgccagtgggaaaaactaattttggcacaacctagttacaaagccgaagtagagtctcgtgactagtaaaaccaaatagtttatctgaaactgttcaaacttgaccggatatgtactttaaaacagaaaggagattgaaacatataaaacctggcaactgcagatatcaaaaggggcatcctcttcaagaatcttgtctagctctacctgtaagcaattacacaattaggatttacaaatagtgaagctagaggaacttatctcattataccatgtcaacaagattcctaaactactagaggagcttagctcattatacctcaaaacaatccccacataataatcgagacggaaaactgaactttttacgccgttgatgatggtctgcatcaccgttataacgcgtgcgacaatcttcaatctgttattaagtacaacatagaagcacttctcaggtatagagataaaacatatatgcaaaataaagatacagctatcattcagccagtaaacttaccgacccttcagcaatatcaattccaacatagtacccgattctcgccttatcccacttgatcaaatcaccaccctggtaaaagcattacaatgagattagttttgagaaataacaattgacatgaacaataagattgttttaagtcaagaaccttcccacaggcaaggtcgagaacagcatcgtcaggacgagcataaagctggatcaaaacacttttaatctgtttgtataagaataagaaaaagaggaacaaaattgaattatcataatacaacaagtttcacggacagagagagatgttaaagagtaaccaacccaattgttaagtttcttcaaatgaatgatgggactagcttctcgctcttccaatgtttggtttgttctcctactgtaatgatcagcaactttccgggcaaaattctttgtagtctcatcttccagaaactgagaatcacctgaaagacagaatctgactttaagctttacacaatcatagtcattttggcgaaacgattgcttaaagaaacagactttaaacaattaaaaccatagaatccaaagtaaaagcttaagaactaaaactccaacaagacagcaaacacacagttaacactctatcagaatgaaaagcttgatagaaactataaagaaggaaactttttccaacgggcaaacaaaagcaactctcagggacaaagaaggaactagcaagggagggatcatcaataaacccttgtggaacacaaatcgaatcaacagaggaggaagagagggaaacgaaaccttcgggattagatttgaatctggaagaaggaggaggagcagagcttgaaggagaatcggagaatcctcgtttcataacaacagttcagatgtttgttaccgaatgtttctctctatctgcaactctttgatgtacttcaataataagaacccaattaagacaaccaaataaaggagaaaagatttggagttggggatttcttaaatcaaagatttgtttgtgtttctttggcaaaaagcaaaattttggtttaattatgttttactagcttgcggctgcggcttgtttcacgccgctccgagtcggaggcgacaaattattttggccggtaaaaaaaaggtaacgatgtagaacgattccactggggatcgaacccagaatctctggtttcgtagaccagcgccttatccattgggccatggaacctgatctgttacttttcgtaaaattaattatatatttgtgaaacaaaaaaatataaaagaagacctcaggatagaataatactggtaaaagagttcataacattaacatagtttttgacaatcacattattagtgtaaacttcaattcaataatactagagaatttgataccaacaacatgtttattttcatgggaatggcattgatagtgctacgtactggtaacaccgtaacaagtctatgatatttggtattttgccatcaaaactaattttatgtgcatgacaacatactatgattatcttctttttaaatgttcttgtaatttcacgtcgatgataacctatccataaatatttcataaaaatgaaaaaaggtttaagaatacgatcaaaactttatatgcctatgcaatggtcccatactctcatggcaaaaaccataaaaacatggaagtaatttagtctgtgtaagaaggaggaatagttttggatttgcaagcgtatacactatacagtatgaattttttttgtcaaaaaatgaattcatcccacgcttggaggtggattcaacgttaatggagcctctcctgttgctgaagatgttaagcctcctccggttctagggagagtatgagaatccatcatttcataacaaataagtcgtttcctcattatttagcaagcaaaattggttcaatcttcactttccgattaacttctttgtttctcttgcaagcaatattggtttgtatttaccgtgcattacaatgcttattgtttgtggtagtaaaatcaatgttatctctgttaacatgtaccaccatttcaagacccatagactttaatgcaaaatcaatgttatctctgttaaagcgaagaaacatgtaagactacaaaaacaattcgacatttcaaaaacacctattttctaagatcttgacttgtgtctctccatgtctaagtgtaaattctgtttcttttaacatattacttctcctctttctctgttactctcactctcagcttcgtgcatcccaaacattgtatcatacaacggcttgtttaacgtctctggcaagtaaaacgcaagcccacctcccactaacccgcaaaccgcaaacaccccaaaaggtaactcttcccctaaaaccaccacaaacggcgccagaatcgctcccatttgagctgcttgagtcgcacaacccaatgccgcgttcctcaccactgttggaaacagctccgcgatgtatatgaacagaagattgtacgttcctgccatcccgaatatccctaaaacccctgacaccattctaactgatttccatggaccagctccccatacagagaatccaacgaggcagaaaacgcagctgaaccactgtgtccctatggacagcggtttcctcccgtacttgtctagtaaaaccgcggttatagcaaatgccggcatttccgacaccgcgttgacaaagacgttgaggtaaagattggtcttgaggttgcctacgttgaggcttagtccgtagtatacaatagagactgtgaaacttatggcaaccgaaatgacaagtctcatccgcatgagaggcgacagtataacatctttcagcgaaccctcaacagcggtattcctctccccgttgttattttccacatcgtcgtctaaagcaagagtgacaccagctggaatgtgacgtccgttcgttttagcgatcgaatgcatcagcttcatcgcctcatctactttgcctctcacgagataccaccttggggactcggatatgaatgggataacaatgagtaggaacaagagagatggtaacgatgacactataaaaagctccctccacgatctgaaaacgtaagcgatgccggataaaactgcaatgcccgcggagaagaagtagaaagttgacattccggctacaccgcgtttgctcggtccaatgggttcagtggctaagacaaacgcggttaggccaacaccaccggtgctgaaaccagtcaagaaacggagaactacataggtccagtagtttggggagaaagctgtcgcgataccaaagattgcgttgataatgcatacaactgttagcgagccttttcttcctagcttagagtccgataaatgtccgaatactcctgcacctgcacattattgagtcggtacactatcattaggccatgtttgtaagttgtaattagaaaatgtaatcagaaaaaggtatacagtagttaaactttggttaaagacttatcaaagatttggtaagttcatcgggaccataacgcatgtatggtctacataaagttgttttttgagatatgttggaccaatgtttcacaatctttttttgttgacatgaaaacgatatcttcaaccatggaagatgacgtcttcatgccagttacatgtaaaatttttgactagtatgcaactctaattggatattccttcgtatatcctattcattgtataatgtgtatcaaatgtagagattggataatccagagccaaactgtccttttttataaagtaatctaaacattagccaaaataaggcaaacaactgttggtttttctattatttaggtgggtcatattataatgatcattttgtttgtttgtttgtgcaattatacatgtagttaagatgtttttggcctcgtttgtgtcaaatgtgaacgtgaatgttgttagcatcattcattaatatcatcatataaacgctaacgaatactgtgttaaccaagaccataagtagatgtaaaaacaattacgggatgtcaaacatatttcaaactttcatcaataagtatagttcaaattttttttttaaagtaatgaaatgatgtggatgaacttatgtttttacgacaaaagaatcatgatttaagtctgaagcgtataacccaatgtttatttgcagacaaggccagaggggcaagccatgccgcgagagatttgtgtgtttcgactttacagatcaatgcaacgaattaagaaggaattttataactttaaaccaaaaaagcgaacaagataatatataatgtgatcaactcgttagtcagtcacacgtatattatacattttttttgggtcattttagtagttttgttttctttttttggcaccaatcatacctatcaaagtctatcttttcttcttcgccaatcattttttttacgtgtgtaaacttggaccgcctaatgggttaaaattttaaagcattatcatccaaaatttataatatactatagaaatgaaaggtatatcggaaaaaaagtgaggtatatctttactctatagtgttattttctaaaattcggataatcataaaagattcatgtgatcaaggcacgtggtacgaatatccagattcaagccaacgtgcccattgatctgctcttactaatttattggtgcgatcgatatacactagctaagttatgcacacaactaacaactaatttattgtttgttgatatattcattaattatcggataatcacgtaaagagctaaatccactaaattacaagttcataattttagaatgatttttttttttgtcttatcgaattagataagacactcagaaactatactaaactcctaattatgtatttatttatttttcttaagaagataatccaagattagagtttaatcttctttttttgactgtaattagaaaaactattcgacgtgaaaaaaatcattttcacgctacagctgtaatttactgtttttgtaattttcctaaatcacaaaaaaaatatagaagggaaaaaaaaaacttaccgatcatgcagccggcgaagaagagagcctgaacaagaccaactttatacttgtcgccgcaaatcaatccccactccgacaccgtggagctccctttacccgccgtccattcccaagaactcggatccaactcgcagttcaatgacccgacccgacaatccgacccgacgcatctccactcgggttcttgatcggcaaatatcatcaccatcgtgtggaacgcctctaaagcccaagcaatacacgtcaacacgaagtgtttcaactgccacctcccaaactcgccgcaatatctttgtaacatctcatctatgcataatctctcctctccctccgcttctttcttcaccggaattttctctagcagcggttgtcggacatcgttaccgtttctatcctccggagattccataatttatgttttgatttttacagtgtttttgtttttgtgtttgtgtttttgtttaaaaggcgttcttgatttggtttgacgcgaagaaggaggtggcttctttgtcgtatttatatctcttgtttatcggaaaacaatttttccttctttttttctctagcgttttttattctcttttgatttagtaactatttttttttgttgacgatattgactacatgctctgcttatatatattttaactatgtcatgttattaacgtttatgagttgtcactttgaaaattagtaagacacatcatgtattatttctcaaattagtattgtacatttcatttcaaagtcaaaaacacatgattctatatatggttgattacctaatgtgtaatcgtgaattagtaattaatacgacatgctaaaaattgattaatcatgtttagaaaaatatatactatgataaacctgaaattgtgtcacacaattttgatgaatgtatataccacatttccatattatacgttttaaaagtaagattttcataaattttaaaattattcataacattcactaaaattagatgtgtataattaacaaactaaaaatatcattaatctactattttagtagttattttgcgaaaatatgtttgagttacaaaatattttcactatttaaatcatgtcgattatacccactgaagggtatttccgtcaatcccaattctaacaatgaattcaggagtataaaaacgtaaattcaagcgtgccaattataaaccgtcgatcataatctaatccaacggcagtaacatcgatccgcgtgattgtttattattggataagaatcactcaaccgtctctacacagtatatataataaccaaagagcgtcctcttacgcttatcttaatttccctcgcattgagaattttcaactttttctatctctcttcccaaatcacaaatggcgggtcgcggcaaaactctcggatctggcgttgctaagaaatcaacatcgagaagcagcaaagccggtctccaattccccgttggtcgtatcgctcgttttctaaagaacggcaagtacgcaacacgtgttggtgccggagctccggtttacttagccgccgttctcgaatacctcgccgctgaggtaattatccccttctctccctatatctctttactctttcgatcttcaatttcgtaaaaccctaatttctaaattggatctgttgtgttgtaggtattggaattggctggaaacgcagctagggataacaagaagactaggattgtgccacgtcacattcagctcgcggtgagaaacgatgaggagctgagtaaactgcttggagatgtgacgattgctaatggaggtgtgatgcctaacattcacagtcttcttcttcccaagaaagctggtgcttcaaaaccttccgctgatgaagattagattagggatttgtgttgtggttgtttagctaattaatgtgtagcttagtctttcattagattagatctgaattagttttcattaatggtgttgtgtagtctctcttttgcttcaaaaacaagtattaaaatcttattattttgaattgaatccacaatcaatacacattgaagtcctaacaaactacttcttcccagtgatatttgaaaccaaatcactaagaaacttagctgatttggtaataggagaattcatagccatcaagttatacagaacaagctcaacttcttcgattgatggtcgagaattgaattgtgaaacaactttcaaagtaccattaccttcttcttcttcaacgagaacattccatctttctccactcacaacaccgtctcttacacacttaaagatcactccttttctcttactaaacactcctctcacttctaagccagtgaacgcataaatcacttcaaaggaaccaataaagccatctccaaagcttttctcttcttcaaacaaccatctcggattgatcattactacaggttttgtagaaaaagcttcactcgcggtcttaacatcctccagctgcgatttctccggagccatgaagatcgccacgtcagcagatctcagagctgttttaagagagtctgagaccggagacatggcaatgtggtggatagagtctgaccggaaagctttaacggcgggatcgatgaatgaagggttaggccagaggaagagaagcttgacattagagcctcttctcgagatgggtaagtcatgaaagatcgagaaagcgagctgagagagtgacgaaggagaatcatcgtcaaggattgggatttcaagacggaatcttggttgtttgagcttcctgagttttggggaagcgagttttgggttgtttaagggtttgatgagacatgaaaggagacaagttttggcttgattaatggcttcttctttggaaaggggaggagaagaagaagaaggtgaaggaagagaggaacagagaggagcgaataaacgagtagtggttgatttgtggttgagctttgaatgctgttgtgagagtgatttggagaaatgaagatggaaaattctggaattgggaggagataacgaaggaggagatgggtttagagctttgaatgtctgtgaattgagtttgaagagagtcgaagaagccatggctgatctctgatgatgaggaagagaagagaaagaggataaggttgttcaaaacttcaaataagaaatgagacaaaaccgatcgagttacataaacgaaaatttgatttcggtttgggtcggtttatataaccaaaccgaaaataaagtaaacaaaacaaaggaattgcttaaacaaaagtaccttgctcgtcacttgttgtctctctgttttgtaatttgataacttataaatcttcattatataattgcataaagagatgagaaacaaattaatattaaaataagatgaaagcaagaagactaattcataggtctggttaacttgatttgaataaaacttggagcataagaacacataggacctggtgtgcatagagagtcaccgagacccactgttttgagactacttcacagaacttggtacataagagcacacaagacggcaaagtggttgatatagaggttcacggagatccgctcttctgaaataaccattctctccaacgatgtaagctatgtggacagtggatttgagcccctctgtctcctctttattaaaaaacactacgactttctcttcatcataaatcaagtatccctcagtcagaaaaaatcttggtgtgttatcaacttttaagaacttgctccacgagacttcatcgggctcaatcttgttcgtaacccaaatatcgatctcagatttgccaccccgccaccgctttactaacaccgcaagcttctcttctcttaccacatatagactccccaaaaattcatcgatgaagggttgaggtagaggcagacgcggtccgaatctctctctagtaaaatcaaagcatattaaataacaatcttctgatcttctatctttagcataccagtaagtatttcccttcaaagacacgccatcttgcataaacgctatatcccatttaagagggaaactagaaaccatccgtgaattagacctcaaattgtagatttcaagtctattagggtaactatcgaaaacccttaagattttgtggcaaccacaagatttgtcgtatccgaaagcaagtttgtcaaaacttgcaaaattatttatgcgtttgacccattcacgtttcccccaatacgggttacaaaccacaagcctaatactatcatcagtgatgcttccgtataacaacaataaaccgttgcagtgaaagacattgaatatttccttgaatattagatctaaattttctaggtgaagaatacctttattctttatagatagatcaataatgttgttgttgttctgaataccatggagattgacgccaattgaataaaccttacaatctttaatcattatcaaatctcttttccctgatgcggttacattgccgatgtgcttatttgcaaagctccgatgtttggatagaacgttccaggttttgcaagtagatcgcattgcttttaaagatatcaacggaagcctagagagaatctcctccaccaaatcatgtggaagatcggacatcatcatcgtcgctgtttcaaatttcgaacaaggattgatctatttggcgcagatgttaggtcaactttcataaactcttttctttcagactatcgatagattgttattgaagacacataaaccctagtatttaattgtctgaaatacacaaaactctcaaacatccttgtttattgggccactcttatttttagcccattggacgtattatccttccgctcacgtggcacaaaaacgattgagttataaacaaaatttttggtatcggtttgggtcggtttaccctaaaccctgctgttaaattcaaagattaaaagtttttaaagaccaatccttcttagttcttaccttcgtttggttttgtcaaattagttgatgttatgtgagtgaagcaatgatgaggagctgatttgttatcgttttggtaatgatgtcacttgtgtatagctgcaaagttaagatccattgcgttgcgtgttcgcttctctgtttcacactcttgcttatagtttgatcacaccatgaagatcactaggtttaacagaataacactgagaattgtattatactgtaaaactaaagtctgtgttgtgtgtatatgtcaagactcatgagcaatgtctcctgcttgaatcaactctgtttctaagcattttttacagtctataggttattaagcaatgagttaacaaaggtaaattaagaaccatgttgagaattcgattgcaacccaaaatagtaaaaatattaaataacttaattcattatcagattggataaaagagaatgagaaaacaattcaaagaagttgaaagcaaaacgaaaatgtaaaaaggactaaacctggtttactcgatttgcacacaacttggaacataacaagacacaatacggcaaagtggtttgtttggagattcacggagatccactcttctgtaataaccattttctccaatgacgtaagctatgtcgtaattggttttaaacccctttgccttgtctttatcaaaaacaactgcgaatttcttttccttgtcaatcaagaaattccaagacagaacacgtagtttcatttcaactttcaagaagacgctccacgacacttcttcaggctcaatcttgttcgtaacccaaatctctatctcagatttatccgatggctgaaataacactgcaagctgctcttctttaaccgcagatagagacacataagctccattgaagggcagtggtagacgcggtccgaatctctcccttgtaaaatcaaaacagaacaaaaaacaatattgtgattgtttatctctagcacaccaataagtattttccttggaagacacgccattttgcatatactctatatcccgtccaagagtgtctcttggaatcatccatgaattagagctcaaatcgtagatttggagtttattatcgaaatcgtaaatcctcaagattttgtagctaccgcataatttgtcaaatccgagagaaaatatgtctaatctcccgtaattatctttgggattgatccattttggttttaccccatacgggttacaaaccacaagcctagtgtcatcaatagtttttcctgatacggataacaataaaccattgcagtgaaagacttgagacacatagaatccctgagctgtttcgtctctgctaataagtctacctctacactttatagatagatcaatgttgttgtggagattgacgccaatcaaatataccctacgattcattatcattagaaactcttttccccgtttttttgcaaacctctgatctttggttaaaacgtaccactttttgcaagtagatcgcattgctttcaaagatgtcacgggagccctacaaagaatctcctccactaactcatctggaaggttggactgttgggtacaaagcaaaggtcccacatcgaaagtttagaaaaagagtttctattatataagccaagtccaactacaactagtatgaggcattttggaaagaaacccaataacaaatccttgcgggcttgaggatataagcctaaagaggacaatatcatactaaatggaagttggaatgggtttagaaagcccattaaatggtatcagagcctaggttgaaaaagtggacttagggcttgggctatgatcggtgtgggaaaatctctcaaacatgacacgataagaatgtgcctcaagaaggaggcccaagttcgtggtctttggtttgaaggggagattgttgggtacaatcgatcttggcatgatcttagattgccgcaagcatgtgctttgcttgcttggccatatggctggctctggatgcaatctctacaactagtatgaggccttttgggaagaaacccaataacaaatccttgcgggcttgaggatataagcccaaagaggacaatatcatactaaatgggagttggaatgggcttagaaagcccattaaatggtatcagagcctagattgaaaaagtggaccttgggcttggactatgatcggtgtggaaaaatctctcaaacatgacacgataagaatgtgcctcaagaaggaggcccaagttcgtggtctttggtttaaaggggagattgttgggtacaaaccaaagatcccacatcggaagtttagaaaaagagtttctaacatataagccaagtccaactccaactagtatgaggccttttgggaaaaaaaaaccaataacaaatccttgcgaacttgagcatataagctcaaagaggacaatatcatactaaatgggagttggaatgggcttagaaagcccattatggacatcatcattgtacctcgctttttcatgttttaaacaactttcaactcttttctttctttctctgtggctactgagttcttccggagaggctgtcgataatttgttaatgaagaagacacaaaccctatctttttcttaagcttatatgaaatacttatagcaaacattttaagcttgcgaatccctaattttctaagttgctctcgctactactccagtcaagaagaaaaccctagtttatgtctcccgattatgccatatattagatttcctatactccaataaattaagcttgcggaatccttaattaccgatatttctatattctcaccattcctttatttctctgatattttcatcctatataacagagtcatttaacaatgaacacattctatgaattaagagatctgaaaacaaactaataatattcaaagaaggtctgaaaaaacaaattaatatccaaagaagatgaaagcaaaaatagaatgtagatagactaattcataatctggtttactcgagttgcacgtaacttggaacataagagcacgcaagataggaaagtggcgtgtatggagattcaccgagatccacttctctacaataacctttctctccgatgatgtaagctatgttgtaactgtattgaaacttctctgccttgtttttatcaaaaaccaatgcgactttcttcaccacatcaatcacgacgaaatttgcaaaatcaaaacgtggtttaataccaacttttaagaacttgctccacgacacatcgggctcaatcttgtccgtcacccaaatctccacctcacatgtatcccaccgctttaataacatcgcaagcttctcttctttgaccacagatagagacacatcatccaaattcatgaagggcaaaggcagacgcggtccaaatctctctcttgtaaaatcaaaataaaacaagtatcaattttctgattctttatctctagcataccagtaagtcttttctttcaaagacacgccaggttgcatatatactatatcccgttcaagagtgacattaggaaccctccatgaattcgagctcaaatcgtagatttcgaggttatttaggttatcaccaaaaagcctcaagattttgtggctaccacatgatttgtcatatccgagagcaaacctgtcaactgtcctataattataactgggtttgatccatcttggtttcgaacaatacgggttccaaaccacaagcctattatccatgtctttttgtgaaacacataaaaataagccattgcagtgaaagatttgagatatacagaatctccgaattgtattgtccatgctaataagtttacctttaagttctatagagagatcaaagttgttgttttgaataccatggagattgacgcctaccaaataaatactaaattccttgatcatcagaaactctctttcccctaatgcggctatattgcggatgtacttatttgtaaagctcctatctttggttaaagcgttccactttttgcaaatagatcgcactgttctcataaacgtcacagtaaccctagagagaatctcctcaaccaaatcatttggaagatttgacatcatcatcatgatgattgttgtttcaagtttcaaagaagaaacaacatcgcaccgataagttaggtcaagtttcaaaaaccttcttgagaggctacagatagatagttacataaaccctgatttaattaggatatatatggagttacaaattaaaattaaaattcaatacttgataaagttaatttgtaagtatagttgaataaaatatataatttaagaatgctatttggaatataagaaatacttgataaagttaatttgtaactataatgaaagactgttgaatttcaaatagaaattttacaagaaaaagataattctagtaggaaaaggagataaacgaaattctaaagtttgctaaattcaccaaattaaacctcaagtttgcctcgtcccgaaaaaccagtcaaaattgtcttcattgagccattttagatcagaaataaatagccaccatatacagtttcggttataaacgttagttatgtgttcttttctttgtctccttcatctattttgaatagaaaaaatctcaaaattttagccgattttggagacataatctcttgggcgtgaagatgatttgattttgttttgtttagtactggaggaattgcttataaccatgttgaggattggactgaatccaggatactggtataacttgctcgacccttgtcaactctcttttttgtaaaatgtaaagtaaatgaattctctaccataagaagaagtattaagaaacaaattaatatcatatgataaatcttgttcaaagaagatgaaatcaaaatgaaaatgttaactatataaatctgttacttgataatcatagagcatatgagcacacaagatggccaagctgtagtgtgtttggagatttaagaagattcacacttttgaaataaccattctctccagctatgtaagctttgttgtaattggggttatacatccatgaccatgacgagctgtctttctcaaacacaactgcgactttcttttcctcgtcaatgaagaaattcccatagcgacaataaatacttggttccatatcaagttttaagaagatgctccacgacaccgcatcaggctcaatcttgttcgtaacccaaataaccattgtatcccatagtaacaccgcaagcttctcttctttaagagcagatagagacttataacctttgtgtagagtataaccttcattactaaagggcagaggcagaggtgttccaaatctctctcttgtaaaatcaaaacataataagtaccagtctattgattccttatctttagcataccagtaagtatctccattcaaagacacgccttgtttcatatactccatatctcgttcaagagtgccatcaggaatcatccatgaactagagctcaaatcgtagatattgaggttattttggttgacaccgaaaagcctcaggattttgtggctaccgctggatttgtcgtatccgagagcatacctgtcgaagcacccgaaaggaggtcttggcatgatccgttttgtttgtccccaatacgggttcaaaaccacaagcattttttcccgtacgcataaaaatacaccgttgcagtgaatgacttgagatttttggaataaatcatcttttttgtctctgctaacaattttagccttaagctgaatagatagatcaaagctgttgttctgacttctatggagattgacgccgacccaaaaaacattaaattgtgtgatcatcagaaactctttttcccctgataccgctgctttgtcgatgttcttattcgcaaagctccgattttttgataaatcgtaccaatttttgcaagtagatcgtattgctctcaggtatttaaacggaaccctagagagaatctcctccaccaaatcctttggaagatttgacatcatcatcttcgtcgttccaagtttgaaacaaagattgatatcgatgtagcacagatatatttagggcaaatattaaaaactcgtttcatttttcattgtggttgctggttttgtccggagaggcgttcgataggttttgacgttttgtaatagaagacacagaaaccctaaaaagtgtgacggtggagcatctgttacgtttcctatttattgggcccattagacacattagagactaggcccatgtggcaaaaataacattttcgctttaattatcacccttccacagttccactcaaatcaatttttttttcctagtaaatctatattctcatcattctatcaaagtcttctaacacgagtttgtcgatatccatctcactgtcataagatgtgatcagtgttcaagaaacgctagatttttataatttttattacagcaaa

SEQ ID NO: 1303 - DNA, 33330 bp, Arabidopsis thaliana
acaattccgatgcattgatggttccggttttgatgtattactatctggtcagagaactagttttatccattctttagattttgttgtgctgtattggtcaagatttccatgcacctgcaacaatagagtcagttttgattcacttgctcttgttatcgtaagagcccttgatggattgtaacagtaggctttactgaagttgtgggaataggaatcttgattgatactcttgtctgtgagacatgtggttaaaacgtcaccgtctcaaggtcgtcagaagccttgaatagataaatcgtttttggactctttgtagtatttgtaaacagactggagaaaacaaaaacagtatggagcatttctctgtattgatgatatcttttgtgagaggctttgaatcgattcacttaacaatgatgctttagacatatttttatatgtagggacaaaaccattggacatatatctatcagtagacagtataatacaaatggtagaacagttgttacttgttaggtattgtttctttgcctttttttcatttctaccatcacatctaaaacatgaaataattgttagcatttaattattcgattctgaaaatgctactatgcaagcagtagaaacttatctcatgtctttgtcattctgtcttctttgtacacatctgaagtgggagtttgatttttttgtaaagtgaattgtttacgagttgagcaataacgtagaaagtaattgtaaatactaaataataatttgaaaacaatttaaataatctccccaatattaatgcagtaactaaaccagtcataagagctattgttgtaacacacatggattagtttgataacaaaattttgcatgaatattttaattgctaatgctgtttttaaattcgtttaaccgtgtgaaactaaagacttgcgagaatgccacttgcacagtgaatcctatgtttttaggatcccatgacaataaccaatctcgtatataaatatgtactttatgtgttttaaaatggctagaattttttttgaattcttcgtattaaattcaagacatttttttaaatgacattttttgatacttatagtaaaaaacgtacaaccaaacctcaaccaaaatgagaaatagttagttgggggcgtacatagaactgtataagtagttatacttttattacattgaatttgcatgtcagcccacgtgatctccttcttacatgaaagtttgtgttaacttttttttatcttattatttttcttcttgtttaccaatttgtttttctttcttatgcagtgtttttagtcttcaaatatttttaataagtagatattcttaattatgtatgaatcatatttgtgagatagaataaagttttatatgatcattaactagcattttaggcttaagactctggccaaaactatttggacggcagaaaacgtagttaatagtaacctcatctactcgaaaagtaaaaaacaatttaattaaagagaaatggggaaaaaggtcaattttctcggtttgtcgctgtcgggtcctatgtgcatccaaatccatataatttaaccttttttatcaggcctcaatgtgagagagactcgctctctcgtccgacaccatttaagtatttggaattttttactagttccaaaagttacagtcaccatgtgaattgtgaaagggtcaagtatgtgcaccagcaccactgttaatctgaatatatgacatcatgtatgttaccttccaaacatatccttgttttatctgtgaaccagtaccactgtttacatgaatttatgacatcatgtatgttaccttacaaagatatccatgttttattttcttggctaaaatttcatagcagaatatagatagctagtggcattttggagaaattcacttaataattaagcaagagaacttggatcatgtttgagccaaacatagtaatttaagagtaaaatttggttcatatagtcattgtgaacaaacatattcagaatctcatatctaaaatgatattgaacctatagtaatatatacatgatatactaccaaataatttgaaattggaattccataatgtttttctcacaagtggctcaacaacaacttcacaaaattcattacagtttgaactacaacataaaccaacatatctcacgcatgtttttcttattcaactttttattattatatacatatatagcaaagtttcactatatcttggatccattggtacatatctttctttgattaccactcaggtttctctattcttgttaattatactttttagtccttaaaaacggcaaataaaaatatatagtggtcagagttatatggttacacacttacacttacaggcgttaatattgatccttaaaaagaaaactctttttacctttttatagatcagtccatcactttttttttctgttcgactcagtgaaaacttttggtagtcaaaatttagaaactttaaagtgatactccactaatgttttgactcgtatctcatactatatagtatatattctaacttaaccaataaccaacgactctcgtcttcttctttttctcctatctttctctcacctaacctcgcaaagaaaaaaccatcttactttctttttttttctctgaaaaacctcttttgattaggtttaaagatggcatcaaaaaaagcaagaaaaccaaaccgagccgaaaagaaactcacaagaagctgtttcaagaaacaagttcctcaacacaacaacatcaacacaagtataactctcgatcaaacatctacatctactattgtctctacatgttcttcttcatcaacgactttgtcttctcctctagacacaatctactctgttccctctccatccccagcagcggtgctgacgtcaccaggcggttgttgtaccccgaaagccaagaagtctaggataccggagatgctgacgtgtccaccggcgccgaagaagcaaagggtctcgaaaaactgtgtgttacgacggagacagatcgttttctttgctccgccggagatagagctcttcttcgtcaacgcacacgatcgatgaacgtacttttagttaattattagtatcttttttttttttgatataggatcaatacagaaagtagtattagcaggtgatcaaaattcatctctttgatttgttaatacaataacgaagagtaaattattatgttttgcgtaatgttttttcttattttggtttgtttgtttttgttattatttttttcattattttggcgcttgttttttgagatgatttgaatcaagtcggtttgagtttttgtggtagggtatatcaaaaatcaactatgatttacactatcaattgataacccacccttttattattttatattttcttgcttcacttttttctaagtgctatgtattaggttgatgactttaatttctagcctacttagcttcgtcagttattgtaactttgatgtggattgagttttttttttgttcacctgatgttttgttcttcctcgctactttgttcattacctttgatcgtttgttcatatacctcgttcaattgacagttgatagtaaaaaattaagtaatctgaactgaagtagtatatcttagctagtcgtttttatttagaagtttttgatcttacacatgtatacgatttttaaaagtaaaactatcagagagagattatacaatattatttgattgagaaacagtcaccttttacgtggaacttcgtaatgagtttaggtccaataacattaacaccgcatagaaactagcataaattaagtttactaagtcaatcttcagatactttataatataaaaataaattttatatgatatgtatgtatgcacacatttctaattaaatcatagaaacctttcctatatcactaaaaatattcgagaaaaagtagtttctgatatgcccattttttaattaatggtgtatgttaatgggcgttgataatcaaatcccaccaagagtactgattaggtcaatttgtttttcaaaatctagtttcaaatattttaacttaagctttttttttcatctttatataatatcatatttagtaatattaattttctacattttcttccttaattaaaatcatattttaaatccacttcttttaacttcaaacattccaattagtgttcactaactataggaatatgaagataatgttataaaattagtgaaaggaaagagacgagaaatatgagaagagttagtggggatggccgcagtgtcgaggcagaggataacatccgccaagggaatccaatgaagctactcatgcggcttttcttatcattttctctctctctctctctctctttttttcacaaaaattaaaaacacatattaatcacatcatcgataatacagaattgattattcttttttcaacagaataaagaaatgattcttaactatctatacaagggtcaaagcaatcaaaagtgtacatgaagaagctctagttatactagaaatgtacaaaacaaaactcaattaagcaaacaaggaattagaagccaatatgcccaaataatcatatttttttaaagctaattgatttgcttaagaaaggacaataaatattttgaacaaaaaaacaagaaatggataagaaagatttgacagaaagaacaagaaaacactatgattgtgattttaattgattaaacccgtacaatagtatctcaattctatataaaaaaaagttttcaatcacataattttataaaattgtgatttatgttgaataattagccatttcaatgattttctttaaaaaaatatttctatttctctagttacattatactttatcactttactctgcctatatgtattattatttttacaatctttttcatttcttcagtactactagcaatcatgcaagtactaaagagctgaaaagctaaaaatatataaaaccaaattaaagatgttgaagaaagaaaaaaaagagggtaagctattgggcctttataagatagaagctttaatacccattataggcccaggtaaattaattacacatacactcgaattttaatatctactaaaaaaaagttatatgttgccgccgttcacgtggacagcacgtggcagctaaaattcaaaacggaacaaaaaatacttcttacgacgacgatcaaatacaacaacaacaaaataatataataaaattcaattccataaatatttttttttttgttctttcctctgactggaaaaagcttcctcagatcgtttcatcgtccaagcggaagaagcgtctccttcaatcaccgtggacacctccgagactgtctccgattgaatggtatctcgaaatttcagtcatttatgattgcatgaacctgcttatacctttgttctagggtttttgttgtcttgttcccatctctcaatttttttttttcaaagttgcaaaattcaagtttcgactttttgttaattctgtcttcttacgtttctgggttttgattgtttcttgttactgaaatcctttcgtggagtattaagagtcaaaattgctgaattttattgaaattctgttgttttgtgttggatgtttttggtcttgtttcgatagaattggattatgtagttgtagattcatcactaaatatcggattttgaatagggaattgaagacatgcattcaaaatctgacagtggtgggaacaaggttgattcagaggttcatggtacagtatcgtcgtcgataaatagtttaaacccttggcatcgtgctgctgctgcttgcaatgcaaattctagtgtggaagctggagataaatcttctaagtcaatagcattagcattggaatcaaacggttccaaatcaccatccaatagagataatactgttaacaaggaatcacaagtcacaacgtctccacaatcaggtgcattacgcttgcggatttgcttactgttgtgtttaatactcttaaccaagtgttgttggtttatttcgatatgcagctggagattatagtgataaaaaccaagaatctctgcatcatggcatcacacaacctcctcctcaccctcaacttgttggccacacagttgtaacttcccaatatagatatattgttcttatcatttcctttgggaaaattttagctatggttgcttacaatttagttttttcccggttatgaatcatgcagggatgggcatcctcaaatccataccaggatccatattatgcaggagtgatgggagcctatggacatcatcccctggtatatgactatttccaaactatttacaagttttcctaaagcctcaactgattatctctgttaagacgatttaaccatgtgacatgtctaccatgattcatgattgctattgggttgcgaaacatgagattgcatgtttaaatattctattagctgtaggtgctttgtgaagtctagcatgattataattgtctaacagtgttcctgatagatagatgaattatgatttatagcagcagtttattgaagatattgagaagatgtatttagttcacgacaggaatttttaggctcttcttatctatttagcatctatgtgactttataataaataacacatttaacctatcaggggtttgttccatatggtgggatgcctcattcaagaatgccactgccgcctgagatggcacaagaaccagttttcgtgaatgctaaacagtaccaggcgattctgaggcgaaggcaggcacgcgccaaggcagagctagagaagaagctaataaaatccagaaaggtgcattgcgtgttaccatgtatattagtttcttgagaggtctgatctaactgtgaacgcatcacactgcttaatgcatctctttctttgtttgcatggtccacagccttatctacatgaatctcggcatcaacatgctatgaggaggccaaggggtactggaggacggtttgcaaagaaaaccaacaccgaagcttcaaagcgtaaagctgaagaaaagagcaatggtcatgttactcagtccccgtcatcatctaattctgatcaaggtgaagcttggaatggtgactatagaacacctcagggagatgagatgcagagctcagcttataagagaagggaagaaggagagtgttcagggcagcaatggaacagcctttcctcaaaccatccttctcaagctcgtctagccattaaatgacctcacaaggcggcaattcattcttggctttctctttgttggcttattcggtagcagccatgaaagagtattttctctcgtttttttttcttctgattttgtacaaatactttttgtagctttttgtgactttttccctttcagtttggaatacttcagatgttgccacttttctttttcaattctatcttaactaaacatttcttagctggaattgaagtttggaatacaaaactgtgattgagagctaaattccagattgtgtcaaaatgtaaaggagtaatggagtaccacaaaatctttcaagactttcttataaagaactcacctcgtcttggtcacttaagttgacttattgttacaatgaactttcgtttctatattttggtttttttatgttttaagatcagagtcagtccaaccttcagcttcctccttgccttgcgtttcgtctaggtcctcgccttgagtttcatctaggtcgacctcttcagtctggtcgggacctcctgctgaatctgaggagttgtttgccgcatctgtgatgtttacaggttgctgattctccatcaaaccagaaagtgctagctttggtgaccactcaaggacatcatcaatgatgttggacatccttctttggtacctgtatgaacaaaactcatcacaattcaacctctactgcactaaattcaaatgagtagagtacaattagtttaagcgatatttaaaggtggacgagaaggcagtgtatacctggcccgagcagcttcatcaggggcatgacgcctaagcagcatgacaacaacaatagccactactgtgtagaaaagtcgagatgtccacttgggcggttcttcctcgtctttctttggccagaaacggaacagttccttcaatgtggcttcctcagctagaatgttggggaagaaccagacacgctttcccaaaagaatccacatagcaccgaaagcaactgctctcactgcaagaggtaatcaagaaggactaatctcagtataagccaagttaaaactacatgagtatatgacccccttcagtttagtagctatcgctagtaaataatactcccaagaaaatgactctcgaaggtgcaattacaaaaatattaaacagagtatttgtgtaatagagcttaccgaaaagtaaggagagaatcatcagaagaatgcccgcacatgagtagagtacaattagtttgcaacggtgtggatacacaggaaacaaacaaattgcaagagtcaatacaggccagaagaaggacaaaagcgtttgccatagcggatgccgtttttcgaacgtccatgcaaaaaaggcatcattttcagagaaagattgatcgtcctgcatcaaaaaagaaaaatgaaatcaaaagcgctgatatacttgcactgatgaatgcatatcttactcaaaataaaaacaaaacaagaaccaaagagaatgatggtgaaagggttgaatagcaattttctctaagaaacaaacttcaacatacaagacaacaagttcaatagcatatgaagcaacaccaaaatcaacttacacggaaaatctccaaatgagcaggccaagtagagagctttttcttcccgggacgaagagttttagtaacacgatcacagcggaccaaaaggttctttcccaacaaaacattggcaatatcgtctgtgtcaaggtctttatcttcttccagaatatctttaaagtcagggttattcttcataaagctcacaaaatctttccctctaaagtattcaactcgtgcttgctccataacagcccatctggattctaatcccttgtggtctctaactttctcagcaaacaactgaaaactatccttcttcacagcttgcttctagtaaagtaaagacaacaataagcatttgagcatatcaatcactaaatgcaaaggatcatcatttaacagtaccaaggccaaaacaaaaaaattcaaattctcgccacacaagtgattcaattaacattccagagattataattcacaagtcacacaaccaaaacagtaaaatttacgagcattaacatacaatttagcaaaacttaactatgaaaaaggcctatataatcatgcaatcgcaggtcaaatgctccatcagagaccaaaacagatcaaacaaaaggaaacgtaacctaagaacaaatttttataaaagagattagagagaaatgagagaggagagcaaaccctaggttgagaatcagaaccagaatctctaacggaagtagatgcagatcccgatgatcgtttaaccctcttcttctcggctccgaccggcttcttcatctctctccctcttcttccgagtcggagagtttttttttttcgatttttcttttacagatccaatgttttttgttttgttataacagaacaaaaaaaaaaattctggttttttgggtaaacccgtagagttaagattgcaataccggtttatagtagaccggttaactaacctagatttattaccaagtgctattaaaataacgtagactaactttgaaaattttggaatctaaaaagtatttcatttttctcacatttcaagattgatgtttgactaacatttatacatttaccttataaaaagatttccacaacttcaaattatattggatctttcttcataactaaaaaaatcaacaaattagacgtttagacctttttatctaagtaaaattagacctaagattatcatttaaaaatattttcagtacaaatgataatgtgatttttatgattagaaactttaacttacacatctttttatgttgaacgattttatgattgacggtttatcgataccacactcacgattaaaaaattttactttttagtttttactgattgaactatagcgatcaactctgtatgtatgctagagattttcggtaagcttgtctttgttaatacgagaaatttgtattctatgaatcgaacctcatattcatttatgatatacaatcactttaattttaaacttaagtgttacaatagaaaaaagcataatttttagtagaatatgatctagtgatgatataatagacggtttgcaatagaaaatgtgtttactcatgattaaaagagagaaaacgaaactataaattgctcagctttcacttgattagaattttactttttaacgggccaattcatgtccaaattataggccttttaacggcctatactttttgatatgcttagcttttttacttatccactccaaattcccaaaaagcccctgagtttttcggattttacattttctaccagagtggagaaaaaaaacagagaagaggaaacaaagcaagcaaaaaagagttgccatggaagctcttattgcttccacttccttcttcgtccccatctccaactcttcctcctcacacattatcaataacagattcttcccttcattttattctcccaacttaaatttcgggacttttcggaaaacttccttgtcatcatcacacctcgtcttctcatcttctgcaatttccgcaccgccttcttctactgttcttactcgaaacagctattggatggtgttattggataaacctccgcattgggtttcttccaaatcagccatggtagattattatgtcgagattcttgcgaaagtactgggaaagtgggttctttttcattgcttgtttgtttcttttgagctttgtgcttcaactttctgcttactattggtactgattctgttgtttgcagcgaaaaagatgcgcaagtgagtatatatgatgcttcctttgatacccatttcgggttttgttgtcatatcgacgaagatgcttcacgacagctcgctagtgagtattctatcacagagagtttcagattctgtttctatggttagttacttaggtgttttaattggttatctacgaacttaggtttacctggagtagtgtctattagacctgaacaggattacagttcagagaagaagaattatggcattggtagccataaaggtgtttcattgtttgatcatgggacagtaaaacattggatggtacgaatagataagccaggagttgggattgttactaaagcacagatggttgatcattgtgttcaattgctatccaaggttttgtggaagtaagtttcttttttatttattctgccttaagggaaggtattatttccttcagcttttagaactgcaactttgactcttttctttgcagtgagaaggatgcacagatgtgtctttatcatgtttcctggcagtctgatttcggattttgttgtgatctcgatgaaagaagtgctgtggagttagctggtttgtgagtttagctaatgaaaaaattagacaacaatgtttgtcctgaattaagctaacagaataagagatggtgtttaaattaatgcaggcgtacctggtgttcttgctgttgttcctgataacagtttcgagtcactaaacaaagactatgaaggtctgtcttgaatactgatcttatggattgaaaataatgttctacgatattgtttagaatctttgtgtagctgattttgatgaatatcagtgtataatctcacattgtagtaactttggctctctttctttttcacaaaaggcgatagtacgcaagattcaagagatcaagatgattcagagtctcctcccgtaaagacaaagaagctgtttataactggtatgcttaatacttgagattgtatgcattcttttggtcacatagcataatctgttatagtgacacaatatccatagcattttaaggaaaaatcatgcttcccccaattcattgcctgcatcttaatttacgaactaagctcattcagaagataacatttactaatagatcatgtatcttggtttaggactgtctttctacacatctgagaagacattacgtgcagcatttgaagggtttggtgaactagtggaaggtactcatgatttgctatcctatccaagggtttaaaaaatttatcattaggaaaagatagataatcacagccctagaacattcctctgcagtcaaaataattatggacaaaatatcgaagagatcaaagggctatgcctttctagagtacacgacagaggaagccgcaggcactgcactaaaagagatgaatggaaaggtaaatctagattttcgagatcttaaagcaaaatctttgttatcaactcaaagtaaaatctaaacatgaccgttgattcacagatgttatggtgtttcttttttctctgtgcagattatcaacgggtggatgatagtagtagatgtagccaagaccaaaccgttcaggcaaaacagaagtcaaccaagtttcgggctctagaatctgagtgttagggtgatacaaccatggggatttaagatgcttcaggcgaagaaagataaggcaagtagtatcatttttcatactagatcaaatataaatttcacactatgtgacagctctgcaaaaaaaattcacatgtacatatctatatttgagtttacaagatttcggccgaatgaaaggcctactgatacaagtattatatagttgtcaccttggggcttgggcgattaacacgcttaacgagtaaataaactactactatttattttttcagtgactgtcatatattacttcagatctacttattatatcacgttttttaagagaaaacgtattatataaaggtgataaacaaagtatggagtctttataaaagattactgcctcttcttcactatgagcaacaatggcagcaatgatcaccgttgactttcaaaacagcttcgcattcatcctcttttgtctcttctctctcctttgttactctctcttcttcaggaaagcaaagggctcacgagctggtcgtgatcttcctccgagccctccttcttttccggtaattggtcatcttcaccttcttctctctgttttagttcacaagtcttttcaaaaaatctcctccaagtatggacctcttctccttctccgcatcttccacgttcccatagtcctcacctcctcggcctcagtggcttacgagatcttcagggcccaagatgtgaacgtctcctctcgcggtcaccctccagtggaggagtctctctggttcggattttccagcttcttctttgctccctatggagattactttaaatttatgaggaagctcatagccacaaagcttcttggaccgcaggcactcgatcgttcacgaaaaatccgtgcagatgagctagatcggttttacagaaatctgcttgacaaggcgatgaagaaggagagtgttgagatcggtgaggaagcagcgaagctcaataacaatatcatctgcaagatgatcatggggaggagttgatgatcatggggaggagttgttctgaaaagaacggtgaggccgagagagtcagaggcttggtgatcgagtcgctggccttgtcaccgaaaatcttcttgggtatgatctttcacaaacctcttaaaaagcttgggatctcactgttccagaaggatataaaaagtgtttcccccaagttcgacgagctgctggaaaagtttcttgttgaacacgaagagaaaatggaggaggatcattataaagctaatgacatgatggatttgttgttggaagctatggagatgagaatgcagagtataaaatcacaagaaaccatatcaagtccttgttcgtggtaaacgcccttactaagaaacatatgtgttgtgaaatcgtggaataaaccttaagacgtaaacctttgtattaagcgtgttagtaatacaaaggcccgaaaacctccgatactctttagatatggaaaatactctaataacagtttgctactacaggaacttctcgttgcaggcactgacacctcggcgctagcaacacagtggacaatggcggagctcattaataaccctaccattcttgagagattgcgagaagaaatcgaatcggttgtagggaatacaaggttaattcaagaaactgatctatcaaacctcccttacttgcaatcggtagtcaaagaagggctaagattgcatccgccggcgtctatctcggtaaggatgtcccaagaaaggtgtgaactcggagggttctacataccggagaagacattacttgttgttaatacttatgctataatgagagatcctaatttctgggaagatcccgaggagtttaaacctgagaggtttataacatcttcaagatcagagcaagaggacgagatgagagaggaagtcctaaaatacattcctttctcagccggaaggagaggctgtcctggatcgaatctagcttatgtctctctaggaatcgcgattggagtgatggtacagtgctttgattggagaatcaaaggagagaaagtaaacatgagcgagactgctggaacaataatgttggccatggctcagccacttaagtgcactcctgttcctcgcaccctaaaccttttgccatcaagtctacatattcccagttcttgatttggagattttagttctgccttttgttgtttaatctcatgattacgcgtgattcctgtttattggttaccttttatgtttaagttgcttcttctataaatattacttgctttctgttgtttcaaaaaacctcatgataacacatgagttcagtttggcctattttgagctgttaagaatcttgttatacacaaaagtttgttttattgttaaattttagatgcttcaagccaagaggcagacagtgtcagctctgcaaactctataaacatttagtttgccaaatttatcaaaattggcattattttagccatttaggaaatacaccaagttgcttcttctataaatagtgctgagaacaaaaattttttaaatcaattgtgatgttgtatatctttatgagttatcatttttggcaagaacttgagatttattagtgtttagagaaggatgcgcagatgtgtctttatcatgtttcctggcagactgatttcggtttttgttgtgagtttttcaaatggaaatgtcagacaacaatgtttgttgacttgttctaaactaaagttaggagatgaaaacagattgtgtttaattgatgcacgcgtgcgtggtgatcttgttgtggttcctgattacgaaggtctgtcttggatactgatcttacggatcaaaaacaatgtgctactatattgcttagaatctttgtaaacttacctttagcttattttgatgagtatcagtgtataatctcactttgtagtaactttggcgctctcttttcctttccaaaaggcgataagtacacaagattcacgagatcaagatgattcagaatcttctcccgtagagacgaagaagctgtttataactggtatactaacacttgagattgtatgcatgaattgggtcacatagccatataacatgttatagtgacaaaatctccatagcatttaaaggaacaaacacataccatataactggtacagtgacatgatggatgtgctgttggaagcttatagagatgaaaatacagagtataaaatcacaagaaaccatatcaagtccgtgatcgtggtaaatgctcctctcttaggtggattcgtgagtgaacactattgctttgacctgactaagaaacgtttcggttgtgaattcgggtgaaacctttgaataaatgtttggaatccctaaatgtttctgtttgctactacaggatcttattgttgtaggcactgacaccttaacgcaaacaatacagtggacaatggaggagctcactaacaaccctaacattctggagagattgcgaatcgattgtagggcttaacaacgttaataaaaaaaactgatctaccaaacctctcttactagcaagcggtagtcaaagaagggctaagattgcatccaaagccggccataaggccaagcaagcaaaacacatgcttgcggccgcctagaatatcatttagtttcgggcattttctagttaagttcttgtcgtctaatagtttaaactcaatgagttcgacccttgaaagtgaagtttaaacataaaaatattttacaaccaaatcatgaaattaaatatattatgtggcctattttttttccttagcttgtagcctcgcgaaactcggagacgtgaactcaatgggttttgcataccagagaagacaatatttgttgtcaatgcttatgccatgatgagagatcctgattttttgggaagattttgaggagtttaatcctgaggatttaaaaaacatgaagctaattatttataaatacaatataatcgattattaataaacatacaaaaaaagggtgaattattatgattttaaaacacttgaaaattgaaatattgtattcgattatgtacagccaaaataaagaagccacgagacttagtaagcattatattaatatcaagtgatcatgatgatcacaaatatagacagcgaaactgaaaatgtcagagatacgagagatgtgtgttaaatgaaatcgtatatcgttatttaagaaaattttaaaaagttttaaagaactaaaatcctaaattttactcctacaatcaaatagattttttttgacgtattatctgatcggttcaactaatccaccgaatcactggttaatagcaaattttctaagttttctgattttaaaattgccagctgacgttaaaactaaacccaaacaaacaaaaaaaatatactaaagtcaattatgtaaagccaaaacaaagaaaccacgagagttagaaaacattatattaataataaaatatcaagtgattagtgatcatgacaatcagaaacaaagacaaaaaaaagaccgaccggtttgttgcgctaaagttagacgagagatgtcacaaaatatgagagaggtgtgttaagtagtatatcactatttgagaaagattcaaaaattttaaaagtaattaaaatatattaaagtcataattttgaccggtttgttgcgctagacagaagtatattattttgggcgattatcacgagttattaaagtattgaaacacaagtaatgaacaccggttatttaagtattaatttgatcaatggttgtacaaagaaacttatgaattaataaaaggagaccgtgtatcaggtgaatcggactgtttttccagttatgcaaataccaaatcttttaggttaccttcaaggcttcaaatactatttttaaacttgataactggtatgcttaacatttgagattgcatgcatgcttttgcttttgaacttacatagtagaatctgttattacagtgacaaattctccatagagtttaaaggaaaactaagcgtttattgaataatgatgattacttttgcttcctctcaatttgttgcctacaccttaactcactcagaagataacatttacgaatacatcatgtttcttggttttgtgaactagtctacacatctgagaaaacattacgtgcagcatttgaagggttttgtgaactagttgaaggtactcatgatttgctatccaattcaaaagtaagaaaaataatatcattgggaaaagatagataatcacagccctataactctcctctgcagtcaaaattattatggacaagatatcagaaggctatgcctttcgagctagagtacacgaaaaaggaagccgcaagagctgcattaaaagagctaaatggaaaggtaaagctagattaccaaaccgatcaggcaaaactgaagtcaaccaagtttggggttctagtatcgagtattaggtgatgcaaccatggggatttgagatgcttcaggccaagaaagaaaaggcaagcaatgtcatttttcacactagatcaagctttatgaggctggagtgttccaacttccaactctgcaaatagcaaaagacatttggttacgtttaacgaggacattaccctaatatctaaatatttcacatgcacatatctaaatacccactatgcatgtgacatctctgcaaatatttcacatgcacatatctataaaattggattttacaagattccggccgaattaaagggcctactgatagtgaagtaatgtatagttaatcaccttgggcgatgaacacgcttaacgcaagttattaaactactactattcatttttatcagaaaagaacttctgatctacttatatataaaaacacttcagatgtacttatatcacgttcttttagagagaaacgtattactttatgtttaggtaataaacaaagtatggattcattataaaagattactctgtttcatttgcctctgcactttcatcaacaatggcagcaatgatcacctttgactttcaaaacagcttcatcttcatcctcttttttctcttctctctcctttgttactctctcttcttcaggaaaccaaagggctcacgagctggccgtgatcttcctccgagccctccttcttttcctgtaattggtcatcttcaccttcttctctctgctcttgttcacaagtcttttcaaaacatctcctctaagtatggacctcttctccatctccgcgtcttccacattcccatagtcctcgcctcctcggcctcagtggcctacgagatcttcaaggcccaagatgtgaatgtctcctctcgcggtcacgctccagtcggggagtctctctggtttggatcgtctagcttcttcttcgctccctatggagattactttaaatttatgaggaagctcatagccacaaagcttcttggaccacaggcactcgagcgttcacgaaaaatccgtgcagatgagctagatcggttttacaaaaccttgcttgacaaggcgatgaagaaggagagtgttgagatcggtgaggaagcagcgaagctcaataacaatatcatctgcaagatgatcatggggaggagttgttcagaggagaatggtgaggcggagaaattcagacacttggtgatcgagtcgatggctttgacaaagcaaatcttctttggtatgatctttcacaaaccgcttaaaaagctcgggatctcactgttccaaaaggatatactaagtctttcccgcaagttcgacgagttgctggagaagattctttttgaacacgaagagaaaaaggcggagcacaatcaagctaatgacatgatggattttttgttggaagcttatggagacgaaaatgcagagtataaaatcacaagaaaccatatcaagtccttgttcgtggtaaatgttcttcccttctaggtagatgcgtaagcgaacaccattggtcgaaacatattgtggcatgcataaaactttaaacataaatctttgtattaagcttgtaagtaataaggaacaacaaagctaagacacttttatataggcccaaaaacacatgatacccttagatataggaaatatggaaatactctaataattgtttgttactacaggatcttgtcattgcagggactgacacctcggtgcaagcaacacagtggacaatgggggagctcattaacaaccctaagattcttcagagattgagagaagaaatcgaatcggttgtagggaacacaagattaattcaagaaaatgatttaccaaacctcccttacttgcaagcggtagtcaaagaagggctaagattgcatccgccggggtctatctcggtaaggatgtttcaagaaaggtgtgaactcaaagggttctacataccggagaagacattacttgttgttaatacttatgctataatgagagatcctaatttctgggaagatcctgaggagtttaaacctgagaggtttatagcatcttcaagatcagagcaagaggacgaggtaagagaggaagtcttgaaatacattcctttctccgcgggaaggagaggctgtcctggatcaaatctagcttatatctctctaggaatcgtgattggggtaatggtgcagtgctttgattggagaattgaaggagagaaagtaaacatgaatgaggctgctgaaacaactgcgttgtccatggctcagcctcttaagtgcactcctgtttctcgaaccaaaaaccctttgccatcaagtctacatattcccagttcttgatttggagattttagctttgccttttgttgtttttgtctcatgattgcgcgtgattcctgtttactggttacctttggtttaaattgcttcttcaataaactgtgttgttcttgtgtgtaattatgtgttggcaataactttgaaatattattatttttgtttaggccttgtgtgttacatacaacaagattatgtctttcacaacatattggcattttacactctacaaaaccagaaaacttacactttaacttccccatcatccttgtttcctcggcctcagtggccggcgagatcttcagggcccacgacatgaacgtatcctctcgcggtgctgctgcgatagatgagtccctcgtgtttggatcttctggtgtcgtctacgctccctatggagataacttgaagttcgtgaagaagaaataaaatataagatcaagtcaaattaaaaaaagaaatcagatatttatgtttaaattaaatagattaattttagaaaattaacaactcataaaatgtagctaaacaaagataagatttatttctaaaatgtatttaaaaaaagataagattaagagatacttaaggatataaatcatttaatttaatatattttgtcagatttattttataaataagaaatttttaaggttttgactaaaaagtttacaaaaatgtatatatagattaatttggtcaatgcctttacaaaggaacttacgaattatttgaaagaaaaattttattctatagacttggatacaacttttttctttaatccgaatggggcccaaattttgttggtcccgcccttgatgtatttaaactaatctacgcataatatggatttaaatcatttcaatcagagttttttttatgagatacccactaatgaaataatagtaaaaacatatagaaaaagtaggaaaaaaagagaaaaaaagagagagacgtttcttgcaagagagactgaacttgtattgacagttgtcattcaactaatggtatatttacttaaaactattaaaataaaaatatttttttcttttcttttgagatagtctccatcgtttttgccgatggagatgataaacaaagtatggattcattataaaagactactttgtttcatttacctctgcatttttgagcaacaatggcagcaatgatcactgttgactttcaaaatagcttcatcttcatcctcttttgtctcttctctctcatttgttactctctcttcttcaggaaaccaaaagattcacgagctggtcgtgatcttcctccgagccctccttcttttccggtaattggtcatctttattagggacaatgtcccacatcgaaagttgagtaggatcttaagtgatatatataagatatgggtctctccacctattgccaattggttttaggttggaagcccacagtctaatatggtatcagagcccgatccgcacatactcaatccgatccacatcggtccggcccaatacttggcccgccgatccatgcccaaacatatcgagatcaatggctagaagagccatcatctcgagggggcgtattagggacaatgtcccacatcgaaagttgagtaggatcttaagtgatatatataagatatgggtctctccacctattgccaattggttttaggttggaagcccacagtctaataatcttcaccttcttctctctgctcttgttcacaagtcttttcaaaaaatctcctacaagtatggacctctcctccatctccgtgtctttcatgttcccatagtcctagcctcctcggcctcagtggcctacgaaattttcaaggcccaagatgtgaatgtctcctctcgcggtcacgctccagccggggagtctctcttgtttggatcttctagcttcttcttcgctccctatggagattactttaaatttatgaggaagctcatagccacaaagcttcttggaccgcaggcactcgagcgttcaagaaaaatccgtgcagatgagctagatcggttttacagaaatctgcttgacaaggcgatgaagaaggagagtgtcgatatcgttgaggaagcagcgaagcttaataacaatatcatctgcaagatgatcatggggaggagttgttctgaggacaacggtgaggcggagagagtcagaggcttggtgattgagtctacggccttgacaaagcaaatcttcttgggtatgatctttgataaaccgcttaagaagcttgggatctcattgttccaaaaggatataaaaagtgtttcccgcttcgacgagctgctggagaagattcttgttgaacacgaagagagaatggggaagcattataaagctaatgacatgatggatttgttgttggaagcttatggagatgaaaatgcagagtataaaatcacaagaaaccatatcaagtccttgttcgtggtaaatgttcttcccttttaggtgtgattcgtatgtcatggaataaacatatgcgctgtgaaatgatggaataaacctaggccactcttagatatagaaaatatggaaatactctaataacagtttgctactacaggatcttgtcattgccggcactgacacctcggcgcaaacaatagagtggacaatggcggagcttattaacaaccctaacattcttgagagattgagagaagaaatagaatcggttgtagggaacacaaggttagttcaagaaaccgatctaccaaacctcccttacttgcaagcggtagtcaaagaagggctaaggttgcatccgccaggggctgtgttcttaagaacgttccaagaaaggtgtgaactcaaagggttctacataccggaaaagacattgcttgttgttaatgtttatgctataatgagagatcctaagctttgggaagatcctgaggagtttaaacctgagaggtttatagcatcttcaagatcagggcaagaggacgagataagagaggaagtcctgaaatacatgcctttctcaactggaaggagaggctgtcctggatccaatctagcttatgtctctgtaggaaccgcgattggagtaatggcgcaatgctttgattggagaatcaaaggagagaaagtaaacatgaacgaggctgctggaacattggtgttgactatggctcagcctcttatgtgcactcctggtcctcgaaccctaaaccctttaccttcaagtctgcatgtacccatttcttgatttgggagatgctagcttatttttcgatgttttaatttacctcatgattacagatgattcccgttcattgtgatgttttatttgtattgcatatcataatttaataacttgattaaaccatagtacaatacatgtattgcaagctttattataggtgtatcttctttattactattggaaaaaaaaaaatcttctatgttgccatattcgtcattattactcttatcacttccaataatctatttttttctttctctcttatcattattatcgtccttggtgccttgagacttgtggtgagaataaattaggaaacactccttgacttaagattgtttagtgtgaggagatattggttgtttgaaaaaacagataaatagaatgagatttgagtgtggtcaagaagaaaaaaacgttgaatatatataaaagtatatttaggagatattcatgtgaattaatgtgtgctttactctgatttgagtttgcttaacgtttttccaaaatttaaataggtagcattttttaagtaataaacaaaagaatgaattggtcttactttatattaatggattcttgattaagtttcacctgttttttcactttggagcaacaataatggcagcgtttatcagcgttgactttcagaactgtttcatcttcattctcctatgcttcttctccctcctctgttattctctcttcttcaagaaaccaaaggactcacgaggctgtgatctacctcccagccctccgtctcttccgattatcggtcatcttcaccttctcctctcttctctatcccacaagtctttacagaaaatctcctctaagtatggacctctcctccatctccggatctttaatgtccccatcatcctcgtttcatcggcttcagttgcagacgaggtcttcaggatccacgacatgaacatctcctctcgcggtgctgctgcgatcgatgagtccctcgtgtttggatcttctggtgtcgtctacgctccctatggagattacttgaagttcgtgaagaagatcattgccactaagctgcttcgacctcaggtgttggagcggtcacgaggtcttcgtgctgaagagctacaacgactttacaacagaattcttgataaggcgaagatgaatgagaacgttgagatcggtaaggaagcgacgatgctcatgaacaacatcttctgtaggatgagcatgggaaggagtttctcagaggagaatggtgaggcagagagagtcagaggcttggtggctgaatcatatgccttggcgaagaagattttcttcgcatctgtactgcgcagactgcttaagaagcttcggatcccactattcaagaaggatatcatggatgtttccaacagattcaatgagctgctagagaagattcttgtggaacacaatgagaaactggacgaggaacataaagacacggatatgatggacgtgttgttggcagcttatgcagatgaaaacgctgagtataagattactaggaatcatatcaagtcatttttcgtggtaaatgttcatcattatgtcagatttcatataaggagggtccaaacaaaatttacttataattgttccgagtctttttaacgcaggagcttttcgtgggaggcactgatacctcggtgcaaacaacacaatggacaatggccgagatcattaataactctgacgttcttgagaggctgagagaagaaattgactctgttgtagggacatcaagaatgattcaagaaacagatataccaaaccttccttatttgcaagcggtggttaaggaaggactaagattgcacccaccatttcctctcttgacgaggaagtttgaagaaaggtgtgagatcaaagggttctacatcccggagaagacatttcttattataaatgcttacgcttggatgagagatcctgattcctgggaagatcctaatgagtttaagccggagaggtttttaggttcttcaagattaggacaagtagacgagagagaggaagctcagaagtacattcctttcggcggaggaaggagaggctgtcctggagcaaatctagcttctattttcgtaggaaccgcgattggagtgatggtgcagtgctttgactggggaatcaaaggagataagatcaacatggaagagacttttgaaggactgacccttaccatggttcatccaattaagtgcactccgattcctcgaacactgccttttgtaacttctaatctccagagtcctagctcttgacacctaactcaggaacctgtaagaagtttgctttcttcatgtttgttgtattgaaagtctaacattcagatcaaagaaactttatattccaccactaatatacaaagcctgctatgtaataatatctttggtttgtaatgcgagagaaccttgttgaataattgcgattctatataactttgatctgttgccaaaataaccacagcctttccatttatttcttggttcatctaccaaaatgatcagaattggcattatttgagctatttatgagaatacacaaaaatctgcttcttgatttattcgcggcaagatgatttgctagttagttaaaatatgtgttaccaagtgactttatcattggttttaattgtgttctatacagagaactcaaggccaagtaaccctaaaatacacaaaagattcctacttttcaaccattgtttactctgtggtgacttttcttttccaacaatcaaaccctttttgtttgcagtttcatttcatattaatttacaagagattttaaacatataagtaaccttacagaggttgtatctatcacaatggtgaagtcaaattgctagaaaaaggcgttctcacattgcagtatagacataataacgttacaagttacaagactaacacataaacatacttagcgatcgaggtagaagagttgatgattgcagaaagagacaagaaaattgtgaagtgggtcttaataactaagatcgttggattgtcccattttacacaatctttttcgacatgtcaagcttcctcttctcaatctcatcacacatcccctcttcttgcctaaatactctcactgttcacccgcttcctcataaattgactcgttacatatctatataccgagcggtcggtggtactaacctccaattcgcaattccctaaggtagaacaatatgcgatttcagccttggtcgagagagctaagttaggagttgtaactagtcaatgttcacaatttactgtcatgtttagtagatatgctttttttgtcggcatgtagttgatatgcttaaggcggtaaataactcttattttttggtgcaaaaggcggtaaataactaaaagtaaataaaacgcgtatgttcattaacggtaacgccgttatctctgacgaaaacaatccatcccaacgacgacgtcgtcacgagcttcttctctgttttcttctttctctattcccggcccgtttagcgattagaacgaaaccctaattggtcgacgaaatgaaagggattgcgaggcttgtaacttctctatcgcgaatcggaggtcgcaaggtcgtttctggaacaagtactgtgacttcttcttcgtcttcctctcttctgctatctcgtcgctcgcttttcatctctgccaccaatttacttaattcccggaccaaggattctgctcttccctcgttgaattcttctttacttgctcagaaatggaatttcctcggaggtatctatcttctagaaggtttttagttcggagttttcaggcttgaagttagaacaatcgtttatctttcgaaccattaaaacgaatgattttggcgaattaagggtctcattagcctaattcgtgggtttaattcgtgtgcagggcagagaagaacaatgtttatccaaacccaatcaactccaaatccttcttctctcatgttttatcctggcaaaccagtcatggaagttggaagtgctgattttcctaatgttcgttctgctctgggttcgccattagccaaatctatttactccattgatggtattgttatctcttgtgtgtagtcttttctttcgaaatactttctctttcatttgattatgatgtgactttgcaggtgtagttcgagttttctttgggtcagattttgtcactgtaactaagtcagatgatgtatcatgggatattctcaagcctgagatatttgcagcagtcatggatttctattcttctggccagcctttgtttctcgactcacaagctgctgctgccaaggatactgccatcagcgaggtaaaacccctcccgctctattaccctcgtgatcgcttcctcactttcccattagttagttttgtttagagtgtgattttctggacctcttggattcttcagggtgattgtttcttatatagtttgtgttggttgtctcgtgcatgattgaacatcttcttgagcatttgttgagggattggagagtgatagtttgctgtaaactttatatagacatgatatacttggttatggaatttatcccagttgctttaatgagctgatgaatatgagttatgattttgaagtagtagctgagcgtgacaactagaatgagagatgtcattttcccttacttatgatgttctgtttgattatggattaacgttctgcaatgctctccaaggttttggtagataagctaatggtgacaagtgtaaatgttgctatttcttgctcattggtgaaacttttgtgattcaggatgactctgaaacagtagcaatgatcaaggaactcttagaaacacgcatcagaccagcagttcaagatgatggtggggacattgagtattgtgggtttgatccgtaagtttatacttctttgagttgtagcaatggtcaatgagtcctgtttctttttcttgtctcttaagtcttaagtaaaaatcctttgggtgggtttaatcagggaaagcggtatagtgaagctgaggatgcaaggagcttgtagtggttgtccgagctcatctgttactttgaaatcgggaatcgaaaacatgctgatgcattatgtatccgaggtaacagagatcctcctaacatttcttttactacatatggataattctagacctatctgtctgtgttcaagttttggtgttaactgttaagcaaccattggagaatcaagaacttgttaccgtcacattcttctaatgaaagttttttttgtgtaggtgaaaggtgtagaacaagagtttgatggggaagatgaagagggaacgttgtctggagagatgagagtagagtaggagacctcctctttgctctttagtgtacagaaaaataaatcccacttttttcttcaatccttggtgttgtttctgggcttttgaatcacactcaaggatctgtttactgagagatctgagttgttgtttttttgtagcttttgttgacttacacttgttttgattatttgaggttaagcaacgaaagatgtaccagaatatttgaaatttccgagtattataacacgatttacaagaaaacagtagtaaaaattgactcaatttttgaacaattttgtttgagaatgttattatttacgttgtacagatatcaatcacctaaccggtcaatccaattaaactgaaccataattaatatccggttcacgtttggcgtacagtttacggtttggcttctctacaagtagaaagcgttaaagagtaaaaggaacaaaagtactaaaccgtcgtcttctccaagaggaatatacagagaagaaagtcaagaaacctcaacattcgccggcaatggcggcggcgaaaaaaccgactctacaagacgttgtttccgatgaacttaactatgaactctgggctccaaccttgaaaaatgctctaactgaaaaaggactttgggatgttgttgaaaatctaatgccggcggatctatcgaagagtccagagctagcgacggagattctaccggaagatcttctgaaatggagtgattttatggtaaaagacagaaacgcgcttcagattttgcaatcttgccttccagtttctgttttgagattgacacttgagaccaattcagccaaagatctttgggatttgctggaatcagctaatgaacaagccaagttagacaagaaactcgaacaagataaggtagaagaaggagaacgtatctcctcattgttgacgaagattgctgataacagtttatattccaatcttctggctatctcccaaatggtaatctcgctgtcagattcatatgagcatgaaacgaacgagctcatactcatgggtctgaagaagctttctttttaccgatttcgtgaccttcttgatctactggaatcatgtacagtgaatcaaaccttgtacaatatcatgaaaggaaatgggtatggatcatcatcacacgatttgggtaggatctactggttaaactccatgtcagattcatatgatggtgcagctctggtgatggaagaactgatgtgtgtcaagaatctcacttttaagaatactcgtgagctttttgatatgtttgaattagtatcagtgaagaccatcaatgaaattatgaaggactttgaggttggatcatcattacgttcgaaagaattttgtcattcactcaatgatcttaggggtttgctaaaagaagcaaagttagagaagaaaggagattgttctgcttccatggttttgaaaagggtcatgagttctaggcatgaaagaggagagtgtatccattgtggaggaaaagggcatgtcttcaaagactgtagcaacagaaagaatcaaagcatgaatgttggtcctgtgacatttgatgaggatatgtggatgctatacagcaataccagtaaccatatgactccatatatcaagtatttcaccactttagacagatcacgcagagctcgtatacaatcaatcaagtctcaaggaatgggagatgtgaagatcatgaccaaggaagggaagactaagatgatcaagaatgtgctttatgttccggggatggacagaaacgtgttgagtgttcatcagatggtagaaataggctacagtgccgtaatgactgatgacatatgcactataaaagatcagaatgggagattatttggtcaagccttgttggaaaagagaggtttttttctgcgtttgcaggtagttgaaggtaatctcacctcttaactactggacttactggtaacctgtcgactatgcggtcacggatttggtaaggttgattcagttttcaagtttggaccatctggcatcaatcttagtttagatgaaacattttttggatcactgttcatatgctgcgactgtttttgactttttgggatatgaacatatatctagtgcttatcagcttaatgtgaagtctttgtagtaaatcatcttggcgtggtcacaagtcaaagccatcaatcattcttgttgactagcgttggagagaaacttgcattgcatgtggtgtaataactttgaccggattaagccagttctaatcacaagtcaaaaccatcaaggcatcaagcattcttgttgagtagcactggagaaaagacttgcatgtgatgtagcgtgtacggtttataataacttaaccggattaacccaagttaaattgaatcagacttgaccaaatcggattccccttaaaataactcatcccaatttccaaaccgattcgtaaacaccgtaccaacccaaattttagagtgtatataaaattataaatagacggccgagggattcattttctccgagagaaccaaagaaaaggttgtaagaaaccctaggagtagcctgctatgagggcggcgaatcctatgactctacaagacgttgtttccgatgacctaaactatgaaatctgggctcatattatgaaaactagcttagtggagaaaggactttggtacgttgtcaagtacggaatcccgccggatttatcaaagattcgagagttagctacgaagattcaagctcaagacctttcaatatatagagattatgtggcaaaggactctaaagcgctccagattctgcaatcttctcttccagattcggttttcagaaaaacacttgaggtcactacagccaaagatctttgggatttgctaaaagaagctgacgtacaagccaagttagagaagaaattacctgagtaccaaatgttagcaatcgatgttggtcatttgacatttgatgaagatatgtggatggtatacactactaccaccaaccatttgactccgtatgtcaagtatttcactaatttagacagaacatacagagctaagatcagatccatcattggatctattatcatgtctgaagggaggggagatgtcaggatcatgaccagggaagggcagaagacgatcaagaatgtgctttatgtccctgggatcaacagaaacgtgttgagtgttcctcagatgacacggataggatatagagttgtaattgacgctggcaatctcaaatgcacagtaaaggatcggactggaagattatttgctgaatccttgtgggataataagagatgtttttatatgcgtttgcaggtggttgaaggcaatctactctcttaattactagacgtactagtaatcagtttattatgcggatttggtctggtttattcagttttcagtttggacccattggattactctatcctctgcttttgtttttacgatatgaacatactacagtctacatagtatatgtctattgcttatgttcatgactttgtctagtttgtcaaattcaaaaactcaatgactgcttcaaatcttcagtcatcgttcaaatgcactgcatcattttggtgtggttatagctctgatcacaattcacaagtcctcaagtccaaaccatcaaccgaacgaacaagacccaaccggatcaatgcctatacgttataggccgtcttttaaataaaattaaaaattgggcctataactaatgcgttaaatctattgggcctattgaaagcccagtcaataaactaatacactcacagagcactagtagcatcgtatcatcttcttcgttaagtctatagggttttgtttctcggccgccgtttttggaaagttttttacaataaaaaaaaaaatagatactttttgggtttgagggaaatagtttattcgctttgtcagagatactaaaatgataatgaaaggcgattggtcggcgacgacaaaacctaatctacaagacataatttccgatgaccttaacatggaagtctggtcggcgatgttgaaaaccatcctaacggaggaaggactttgggatgtggtcgcgaacggagtcccgccggatccatcgaagattccaaagttagccgcgacgattcaagcagaagagctttgcaaatggagagagcttgcgagagaagacatgaaagcactccaaatattgcagtctagtctcacagattctgtgtttagaaagactctctcggctacttcggctaaagatctttgggatatgctaaacgaagtacctgatcatgtagctgaatgtttagttgatgatagtccagtttatgaagatagctggaggataagctgcactaactcgaatcatataacttcacatgagaagtttttcaccactttagaca

SEQ ID NO: 1304 - DNA, 18679 bp, Arabidopsis thaliana
atcattaaaaagaaagttgaacgccggttgcgaataattagagccaaactataaacatataataataataaaaaagtaaactaaatgaaatatatatgtactgtaatacgacgtcgcagcaattgggctttttctccactgcttttgccggaggatcacccacccccttatctctggtcggataacccatcgtcggcggaggacttacgtacgtccctgattgtttttccactgtgcccaaaaagattatttaattgtctaattgctttgtgtagaataataactgttcatggttatgcatgcatggccaaaaagattagacgtcggacattaattgatcatgattttagaaaatagttgaagaattacctggaatgtatttgttgtcgtgttcattcattctggtttgaggagctgaggaatgaggaagggagaattatgaagaggagagagtgttgtggtgttttaatttaacatagacgaatatataggaagcttctaaataaaagaatgaaaagtcaatattgaatagacatacctattttgcaacacttgtgttatatataaatgctagtgttcaagaaagtcaatttcatataatttttatacagtgtttttttttgaaagacacgtatataaataatcattatgattatttgttaattatgcgaaaggttcttacgaaacaagttaatatgttaaatgatctattcctaatttatgccgagtagaccttgttgctttttaatttattgcaagaattctaaattcatgacttgtagggatagacttagccaccacaaacagagactaaagcaatttttggatttcaaattggtgttaaagagtataaattgacttattaaaatcaaggatactaatttcttggaagcattccaactctggatcttctattggtacatggaaaactgtgtggaccgatagtcttaccagttttgatcgttacaaaggatgatgctaccacatcgcgtttgttgcaagagaaagaaacttaattattgcgtatgcaacttacccattatacctttttgaagaatgttcagttactaacatatttacctccattgtgcatgtattttgggtacaaagccatggatgttgtacgtctagaggaattgcaaatccatcgttcttatactaaacacttttgaaacatcacctcatggatccaaattaaaagagatagattgaacaagtatggacgtcccttagtaggttatccgagaaaaactatggtaaagcaaattatgaatgtatatatgtgattttaccaaagatggtgagaatgtgaacttccaaccatttatgtgttagagagaccgtttcttattttaggctaggactgtcccattggtattataaatagaagtagagaaatgtcagcaaaggacatgtgataactgagagtgagagtcagagaatattctcgattccagctcaaagtcttaagctcgacattccaacttgtttagttaaactttcagtaatttgtaagttcggcggttaacagtttcatgtaaacggccgtaacgttcagttgttgaaataaaatcttctattttgttgctattgtcttctcatcttgttaggttgggcttcaataccaacagattcgttgtattttgtattttctttcggcaccaacagattcgttgtattttatattttcttgtctacttcttttggaaatttgatgtcagaaaaataccatgtcgacgttgttttcgatttatttgattataataatataacttcgtagttagagaaaaaccacacacaaaatttttgtaggatttaaaacactacacaattttatttgtgtgtttttaacctcccaaatagggattttgacatttaacttgaatcataagtatgttctaaattccgccccaaaaaaagagagtatgttctaattaatcatgatgtatatataaatacgtatatatatcaaacgggaaatgtaactttattacttgttacttttaacctcccaaataaggagcttaactggcactttctttgaagtttaactgaatgtttctctaactttcacaaacataaaaacgtgaagcaatttaattccatctcgtttgagatatatacatgcatgatttagaacatacttaagttttctgcagtataacacgtagtatactagtatatgttgttgtgatgttttctagagaaatcgattttgttatgttcgcttttctattactgtatcttctttttgattggtcataaaaaacaaaacaaaaacatcatcccacctaattaattccctttgggtaacccgtaatccattcacaactcttcaatgataatcaatgcgtgaggaactgaaacacatcctttcgttactgactgatggttcaatcatcgatggatctattcgacaacccaattcaacggaatatatatatatatatatataatcacttacataaaacatagtaacaaccatccacagagtatattccaaacagagagtaggtaacataactagcatcaaatactcttttattacatcaataatttgcatgaaatcgttaattccgaagtctcagaagcatgcatccaggacacaacagcagcatatggcagcacaactgccaatagacaaaaccaaatttattaagtgttacgtaccattcttgtctaaggactagggaagatattggtttatatttgaaatagtaacattttctgaaaactttaaataaagaaaaagtattttagcaacgtacgtaatatcccatggtttaatttctttttagttgttcagttggtaaaacaaacttttagctgacaactctgaagttgaatttttatattatcttttgtcattgaaggggaaataaaatgtaagtcaagggtgaatttaaaacaaacaacaaaattgcaagaaattaaacactagttatcaactaaaatgttgggaaaaaaaacaaatcttgactagaaaatgttgacccaaattttgccaaaacatttgcagttcaaaaccaatagtttgactactcgaattagagatactccataataattcaggaaaacagagaaacacacaagaaattgaaaccctatactgatagatcattaaaaataaaataagagcgtcgtatgaatgtcttgcaaaacggataattagaaccatcatgatctataatcacatgaagagagtgaatgaaagaaaaacataccatcctttccaaaaaccatcgcccttggactttgtctccactgcggcggctggaggatcaccaaccatcgcatctctggtcggataaccaatcggtggtggacttgtgtacggccccgaagaagtctgtgaaggtttttccactgaggcaagaaaagattattaacttatctaattggatatcgatcttgatttaaacagataattgaagaatttaccggacaagtgattctgctcggatggattcattctgatttagtgacaaagtgatgatgagatgaggattatgaagagaagagagtgtttgtgttttaatttaaagaagaggaatatatgaaagtttttatagagatagttaaatataggtttggtgatggccactggtgggtatataaatagagattatgaagatgcggacgagaaaagcaggtttgaacttcttaagattattggagtggttgaattcaattaagtacgctagtcgctagatatgaaagtttttggtatttagaatcttatagtaatattttagcaataatgatctatattattaatttattgttcaaagttcttaagtattatacatatacggttagtagttttgttagtgaactgatcaaatttatttgatcctgaatactgagtttgatatacgggtaaagctactaagaattaacacctgattatttgaaatgtttgcatcaaaatgttattctttaaataaaagacaaaatttagcattatttgtatgacgtatttgacaactaaaatacaaacgatgtgtttgaacaagaaacatctaactcatttactaaatagttaccaaatacatcagtttttggtccataaaattacgcgtcaactgtatttatagcttttaactatattcaccagaatattataatcttttatactactagaacttttggatttcttgacgtcaaaatattgagtatcatataatggttgagatctcattttttttgtttttttttttggtatcaatggttgagatatcattgtaggtacataagataattttgccttagtcttgtaattaattgcttaaaactttaggttgagatgtcgtatatatgcttgaaagataaggacgcaaaccatatctttaaatagttttttttgttggttaagtggaaatcttagaatcgaactcccctgcatcgaacttccctggtagaatcgtaacctgagatagcacaacaaactttgccccaatggtattcagcagtttatttttagttttaaaaaatagttattacgtatttatttaatttatctactttcatatattacttgaatttaaacccaaaaaaaaattatttgaggaagcttatatatataggattggataactgaagctctatattcgcgttttcgtgacattaatttgtggtgtcgtgatacttgatttatttacgacgtgaactgtttttaaaatttctttgtgttctttaaagtagttggaatctaatccaaatttcattactaaagaaaaagaaaaaaagtttttagagtttttgatataagaaacttgtagagataacagacaaacagacacgtgaagaatttatggtttgaaagttgaaacaattattcgatgactttcttgcttttcactagctatttaaaccaattgtatccaaaatatcttccttttctacatatgtttcctcatttgatttgccttcgagttggattttcaaacaaagtattccatttcttaaaagtaaatacctttacttttttcaaatggaaacatcaattaaagaaaaacatcaatcctctattcctttttacaacaaatatatatgtatgtagatatatattagttatatattatttcggataatttatcaaaacaaaaatattagtctatatgtatatgttgcaaaaaaactattatatatcacaatatttcactggtgttgtggtgcataatgagaagacggtcaaatatcttgtgacagcgatttgagatggcaagtttataatttcataaactaaaaatacgcacattgatcagaaaacagaaaaatgggaaaatagtttgcgaatgttaactatgttattaacaaaaaaaaagaaaaaaaaaaagataagagtacaagggtctgaatggacgaaatttagagctttttgataaaggaaatatatagtttatatcaagatataatcggaatttccttccaaatatagtacatatatacggactaaaaccaaataaatatagatgccggtagctatagtgtattagtgttcctatatccgaatagcattcagaacgtattggtttggcatggcttaccaaacacttttttgattcgctcacatgaaaaaattattcacagacaaggcactatacgataatttcaaaagtttaagagttgaaaaccttttgagttatgcggccaaacagtttttcacatatagtaatatggtttttctatttataatttacgaagcacattaatataaatcgagatggaccggtctttaaaacctatcaaaccacgtgggatctttgaagatttcaggaatagtggtaagccttgtctattatggatctccttcgtcaacggctttcgatctcctaatccagctaatcaactattacactttgtacttaaattattaggtctagacctaacataagcctttttgaaaattcatggtatatttattcagaaatccaagttggaatcttttatggatcgctggtatcaacatgccctctacttctcgaggattgttgactacgatcgagtcattgacttcatgcgactattgacataacttaaatgttttatattcgatttagagcatgatttacatttgatacaactatacaagcattttctaaagcagccaccgtatcatgttccagcaaattaccagttcacattatctatgtgtgtgtgtgtatgcgtatataaatagtagatatgtggtccatactcgaaactattcgatagggttttatttaattaaaatgaagaatggccactgcagaagtaacggcccaacaattgtaatagaaaaatgaggaagtagcatcttccttaattacaatattatgtttgagtcaccttttctaaatatttacatatattttatgataaactatgaaaacaaacattcattggtgatctgtggatagtggacgtgtatacatatatccatgcatgtacggattgctagagtcgatcaatatagcacatgcatggtatgtagaaaacaattaaataagaatctgtagtctttcatcttccttgttatataatcactcgatttcacataattaacataagcaactatcaattacgaaaactcaaaaatataggaagagaaaaaaaaagatatgaaagtaacacaaaagccaaagataatattcatcccttatccggcgcaaggccacgtcactccgatgcttcaccttgcatcggctttcctcagccgtggattctcccctgtcgttatgactcccgagtctatccaccgtaggatctcggctactaacgaggatcttgggatcacgttcttggccttatctgacggtcaagatcgtccggacgcacctccctcggacttcttctcgatagagaactcaatggagaacatcatgccaccacagctcgaacggctcctactagaagaagacttggatgtggcttgtgttgtggttgatttgctggcttcgtgggctataggagtggctgatcggtgtggagttccggtcgccggattctggccggtgatgttcgctgcttaccgtttgatccaagcaataccggagctagtccgaacaggcttagtttcccaaaaaggtagttcgcattattttgatacaccggttaattcacatactacgtagttgttttaatatgttattgtgattataacttagcggaagctttaaagtaaattataatagacgtaaaaatggagagttatgaaattgcatgtgcgtatatatatagtcatggtaatcagtagatccattatattataaaaaaaatgaatatatatcatggtaattggttgtcccctcatgttgcggttcaatatatataggtcttttaattagtcggtcgacataggtttttaaacagaacatttgtagttgataattgccggattatatgattacctaaaaaatatgcaatcattggatacggtgataaagaatgaaaatgcaagtcttacgaagttttaagtcatgactcaaattagaaaggagttttattattggatcactcaatgatatccacatatatatcatagttttggtcatatatacaacatgaaaactgttaagtcaaacttttagttggaagtgggaaccatgaatctaaccatatgaacaagaaaaacccacactaatctgatattaatttgatgaagcaattttccaaatctaattaagtttgaaaacatattttttgcatgtctttcgttattttatcctccctttgttgtaatatttttttttttggtcatatttttatggttactacattatttcatattaattacagttagttgtaacattgatgtgcaggttgtcctcgtcaactagaaaaaacaatagtccagccagagcaaccgctcctatccgcagaagatctaccgtggctgatcggaactcccaaagctcagaaaaaacgattcaagttctggcaaagaactctagaacgaacaaaaagtctccgttggatcttgacaagctcctttaaagatgaatatgaagatgtcgacaaccacaaagcatcctacaaaaaatctaacgatttaaacaaagaaaacaatggtcaaaaccctcaaatccttcatttaggtccattgcataaccaagaagcaacaaataatataactataaccaagactagtttttgggaagaagacatgtcttgtctaggttggcttcaagaacaaaacccgaactcagtcatttatatctcatttggaagttgggtttctcctataggagaatcaaatattcaaacgttggcattggcgttggaagcgtcagggagacctttcctttgggcgttaaaccgagtgtggcaagagggactaccaccaggttttgtgcatagagtcacaattaccaaaaaccaaggaaggatcgtctcatgggctccgcaacttgaagttcttagaaacgattctgtgggatgttacgtgactcattgtggctggaactcgactatggaggtacatgtaacatattgatatacactagtaaaatctagcatgtattatatgattatggtatctactatataaattaactttatacaatatgtgtattaaattttgatttattgcttgtacaataataggcagtggcaagttcccggaggctactatgttatccggtggccggagaccagtttgttaactgtaaatacatcgtggacgtttggaagattggagtgagattgagcgggtttggagagaaggaggttgaagatggactaaggaaagtaatggaggatcaagatatgggtgagagattgaggaagttaagagacagagcaatggggaatgaagctcgtttgagttcggaaatgaattttacatttttaaaaaacgagcttaattagacgagcgaagagtgtcgatgtcataatatttatattttcattgttttaacttcaaaataagcacttgaaaatgtatagtgttttcgaacaacttgaatcaatgatgttttgattcaacgattgtagtttttatttggttaaacatttggtatgaaagcattttaaccatattaacgaatatatttgactctagtgaccaatttatttattttaaatggagacaaatttctttggagagccatcagtattcagccatcatattcaataagattagttaagttgatctggtcttatatggtgcacgcatgtcaatcatcttaaagttgaaagaattaaaagtagttgacaaaattaagagaaaaaatagcgacattatattggacaacgttttcctcatacgcctttatataatcataaatagattgtagtatatagattctctagtttatttaatgcatcattgatttttttttacatcaaacaagaaaatatcatattagtaactaactttattagataattaactatagttttataattgttttctttctattttatttatgtattatttttattttttatttttttcagcatcctttattattttaaaatttttgttactcactttatgcattatttttaaggtcgtttcttttgcagaaaaaaataaaatacactaataattaaagcaataatatttttctgacaaacaaataaaaaaggattactgaaattaattagaaaacgcggaaaaaataattaaaacgacacgcaacggtgacgttttctttgacccgccaaagaagaagaagaaaaaaaagaagtcttgaggaaatctgacgaagaagaaaacatctctgagaccgacgaaacgaaagtatccatttttatttgtctgcagtagtaaatcaatcgcatcggaaaaaggaaaccttctttagcttcttccgtagctgacgtctctctctatctgtctcttaggtgcctctttcttttcttcaacgatttctctccccctcttgctttagctgatcgatttcgaaaaattgagcttgccaagtcaagcaaccagattttgttggtaattatctcaactttttgtttgctcaactttaggattttgaatctcagagaattacgtttccagtagtgggtaacgtttcaagaatttgagattgttttgggtttcttttgaatttgggtttattcagtgtgatctttgatctgggtttctgtagttttgtgtgattgaatcgaaagttgtcttcttttgttacagattacaacattttaggttgatataccttttggatttggttgcttaatggtattggattgatactagtttctcaagattatggttttcgttttaaactgatcagaggtagtctctgtcttgcttcctaggttgtatttagtataggatccaaatacaatggatgaaaaccataggaatccatttgcaaatgcaagtacaagtgctagagcaagcggcagtacaagtgcgagctcaaactcgagttttagtagcagtgtggcggatacagatgatgatcagaccattgcacgtatattagctgaagatgagagcttgagaagagaaggcaagcttgggaagagattatctcatttggattctatcccagtatgataagcttcttttgcttaatcttcacatttaggcttggatctgtgctattcattgttgttgttagtgtctattggtgacaagttctttgaatatcttgtggaattttttattggcagcacactcctcgggttaacagggagatacctgatataaatgatgcaacattagaccatgagctgctctctgggaggttctcatcttcttatcaacgtttcctttagtgtcatcgtctttcatttccttgactgcattcttcatttgatgctgattagattgttcattgtcgatagaatagctagttgttttcaatctagaaacatctttaatggtctctcttttttgttcaggttggccacatatggtttagcggaattgcaaatggagggagatggaaattgccaggtacgttgaaaggaacatccatatagaccttgtgtggactcttcaaaagactttgtattgatttgctttgtcatattgttatacttgtttgccagtttcgagctttagcagaccagcttttccgcaatgcagattaccataaacatgtaaggaagcatgttgtaaagcaggtactgcctgagaaccataacgcatctcattttcttgttcacaaatgtccgattctttagtcagcgccttcagggatgaatgtgtttaatcatatatactggctctctttcataaactcgtgcttcttctgaaaattcctcagcaacacccttcaagctgtctttcctgtctctgttgactggctttcaatctctgaaactttttttctcggctttagcagttagctcacttcctgaagttcccatcaaaacacctatttccttagttttggccacatactactttatagtttactgcaattattctgacttagcatttgcatttttcagttaaaacaacaacggaagttatacgaagaatatgtgccaatgaaatacagacactacaccaggaagatgaaaaagtgagacatttttattttttttgatagtgtcaacgagtgataaattattctccgattcattcttttgctgatacattttggacgcgactagacatggtgaatggggagatcatgttactcttcaagctgcagcggatagagtaagttttcaaagagataccatcctttgagtttactataatagactacaaaagttttacaaacataccttaaagatcagatcttctttgagcaactgcatcttgaagactcatcaacaaattttacctttattcgctcacatttcgttactttttttacttgaatgactggctgactcagcattactgcagttcgaagccaagatctgcttagtcacatcctttcgggatcaatcctacatcgagattcttcctcataacaagaaccctcttagaggtacaaagccctctttctacctttatgctctaggccaagtttactcgttcctaaccgtcttgaatccttttgttgtactgcagaggcttggctcagcttctggagcgaagtgcattacaattctttatacgctaatggaggtaaaaaactcagtttcctgcactcaactctgcttttaaagtaaattattatcatcactaattatctccatggctttctgaatctcaatctgagtagttcttgctcttccagatgttccaacaagaaaaccgagaaggaagcattggctcttctagtattggatttaaagttcatctccatttgtataatgtataccactttcctcagatttatttgtgcaactttgagataaccttactttgttgtatgctttatcattgtaaaagaaaagagtaaacatagatatattattttaaatacatttataatcatgtatattgactttttatccctaagtttttacatggaaatgatgaatcataacgaaaataaaactatcatcatcaaaatattggttgtgatactttcaaaaaatggaccataatgagatcaatttgaaccgaccgggatgaaatgcaatcacatggaccaagtaaacgtgtcgttgagttatatataaataaagtctatgtcttttcaatatttttaaaattgattttggttgagtttggaacaagtaaagtaatgggtcttaaacctcaagatcataaaagaatcagtgggatgggatcggacataaagcatcacacttttttctttgactcatataagcatatgatgcatatcatttaggcagtggatttagtatgaaaaaatcaaaaactatattttcagaacaaaatttacataaattaattttaatttgcttataattaattgtagtaaatatgttacacttaaagttttttgaaccaattaatgatttaagactaattttattatcatactaacaaaataggaaaaaaaatcaaaaaaaaaagtttggatttttatttgggtttgggcaaaaggtcaggtcatgtgtcgatgttacacacggccaaggaaacagaacaagaacaaataaaggccattgctttcttcttcccttccccttctcttcattgcccttctctctctcttttttatcgcggagagagttttatagatttctccttcttcaactttacttgcgtttctttgttttatcaattcgaaaaccctagcagcaatctctgctgatttcacttacccacctcgaattttgttgttctatctccttcacaaagcaccacctatctgaaaccctaggggaagaggattctctcttatgtcctcttctgttatcttctcttacctctaaagtttcgtttatttcgatcatggagagatctgattcaagggatttgtataactttgttcgcgcttcttccttaggtcagtcttcttcttaaaggatgtttctttctttctcttttatgattttgctgcttatagctgattttggattcggttttgtgtattgcttggtttgtttaagcacataaatgttggagatttatgctatgtatgatttaggtcactgagctatatagcatctttaatgttctaatgggatctgatgggtttgcttagttttcgatgttgtgttccaatgcacaaatgatagaccagtttggatactaaaaaacttgtctttagagatgttgtgttaatcccttgaattgttaaagtctagatttttatggtcatgtgtttgtaatgttggattctgaaacagctgtttttgtatctgcagataaaaacagtacactctttgatgcatcacaatatgagttttttggacaaaatctggatgatatggaacttgggggtcttgatgatgatggagtaatcgctcctgttcttggacatgctgatgatgatgagtatcacttgtttgataaaggagaggtaacatgctttctctgttgaaagctaacatcttgataatgatgcatgtagtaagtaatggttgcagatgttttactaatagatatgcatgttggttccagggtgcaggtttaggatcactatctgacatggatgatcttgcgacaactttcgcaaaggttagcataatttttatttacaaacactatgatgacaatcttaatatcttacctaccaccatgtcatggttgcatgtgataaactgataatcaatcatcttctttttgtttcatgcaaatgcttgttgctttttttttcagcttcttcgttttgctttgacttgttgtcagtgattttaaatctacctattctcttttgtgtagttaaacagagttgttaccggacccaaacaccctggagttattggtgatagaggatcaggatccttttcaagagagagtgagttaaattcctatcttggttactactttataactttagggttattttttagcctggtgtagttcttgttcttcagttttccttttctgtttccgttttcggcaaagccagcagctgagcgtgagtactcagtagctttttttactcggtgtagctactaataaatcctttctgagtccacatattgtgacctggtccgttttattgaggtgaagggttggattgtagatataagttgtgttagttgaagaaatcatgtggtcattctaatttgcaaattcagtacttaaaatatggaattacctgttttgagctattatttacacgattacttttttctgactgaactctatcttataggttcttctgctaccgattggacacaagatgcagagctcacaagctggttggacgaacaagatcaagaagctaagagatggtcctcacagccacaatcatttgctcattcaaaacctttgtacaggacatcctcttatcctcagcagcaaccgcagctgcagcactacaatagtgaaccgataattttaccagaatcaaattttacctcatttcccccgcctggtaacagatctccgcaggcttcacccggaaatctccatcgcgctccttctcttcctggtggttctcagttgacctattctgcaccttccccgctgtcaaattctggttttcatctttcaggattgtcgcaagggccccactatggtggtaatttgactagatatgcctcgtgcggtcctacgcttggtaacatggtgcaacctcattgggtcactgatcctggtcatctacacggagatcattctggtttattacataatctggtgcaacaacagcatcaacaattgcctcctcgaaatgctattatgtcgcaacatttgcttgccctccagcagagacaatcatatgctcaacttgcagcgctacagtctcaactgtatagttcctatccttcgccatcacgtaaagtcccttttggagttggtgaagttagggaacacaaacataagtcatctcatagaagtcgaaagaatagaggactctctcaacagacatcagacgcagctagtcagaaaagtgaaactggactgcagtttagatcaaagcacatgacttcagaagaaatagagagtatactcaagatgcagcattccaattcacacagcaatgatccctatgtcaatgattattaccaccaagcgaagcttgccaagaagtctgccggatctaaagcaatctctcacttctatcctgctcagttgaaggaccaccagcctcggtcccgtaatagttctgaacagcatccacaagttcatgtagatgctcttggtaaaattacacttccatctgtccgcaggccacatgccttgcttgaggttgactcttctcctggttttaacgatggaagcggggatcataagggctcaggaaaacatttggaacaggaacctctcgttgcagctagggttacaattgaagatgctcttggagttcttattgacatagttgacattgacaggactctccaaaacacaagaccccaggacggaggtgcccaactcaagagaaagcggcagatcctgctagaaggattagcgacagcacttcaacttgctgatccgttcagcaaaaccggtcagaaatctgggatgactgctaaggatgatattgtctttctacgtatagcgactctccccaagggtcggaaattgcttacaaagtatctacaacttctagttccaggtactgagaatgctcgagttgtctgtatggctatattccgccacttgagatttctgttcggcggcctaccttcagatactctagcagcagagacaatatctaatcttgccaaagcagtcacggtttgcgttcaggccatggaccttcgagcactgagtgcttgccttgcagctgtagtatgttcttcagagcagccacctctccgtcctatcggaagttctgctggagatggtgcttcagttgtcttgatatctcttcttgagagagctgcggaagtagtggtggttcctcgagtcatgcatgggaattctaatgatggtctctggagagcgtcatttgatgaattcttcaaccttcttaccaaatactgcagaagcaagtatgacacaatccgtggacagaaccaagggagtgcagcggatgttttggagctggcgataaagagggaaatgcccgctgagcttttacgtgcgagtctgcgtcacaccaatgacgaccagaggaactatttattaaactttggtcgtaaaccatcagcaattagtgagtcggcatctcatgcaaggggtggacagatcaactctgaatctgtgaggggttaataaaaaagaaagagaaaccatgtgcttggaagattccaattcttggttttcatggctgtggtgtggactcaggagacaaacttgtaagtaacctggtggtgtaggaatcttttcacaagggtttcaggtgaaaagtgcttttagattctgctcttcgtcttcgttttttaactttgaactcttttatatttcgtattatcttttatggtggacaaatgcatattctgcttggtttgtgtattggatgatgggaaagaatgtgaaacatggagtagtagggttatctgaagaagtaatgtcttccgatgggagccatattttggtgctctaaatcgttagggaaacaaaaataggagggaactttagtagtttgggaaggatactagtgttttgtgtacagaatgatgataaaaccctttatccggagaatagtgagaagactatataggtgttaatcctcttcgattaacaggtttaggtccggaaagcagctgggaatctgggatagggagttcaaaagtttgttatctgatatgtttatttcctctttgaactgtttcgtgtaatagtagtaggaactcacaaaaaccctcttttgaatactcttggatccatctctctcgttggttgtttcaagattccatcttctaggctcttctaccttttttgtgatgagctttaagtacaacactaagatccaactggttttgttgtccttgtagaatctttggtttgactagtgattgttggaatcatttggcccttctatttgacagaatctttaagttactataataaggatcttacagaaattgattttctatactacaaaatttctgtaatggtaatgaccaagggccgatgatgagtgactcgtaaactactagaattcactaaagctagtgatatactttgttcattctattctttggtggatccagcgagttaaatgcgtgcattttcttattttgtaaaggaaaaaaagtaatagaagagttcccaacattttacaagttgcattagcttacgtcaaagtacatagagctaacttggaataaacggacaacctcataattcattgtaggagaagtgtgacacttcatacatgaattaggaaaaaaataacgatccaaatgatctgaattttatacagactccaatggtactagaatgtcttgatttaaaacagatcaaaaaaaaaaactcgaaattcatcgtcgagtatcgggaaaaattacaagagataaatgagagctatagaaacccataatggaaaaaagaaaaaagaaagaaacaaagatttttttgttttgattgataactagaaggaaaacataataaaattatgattagaaattatgaagagaggaggatgatgaggaagtacttgaggtgtaattaggtgtaagtgtaaaagatttgcttctcttcttcctcttctccaagaaccttttcacagatctcttcaccgaacatcctaacggtgattccagtctcaccggcactaactctaacgctgttacttcacgatccttgctcgccatctctattattgctctcatcttcatgtattgaattttcactcatcaatattataattgattacgaaaagcgaaaaacgaaaaaaaaaaaaaaaaaggtataaaatgtacctggatctctacaagatcgtactcacttaatctcccactataaaatgcattgatttccttagatcttatggttgaagaacgatcattaactctatatgaaaaaaattcattttcaaaacgatttaagaggtttaaatatgaaagtagagtgatttggatgataaaactcacgtagaatcttgatgacaagattgaagcgtagaggccattggagataggtgaagatctaagctgcaacccttcatgatcctctctaggtaaatattcttactttggtcgattttcgtatcaaagtaatcaatattgaaatggttgcatgtaaggtatatataagaacgtgctatgactttttttttggtggaaaaaaaattag

SEQ ID NO: 1305 - DNA, 106203 bp, Arabidopsis thaliana
tacgttttattattcttcttacattattccattgcagatcataggattctaaaagtatgggaaaaacatatacaagtgacgagagtcaaaatttattgcgaaatttaatgctcaacgtgttacccttgaatacaacaaccatatattcgttaatgatcttagttataacgtcgttgtttaaatcatcctaacccactagtacgtaaagaaactcattctgtctttctctcccacacacatttagattagtttaggaagtcgcttagataccgactaagcgctagacatttagattatgcataaacgaccgtttcaactgtctaaaattttatagagttcattttagtgaattttcctaattttaattaagttttattttcatacatataattttaaatttttatactaaataaatattttgtttaatttttgtttacgatttaatatttaaatatttataaaagatattttatgtaaattttatatagaatatcatatttctaatgtattatataataaaattttaaatcatctaaatccgtcaaaacttcgactaaatgttttacgcgttaagtattggatcattgtttgcataattacaaatgacactgcctagcactcaagaattgagtttccctcgcttcaaacacattcaaaattttatatgattttttaaaattaaaaacatttgatatgcttatatgcatattttatttttttacttttttgaaatctagaaagttctgagttgaagcccgaaaccacatcatgtaatattagtttcatcctaatcatcactcgaaccggcgacctctaagtttcgcttaaggtttttaccaattaaggtaaccacttgattcagttgcgcatttatctcgtagaccggaagactaagcttttgtaacggtatattgagtactaaataatctatgaacagaaaaggtcatatgagcatatattttaacgttgataccttttggcttttgcccgtagttagtaaaaagagaaatacgttatcttctaagggatgtcgaattattggactttgaactttaataatttacttttgaaactatgattggacactgaaattccaaagctttacagctttcttcctgacacagcaatattatttactgctatatatgtaagctctatcgcattcgtattcgtgtatacatgattaattaatagtacttattaattatgataaaagaaattgtgtaccatcttttgaatgcctaatttcgtcttctttttttactgcatggaggactggttgttttaaagagttggaggcattgcataatcgaatttttgctataataactattatttggatattttctttatgtatagagcggatggctgaaatggattgaataaagtttaatattcggagaatatattacatacttcttgtttatcttgcttttcaaaggtttcaaaaagcttatagtatattttgttttagtttgttgaatttgtgattggtttatttattaaaagaaaaaggtaattggtttcactttcgtcgtttgggagagaaaaacaactataacaactatatatatttgattattgttactaaaataacctacgacagaaaaacatttacttttttttttgtcaaggggtctgaaaaacatttactaaaataacttatatcatgaaatattggttagttgctatagttttgttattattatagaatacttttcgtacccatattaccattgtcttgctttattaggaaaaaaattacttacaattgctcatatgtttgtatgctcctcaaatatttttttgttatttacgtaaaattattatttacttacaaaaaaacaaatatttgtttatatttttcaaaaattgcataaaatatgtggggtgtaaatcacatttatttactcaaacgactgcggtaaagatggcataccatcttgagatataatagttttgagctaggttatgagatgagtctcatgtcacttgtttaggtactttcgagatgcagaagataaatccttcaaaaaaaacacaaatgatatttacgtgttatatctacttagtactttttttgtgtgtgtgtgcaccaaatctacttggtatttaatagttagaatttacttgatatgctaattttgtctttgatataaaaagacacttgataaaccttaggttttttgataagacaagtgataaacgttatttaacgtacacatgaaactgattatcgaaaaaatacatgaaatatgtttagaatatttgaaatatatatagtatttgttaatatatcacctaacttataaatcgtaaagaaaacgatccaaatcattcacacagtataaccgtaccgacaaagagttccgttttcaactaaaaagccttcgagagagggacaaagataagaggagagactccgagtctttgccaaatcgctttcaaatattaagtaacgaatttcaatcttcattctcaaatatgtctgaaaccaccgacacttaaaaaaaaaaaaaacatattgccaacaaaaaacaccgagtctttccaatagctaaataagttgactttcaactaaataagctgactatgtgtcatctctaaaaaatgcatgcccccaaataatcgaataaattgtattttcggatataaattgcaaataaatatgttcatattacatctcagattctaaaatttggcaaaattttagctaaattcttgatatcgaaatatattgcaaatcataatatcatttgtctcaaatattaacttaacatatttaacctatttactctctccatttttgttgtaacttgcaaaagcaaaggaaaacttaaattagaaaaatggatgcggattacaggaatagataaacgtattttgtaggataaaaattccaaccaataacttaattgcaaaatcaaagaaaaacgtaatttacctcgtaatttttgtaaaatggctacaaaaacatgggacgtttcaagtcaattatagccactttttaatggaatttgcgttttaaactatttttgaaatgcacttcgaatatttgtcttgcccagacacaaaaccattcgtcactgaggcattcaaaattcagatcttacgttgttgaagatctcttataagcagaatatagatcttacgttctttaagaaacatcccatgcacaaatagagcttctatattagattaacttaaaatattgtagatttaagttaatcataggttttgtcggtgacatgcccttacatattactaattgttacaaaataatacataccgatctttaacataaacaaatttttttattaatggcaaataaagtgattaaaaaatactttactgtttaaactgtcctctgaaataattaaagattaaccaatttgtgcttctgcaataaatcgagaacgtggtgaatcttctacgaaggcaacgaacgaggttttgggttccttatacaaaacgaagtcaatttgattaaacaattttacttaacaaaaacgtagaatctcgagagatttacatattcccacagatttttaaactgacagcatataattctgactcctcgactaataaaacactatattaatactgcctggattactatgggcattatttttgtcgctacttgccaaaaaaaaacaaaaaacccttgctatctaatttatcaacaaacatataatgtcacgtaattgaagagattaatgacaccaaaaagaatgaacgaaaaagaaaaagaaaaaaggaagtaataatgaaggactataactttatcgcatataatgaaagaagtttcgtaattaagacatttaaaacaatgattatattaccattaacttttcttttagcattaaatcttctaagaaaccacatgtttcttcgctcttaactttttacaagcccaaattattcttctgattttgaaatttgacctaacgttttctccaacttgtgacttgtccttacgcgagttttttcttttttcctgctatttttgtatgatatatcacatgcaaaaagtttgcatggaaattaattttattaaattcgatcgggactttatcagttttcttttttgtttttacgtcaaaattaagtacagagtttatctatgtaaaacaagtatttttaatcttgcaatagaatattgggtaaaagaaaaggttagttttggttctaatgtttttctagtaagtttagaatttaggcgatgatgtaaagatggaaacttaatttgtctttttacttagagattatcttgtttaacttattcgcatttttgtcgattactcgtacgttctttccatgtttattttccgcaaatatcgaatttatataggcgcatcttctaattcaagtcagcatagcctctactggaaatgaatattgccatataagtgtatcgaagcttaaagcaatgctttaattacctacagttatacccaaattaaaatcacgaataaaattttcttcaatttgttttcgtttttttttgtatagtctattgacagaaaacccatcattaaaatatattctttcttttctttttgggccaaacattaaaatatattcattatttgtatttttgattgtttggttactagttacataacaagtcagtcgataatcaaactgtaaaaataaatatacaagtttgaatcaatcgatcattcatgttggagcgataagtcatggtgatctttataatgtagtctttttcgttttgtttaccaaaaaaaaaaaaaaaagtcatggtgatctgatcagatctctaataatgaggtttaggcttaagtttatatttttgttataattgattttgcgtagaatataagcacctctttagaaaacgcgtagaccatcaacaagtcgaatattttactctttttcttgtttttatgttctaaaaaggcttcatttattttctacctgtactgttctttaattgatttttgaatccccacaatttcacaaaacatttataagtatataaaaacatatgtgcggagaaataaaaagtcagcaaatacaattagtccaaatgttcacacaaacgaacatgtggagcgactcacatgtggctctcctgtcaacgagacaaacagaagtggtgttgtcctcttgcttaaccaatgtgtaaaaattcctttgttatttgaatcatttgattatatactttgacaacgaaggtccatactttagttatatgattctgaatccaaaaaaatgaataataaagtatgcacactttactgctaagtcacagaacaatcactaatattttaataataaaaccagttagttgctgaaccaaaactagatacaataaatataaaaaccagatagttcttgttttataatctcaaatcatattatttacagttctcaaatatttcttatatgctttagttgtcctagtttaaacatttttacatagattaagaaaatatttcaatgtataaatatcatcttatatcattaattaaatgcaaatgaaaataaacttagattttattaaatttaataacctatgtattaactgtaaaataaaattattagataacttaggttccgaactttccataaaacgttggtaagtttttgtgtcattttgttaaataatacaaacactacctttaattacctgtgctactataaattcaacatccaaaaattttagcatatttttaaaaaacataatttatttcagatatttagtaaattctgctatttttaactacttttatttatggttattaatatctgtttatcacagaaattaaactttaactatttatctttacatataaagttattaaaagaaccaaaaacataataaaggagaatttgagtggatacaagttgtaaacttttttaagatcataaacaccatatatccctataaagataaagaatacgacaaacttagatctttttcctccaacgtgatatctagtagtaatgaaaaaacacatgatagttaataaatagatcttgaccctataaaataagtaaagacttttttaaagatagcaaaagtaaactctgtaagaagtctccaatggagaacaatctaactcttccaatgtggcataggcctaatttggggatccttcttatatttcgggtaaaatcacacactcatgtaaaaataccgacatcactatcattattacaaacagtacttttctttcattattatagtttagaaaaaaaaataactcgtttatttatataatatctttattaggaaaaaagttgtttcccgaccagcaaaatttctctcttcttctttataatcatcagatcgttccttcacttgattttcagggctcgaaatctctctcaaaaccctctcaaaaattccaaaacataatctcatttctcaagtttaacattttcgagcccctttagaacagtggagaaagatccacacagataaaaaaacgggtgagttttatatcaaatagacgaaaatgcccctgtcggcgacggcggatacaagcaagacggtgaagctggagaggtacaatagctacctccggaagattcacagcaccaaagttctcaacgcttcttctaaagttcttttccgagcaacgcttctcgtagctcttgtcctcgtcctcatcttcgccatcaactaccctccactctccgatagccgcgccgccgcagcacaccacctccaccgtcgtagcttcttatccaccggactcttctcctcctcctcttcttcctcctctatcggtggagccgcgtgggaaaagcgcgttagacaatcctcaacagccaaacgaccacacggtctctccgtcctagtcaccggagctgccggattcgtcggatcccactgctcacttgcgctgcgaaaacgtggcgatggagtcttaggattcgacaacttcaacgattactatgacccatcactcaaaagagcaagacaagagctcttggagaaacaacaagtgttcatcgtcgaaggtgatctcaacgatggaccactcttacgtaaactcttcgacgttgtccctttcactcacatccttcacttagccgctcaagccggagtacgttacgctatgaaaaaccctcaatcttacatcgcctccaacatcgccggattcgttaaccttcttgaagtggctaaagcagctaatccacaacctgcgattgtttgggcttcctctagctctgtttacggtctcaacactgagaatccattctctgaagaacaccgaacagaccaaccagcgagtctttacgcagcaaccaagaaagctggtgaagagatcgcacatacttacaaccacatctacggtctctccttaaccggactccggttctttacggtttacggtccatggggaagaccagacatggcttacttcttcttcactaaagacatcctccacggtaaatcaatcgacatttacagaactcaggacaatcaagaagtggcgcgtgacttcacctacatcgatgacatcgttaaaggttgtgtcggtgcgttagacacggctgagaaaagcaccggaagcggcggaaagaagcgaggacaagctcagctacgtgtttacaatctaggaaacacgtccccggttccggttgggagattggtctcgatcttggaaggattgttagggacaaaagctaagaagcatcttatcaaaatgccaagaaacggtgacgtgccttacacgcatgctaatgtgagtttagcgtataaagatttcgggtacaaaccgacgacggatctcgcggcggggctgaggaagttcgtcaagtggtacgttggttattatgggattcagccgagggtaaaaaaggaaacttctcacgccgaagattccgcttaataattttctctctaccaccatctctctcatcatcacatgcttgtttatttttcttacaaaaaaaaaaaaaatcatttacagggacagatttctgtatttttctttatttaaaaattgctccccaaaaaaaaaaaatcataaatgtttttgtggtggtcctttttttagggggatcaaagtgtgggaattaaattgttacagctgtatgttataatagaaagatatatagaaatgaggagaggaaaaaaaagaagaaaggggtagaagaattgaaaatatatgtgggattgttatgtaataaatgaaataggttatgatcttgctggaaagtgtttagagcagatcttagccgttggatttttataatcaaggaatgaaacctgtgatccattattataccaactgtaacataaattttattctctctttttatcttatctttttctctcttctttttactttttaatgttttgtttctctttgctatttcatgccaagaccgaactgaagtaaatggaaagtaatgttttaactggattttgttttgatgaaatgactcagaaaatgtactaatccgaatcgcaataaaccataaagagaaagaaagtggaccatggcattggaccctttgttgtttgtcatcctatctttattctctttcttttgtgtgttttttggtctaccagttttagctttttattctaggtatgaaaatttgataatataagcttggggagttgttgttttagatattctcttccgaagatgcgtgcgaagatgatgaaatggtaaactacagtagtctaatggtttgtgttaatacccgttaccaagtcaatatctaaatttaaactcatataatacacgttgaaaagaaaaagaagaacaaagggtttgatgtcatggcaataagcaatagcattaagtcgtcgaatgagttttctatcggcacatcattttctcattttagttcatttgtgcaattgatttcttcttcaataaagcgctaaaattgttagatatcgctactcacaagtaatggaaatgttcttccacaagaccacaacgatagaaaacctctaaaaaaattcaaactatctcataccgaatcatgtaatactcaagaatttggtgaattttgggccatgttggcccacgaagaaacttaaccataatgtagatatcatattttcatgggattctaaagcctgtcacacgaagctcaaacactatccgaccaaacggtttgccatcaacggtcatatcaaaaaaagccatagggttaaccatttacagagatgcatattagggtttgtacacggagggggattcatatagagaggatgaggtatttcaagatgaatttttattgatttgaaagataaattttgtataaccaagataaattttggtctctatagtctatattaccgacatggaaacatgaaagattcaaaattcatgttttaggaaattaaataaagccgaagaacacaaatggtagggtagataaacgataagagtaaacatagaatcgaactcgatgctaatagatttgcagaagatggagcaacaatactacggtattcagacacaaccaaaaaacagggctaaataagtttaacaaaaccagttaaggttatttgcagttaaacaaagaggaaacaaacaaactaactaactactgaaagttctgaggctcctctctctctcaaatcctctggcttgtttgctttagtagccaccaccaccgccaccaccgtaaccgccaccaccaccaaatgatgatctcggggcactcgatctttcggttgcaagattcacacggatttgcctaccattcagctcctgatcatactcaaacccaaaaatactagtaagagacggacttttagacagaacaatcaatgctatgaattcagctcctgatcatacccagaaaactaataagagactaagacttttagactgaacaatcaccagtaggatactagatcatgatcaatacccaaatccaggtactaatagagaagacattaagacatcagtatagtcttttctaacctttccatccatttcttttatggcattgttagcagaatcctcacagctgaagctaacaaatccgaatcccctcgacctccctgtctctctgtctgcaatcaccgttgctgcacaaccaaagacaaaacattggtatgaggattgtatatataataatacataaatcaacaacatacctaggaactacaaagccatatcaaaagaaattcatcaatcaacctaagtcatcattgtttttatacacatatacagtaacataggcacatagccattacgaatcattccaaacagaaaacacatggcttaccttctgtgacttcaccaaagctagtgaaagcttgctttaaggagctgtcatcagttccccaagagagacctaaaagcaaataaaacattcacctgtaaaaacatacaagctagaaaaccagtaagagcaagagcaagtgaggatatataaatacttaccaccaacaaaaagcttagaggacatgtaacgaagagagccaagcatagatgtaactggaccatttgagctctgagaaaccccttgtctcaagataccgctaagtttgttgcagaaagccatttctaaatgtctacacacaaaactaaatcaacaatcaattccattactctatatatctgtaaaatgattaacaacaatgctattaaagtcatttcttttcaattagaccacaaagaatcccaaaccctaaaatcaaagccatttctaaatgtctgcaaacacaacatgtaaacccagaagactaaaatcaattccatttctccatatctaatcaacaagctataataatcatttctttgcaatagatcatcgaaaccaaagccatttctaaagctatgaaagacattaaagagatgaagcaaaccttagagaagggaatggcgaaattagggttttagcgaagtaacagtgagtgagaaaagaggcagtgagaggatgaagacaaagagtagggtttaagggatttatatactgagctcagaaactctcatttttgttttgctcaaactaatcacctgtggctaggtgtatcgtattactgtatactaccgtagttgtccaatagaattgagtaatgagagaagtcaacacactggaaaagcgcaagtgtatcaaatatagaatgtagctgatgtagagtatttagttcccggacttctctctaacttgttcaacctttgttgccaccacgttggcttgattatatcagctgcttcattaaataagatgtcctaaaggcccaatatgtcccagaagcccattacaaggttggtaataataagaagaggcatgtggtttgggggttcaaaaagatgcgtatatagtattttatagtatcttttttttttttttttttgtaaaggaaaaaatttattatagtatcttacttatatgctctcaacgatttctacattatgtgttagggataatcatattagcaagcccattatgaagattctaacaagtagtttaggtaagtaatcctagtagtttgtattaaaagagtggaatggaaaaaggtttaggcaattaggcatcatatcagattattatcagccattcacataacttccttctctgtttaagttctacctactaaatgcatttgtacatgttttaggcttttagcaagttaatctttaaaaatattttaaatttttaatgagaagcatttttgtagaatattcaagaaagtcttttctgcaggaaggagatacacagcagttgaaaatgaaaaggagaaacgtcacatacccaatttatcataagagatatgttttttttttttttggacaactcataagagatatgtcttcataatattttcactcttcttttccgttttatctaaacgtttttttcttttggcttttaactcttcttttcttaagttgaacatgttttattctattctagtaaatcattgggactatccatcgatgtataatcctatattattattattatattatttttatttttgtataatcctatatttagtaatatatatagaattttataaacttagatgtacaaatacaattatatatataacatcggtccataattttcttaggctatatagcatattagcatagctgataaattaattatgtccttcctaattataagactcgaaccgaaggtctagttatttcccctgttaagacttaagagcttctcaaacattcatgagtatagggtttttgatttatataataattttagagagaaaaccccagtagttctgctgataatatcaattggagtaattttggatgttcaggatcgatcctatatatatatattttgaagagaatttggattaatcgatatttagtgggtcagttatgtatgtttcttggcgtgaagctaagccattaaattctcaggccggcttttccaccgacacggtatcaaaataaaatttacataccagacattactttatagatgttcaacaaaatgttcatgtgattcccaacatacaaacctaacgtacgtgaaaattggttgggtcattcactgaagttgagttgtcaaaagatattgggaccaaactaatgttgataaagtacataagtcacacacaccaaaaaacaagtcacacatatcagtagacacaaccttatactaatatttcctgaccattaatattcacatcaactatagacactagaacgaattaagtcacatttacttgcaaaagaaacttacaaatcacatcaatctagacatatcaacctattggctcttgatagtgaacttacaaaatataccatattagtatataaaaggaatatttactaggtggaattgtaataattacaacgtaattaattagagaaaaagtactaatcaaatcaacatagagatacataggcgcctagacgacccacaatacgaaggtacaaagttcgaaagctgcaactacaaaaatataatgacaggtaagacaacgtatacaattcgagctgagacctaaccttaaatttaatcgacattgtcgcacaccactttcttttccatgattcatttcaatgtgaatttatgtcatttcatattttttcaagatgatatgactcatcagtgtcgtttggtgtgacgttggatagagccaccttgcgaatgttcccaattttgggaagtcactcaaagaaaaagatgtgtgtctccggaacttatcaggataaggatcgaacctctcatctacctatctatctacgcttggccgtgcgtggcatcatagttcgctgatttctgcaaacggagacatcaattttccagttcaagaaatttaaatggaacggttagcaggactagtaccatcatgccccatgtatatatgttaataaaaaatatatatatccacaacttttgtttccaacgtgcatctaatccctaattaaacctagtacgtacttgcaatcattggttaactataaagttcaatgggatattaaaagaaaactcaattgattaccaaaaatggttgctcatatattaagttattaatggtttatctttctgaaattattagtagtttggtactgatcatatctcataagtcataactaaaaccgtttgtatatgtcaaatttatatagctaattaagcaatatttcattatttctttcccaatacaattcttctacatatttacaaatatgagacgatgagtatatgtactatagatagacatacacaacaacatatatggttttccaacacatttatacaacaatgccgttggttacgtagccttctttaggataaaaaacaattaacaatggggtcacgttcacctacaggtgacgcaaacacctattgtctctatgataatattatgcataacaacgtgaatgaattaatacaatcacaatctataaagcaagggtgaaagagagaaagacacgtagccgaacattaacaaatttgaaagaataaaaactcttaagaacacaaaaatatttctatatatatcctacatagctaagaccgaaatatcactcagaatcatctttgtcaatatttctctaccatcttttgtctcatagccatgggtctagttcaagaagagggaagcggtcctgttcatggctttcggttatcaaccgtgagtgcgtccctgccgtcagagacaggtacgacccacgagcccaccggtttagacctcgccatgaagctccactacctaaaggcggtttacatttactcggccgggacagcacgtgacttgactgtgatggacgtgaaggcgcctttgttttcagtgttctaccagatcccttgcatcattggcaggttcaggcgacatgaatcgggacgtccgtacctaaagtgcaacgactgtggcacacgtttcgtggagagtcattgtgatctcactgtggaggagtggctccgtgtaccggaccggtccgttgatgagtctttggtttaccatcaaccagttggaccagatttggcattctctcctttgctctatattcaggtacatatatatctctagttctctactaatctacgttaagcacgttccaaaaaaactaaaaaagaacaaattaagaagtccacacatagaaaatcagtttaattcgattttgttgcgtagatgacccggtttagctgcggtggattagctttgggcttaagctgggctcatatcatgggagatccattctctctttctcatttcttcaacttatgggctcaagcctttgctggtgggaagatctactgccccaaaacctctgtcacagagagagactttcaaaacccgacctcaacattcaaaaaaccggattcagtcaaacaggttgacctggttggagatctctgggtcgctccgaataacagcaaaatgacaacattctccttcaatttaacggttaacgatttaaaaacacattttccggtgaacggagacggcgaattcgagattctcactggaatcatatggaaatgtgttgcgacggtgaggggagaatcagctccggtgacgattacggttatcagatcggatccgaagaagttgaagcctagagcggtgagaaatggtcagatgataagttccattcacgtcgatttctcggtggcggaggcgagtttggaggagattgtgaaatcgatcggtgaagcgaaagatgagagggttgtgatcgatgagattgttgatgatgtttcggattttattgtttacggagcgaatttaacgtttgtggatatgagtgaagttgatttttatgaggcgaaagttatggggaaatcgccggaatcggtttattgtaatgttcaggggattggggacgacggagcagtggtggttttaccgggggttgtggaggaggagagggttgtgacggtgacattaccggtggatgagattgagaaggtgaaatgggaaatgaagaaatgtggtttgatcacgccgttagtttaacggtgaatgaagaaatcattttatgcggttatcgttaatcgtgttttttattgtttgtttgggtttttattttatttggtgtgttttatataaaatcaaataaatgtcatttttataatttatgtttgtagtttatgaagatccactactaagtgataaacatttaaaccacatttttgaagaggcataatcataagaatatttttttgataactaacattcgtaagtcaatcaataaaaaaatgtctactaataaaagacataccattggtgtttaaggatttaacgttgatgcttctaatccataaacgcatacagaaatttgtacctgaacaattccaaaacagggcagaacttgatgagtcacagtaaaaaatcattaaaggaaaggtcaaaagaagattgtcttctagttctaggtaaaggaaaatcgtcaaaggaagattgtcttggaagagaagaagtgattagaggaccaataaccataataagagcctgaaattaaagttttgcgcaaatatcaaatcattaaacaaacttttatgcaaaattgtcacgaactaaaacataataagcctaacatattagttctgaaaacttcaacatctatagctatcatgctacgacatggtcactacatcgaccacatctacttggtacgacagtgtgggactttcgtcttaatttattggcaaatttttcgttagattatatatccgacaagagattttgggagtgctttttgcgaagtgacttaagatgggatcaagacactttgtgagtttcagacatgtatgttttaggttaggttgtcctcttttagatacaaaatttttccacttcttgtataattcgacaaggtttccttctcttttcgtctaatttgacaaaatacttttctacttcatgtctagtttttttattgctctattattattttaaattattatattctttgtaaagtctgtaaaatattttacatgtatcctaataaaataaaaacattcaaaatccaaaagatactagagattgacccgcggtagaccgcatattgatattttcattagaaagttaaagattttattttaattgatattatatatatatatatatatatatcatatttcctaagaagtatatcacattcctatatttttatcaaaaaacggaattttctctttaaaatgattcatacacatatgctattgtttttttatgtatgatacatcttaggacgatttttatagataaaaagtttaacattttaagttatatatattttgttaatattgttatttttgtttagtttttataattgtataattgtattttaattgttaattttaggatttcatccatagtacacaccatcccgtattaatatcaagtcaaaccctttccaccatctaattttgtcacgtgaaattaaacatcattttgtcattttttctaaagtttaaatatatataatatttgaaatttcaaaataaatttaataccgatccaaactttataattttattttgattgttatatataggtttcacccgttgtataccgtcccatattaatatatttttatatatttataatatttaaatttcaaataaagttcaaatatttataatattaaaacttcataacagttttacaattataaatatttaatacgttttataaagtataacttttaaaaagttttaattttgtaatatttaaattttaataaattttaaatatttataataatttgaatttttaaaaattcaaatttttaaaataaaatatattttttagatatattttgtagggactaaatatgtaatagaaaaaatagttaattcaagtatttcatgcaaactatagaattataagttcttagcaatatattatttggttgaaatataatttgtaaaggtttgaatgttagtagtaaatagtaaatggatttttggccaaaacatttacgaaaaatgtatatattgatgtataaaatcaacttagacatgaaatatattattcaataatgtagatcatgagtcatgtaaacacaataaagtaactagttggatgtacttgaagattcacacttcaatatgtactaaatggaatgaacattaatgtttgagtaatttgtgttatgttgaatagagattttcgattagggtaatagagagtttgtctcaactcttaaccacttttgagcaattttaatttttggattactagtcattgactcattgtagttaaaagtttatactttaaaattttagtccataatatatatactctttaattttcaaatcatattggcatatacatcaaatcctattttcaaatcctaattgatgtataaattaaaactattattacatcaaaaatagatatgttcacattgggcggatgatggcgcgtcactcattgtgcaaaaattgttcataattatggatttttggatgatggcgcgtcactcattggccggtttgattcattgtttgaatgtatcctttatgtcagattgattgtttgatcatgaacaacaacatccagactctaaaattagcagttgctgcccatcatgccgaggaattgagcttggttattggtcaattcccattctttttttaattcagctaatcttttaattattagctaaccatttgtcttttccattgagaaaatccctattgtcgttaagaccatgcaacttgaacgagttcttcatctcacactttgtggtcgcaaaaccaccggtcccatagtctctccccaaccaaattctttcctttgtgcttaggtattctagtttgaatcatttattcaggagataaatataacattctcgttatctaactatctttatttcttctcttctagcttccaattggagttttgtgtctgacatttattaatctctttcgctacagttgctcgtcgtaggaggagctgacatcaatcctgcagatctgaagggaaattctccacttcatttaatgccctcttgatggcgggagccagtgttgcagccaccaccctcaaaggagatactgtaagtattttttcttatttttcttatgttatttcttatttatgaatgtgcaggctctgcattttactgcaaggagaagtgactacacgaatatcattactgcatgatcaagagtctcttggctggaggggccatccgtggagccataaatgcttttggaaaggtaatacaccattagagaaatatatacaattatacatatcgtttttgagtttgggtattgtttgattttacggacacctctaatggttgcaggactattgaagccataaatcttctgcaaactccttaactacgtgtgtagttgctgcaatcacttggatcaactctctctttttttttttttttgtgttgacaaaacattgtgtgtttgtcattaacttcttaagtaaattttaagaatgaacaatataaaatactctgaattctctttgtttgaatataagaatttacaacaagatatggtgcacgtgattattattgttaattgtcctttcttctacgtactaaccctttttgaaagaatatgttagaggagaaggtgctaaaatctagaggtatatatttgtatagctttaattgatgattgtggattttggttgtgaaatgcagcatttgagtcttttctctttatactgccattgaaggataagaaactaaagactcaacttgcttcaagcggaaagttgtatgggaaatatgcaaaagctgcttctaaaatcgagaatgtaagtttactccttcatccaactctgggagagatcttgtttgttaggcccttttttcatgtgcttcttggagatgaaagaagctgttgtgtttatctctgttttgccgtcaagcaactgttttgattcttctattcttaatagttcagctcgttttaggtggtgagaacatctctctggttgtggatcctccatgagccagagcagaggaaccaatagtgttgtagacaaataaataaaaaatattaaaaaatcagttcttaggaatatgcatgaacaagtgggtgtggaaaaagaggttatgcatcatgcatgaattaggataatgtaaaatgtcaatacaatgtggatattgtgtactttatgataacaaatatatctagatatgggggataataagataatgttgtaaagatgttcatgttgacatttaaatgaaacttgaggatatgctaaagggtaggaccagaaaaaagttataggacgataaagtttgttcgagaagtattacaacaaaattgaagacaacaaaccaagacaacgttatagcgatagaaactcaagacatgttagacatgttactcacttttgtgaggtttaaattggaatgggttccttatatatggcttccacctttgagccagagttcatatcgacgatccaattcctcaaccaaaagcagagtctctggatcaacaaagtcggcagtttcgtcttcccaaacaatatcagggaatgggtacttttccggaggcaagacgtccgaatacttgttcaccaaactagtagcagcagcatcatcttccacactcgccatgaactccctgacctgatcgagaaggttcaaagcaggaatgcagctctttgcaaaagtaagcatacgcgcaagagcagtcactcccagggacctgcacttgtcccttgagtcgcaatcatcgtcctttctcagaagatccacatagttaaaggacattacattgactagcgtttgtgtcacggagacttgacgtacagctcgatcgtaatgatacatattgtagcgctgatggagaagactggcgtacaccggatcaagatgacggacgcaaggaaactcgtgtaaaacatcattgagcttgtttgaaagtgttgtccctgcagacatgaccttgacggcatacttttgacggatatcggagatatcatcatgacaaacacggtctggtatcagggtacagtttggtatctgatactcaaaacggatggctctatcaaaatccaattcagtcggaaccacagcacttatcttcttgaatatgttcttctccattgttccacaacgaaccatcttgaatttattcttgtccatttttctgcacaagtaaccaataaaaaaaacacaggaattacaactctttttaaagatccttatcaatcgtatgcaatctcaacccctaagcaatttctaatcacacatcacataaaaagactaaacataaaagatttgttagtcaatctaaggcgatatttttttaatttgttttaagaaagatccaaacaatcgtatgcaatctcaacccctaagcaatttctaatgacacaacacacatcacagaaagagaccgtgagttttttttaccgaacacaaagatttgttagtcaatctaagtcggctttacgacaaaaatctaggtcgaacttgtacaaaagagcgagcgtgttcgcatcaggtctaagatccatacaaacaaaacctaccaaacagttgggagagagatatccaaagagcttgcttaagagacttgcgcggaaaaccttcaccagctttttatatgtctttacataaactagggttcacaatcgatatctcctttctctactctcggtttcgaataccaaacctccatctaattttgtggcccaatagagactgttccgaggcctactcaaaatgtccactattgttatttttccgtttctcggatagccaatctttatttttaattggagttttaaacaactaatgtaaaagaagaaatgtgaaatgataaagaaagaaagtgtcacattcatccgattcgtcttcatcggattcatcggaatgctataacaaattaaacaaacatagaattacattgttttgtaccgtcgtttaaacctttttatttcaaacattttgtcaaagtttacaataaagaaacgaaattacagtattacacgatgctttctctcgacaagtttcactcgttgaattgatagatgattattcatttttctttctttcattctcaatgtatattataactacatcataaactacaatcaaatattcttggtcttcgcactatttacgaaatttgtcatggtgataaaactaaaaggctgactttggaccttaattactcttcatcgattccatttaatgatcaacatcctaattcaaggttttaccggtatatactttcatggtattataggtgattataagtttcatagatatctaaaaaaaaacattttcgttatatttaaattttcttttgatttttggaccgtgatttcgtcaatattagatggtttttttttgtataaaaaatagaaaaaattcactagcgtaattgaatgacgacttccgtattctccacaacaggaataagaaaatttagcaaaaaatcaaataaaatctttctcaatattgttttctattaaatgtcacaaaacaaatttgttaagagataaataaaagtaattataacataaaatttttgttaagaaattttaacataaaaaaagtaaataaataaaaatgtaaatgaaaaaaggaagcaattaaagaaggtggctagcatgtaaattgttaagagaataatgtgcattagcaatttctgagctgttgcattacctatatccgctggattctctctctctctctctcagattcttcaaatcttccagtagaacaaaaaaaacaaaaacgaaaaccctaatttttagaaattgtttcagtttcaacagaagaacaaaaacaactagaatttttttagttttttgtgcgtccatggcctctttagactcagattcttcttcttaattagtttttttggtttgtttgctttgttctttttgggggagaagagaacgtggcagagttaaaggtaccattcgaatattctaaaacacgttcttgctcgtgatatttttttgcctactttaatttatctttttcttattggcaatcacaatctcaaatcgtttttgagtgctgtgtaattttgatgatcgtgaataaattggatttagttctttggcgtgttcttaacttaattactggagatattttattgatttgagaattaatagttaatgtgttatttaggtaacgtatatgagagggttttgaggtttcatacgttaaattttctgcaaaaaatcagagaaacaattctaatcaaaatttcaaaacttgaaggaccgtagattctctctcaaggatcggtttgattctatttttgaagtaattttttttttgtctctttcttcttcttcttgttttttcttttgggctttaaagatttgtcgattttttttctccttttgaattcgatatgattatattttctctgaatctatttgttgggaattttaatgtatttgttctctgaatctattcttgtgttttggttgatgagctaattattaaagtaatcagtagtaatgatcatttggattttgtatgtggctttgcttatcttttctctatagtttatcagaaaaatcagatttaattgccttttgatgttcttgttctgttttgtgtctccagatgcaagaatctctttgaagtaatttggaatctttctccccaaattttattctgggatagtttcatatttctggctgattcatcttacttatatataaacaattatatatagctaagatggatcaaatgtcacctgataacataaatggagtcattttagcagtgtcttcaagtatctttattggttctagcttcatcatcaagaaaaaaggtctcaagaaagccggtgcaagcggtgtccgagcaggtgaaggagggtatggatacttgaaggagccatggtggtgggctggaatgataacaagtaagtcttatcaaattctgcaaaaatgttttagtgatcattgactaaacatgtgttttgttctcttaatttagtgattgttggggaagtagctaattttgcagcctatgcatttgcaccggctattttggtaacacctttgggagctttaagtattatattcaggtattcttattgttgaaaatggcatcagtatcatatatttagattatagactatggttttcttgaaaacaaagatccatgttttatgcagcgcagtgctcgcgcattttattttgaaagagaaattgcatatgtttgggatacttggttgcattctctgtgttgttgggtctacaactatagtcttacacgcaccacatgaacagaaaatagaatcagtcaagcaaatatggcagcttgctattgaaccaggtatattttcataagtaccgcaaagttttggtgtgcaaaatcgattctagtgaagattgatatatatatgaaagttctgtttcatcaggtttccttgtgtattctgctgtgattgtgattgtggtggctatactgatcttctactatgaaccgcgctacgggaagactcatatgatcgtatatgtcggaatctgctccttaatgggttctcttactgtacgtttttcttgagctctctctctatttgttaactatgtttcatgggaaatttcttcatgctttcttgtgtgtttttaggttatgagtgtcaaagctgtggcgattgcgattaaactgacattttcagggacgaatcagtttaaatacttcaacacttggattttcattttagtagttgcaacttgttgcattttgcagatcaactacttgaacaaggtaaagaaaaaacactagtaaaacctaaccttcatatacattttactgagtttctctctttgtatttggcaaaaaaggcattggatacattcaacacagcggttatttctccggtttactacgttatgttcacaacattcacaatcatagctagtatgatcatgttcaaggtcaaaatcaaatctctatttcctttttcttctttctcaagtaaataaacagtttcttaatatttcctctgttgtgtgattacaggattgggcttctcagagtggattaaagattgcaacagagttgtgtggttttgtgacgattttatcaggaacttttctgcttcacaagaccaaagatatgggaaacagtgcaagtggtcgtggttctatctcaatgcctactagagacactcctgtcttcactaattcaggatccggtcggagctccagctctgataaagtagcttcctgatgatctaacggctcagattccttcctgttaggaacctttttttggtttgtttcccacatgaggatgtaatttttacgactaaattgacttaagaaaacaagagtttaattttttctaagtagatgtataataatgatgtgcatataagtaaccgaaccaaatccagattattaattcttgaatttaaatatccatataagtactgtttcttttctatcaattgataccaatcttagttaaatcgaatcgagctaattttttaaataaaatcttggatagaaacattaggaacaattttttatatctcaaagatcatttggagaaaccattgtcttgagataaactttggcgtcacgacaaccacttatgctgtttgaaactgggtaatgaaaccttccattggaacagttatagagagctaaaccggatctaaactccaataaaaccactaaaccgtctgagatccaaagcggtcgaacaaagtcggtcaaaccaggaatgctcaagagtttagaccaagaatatacttctccaaactccttcatcacccaaacatctgcattagctcctttgcaataacacaccatcgaaagacatcctcttaaatctccaagcgtcattgtaaaacatcctctgccacaacaaactggccctggaagctccttgaactcatcgcgtgacatatcatacgatatgatcgtccatgacgatgatgaggaagtggctgcccagtttagtgtcccgttgatgtagattccggatcttgatttgtcagcaacaacaactccagatgggaaacttgtgttgcttctccatagcttttgtctcgttgagtagatctttgtctctatcttcacttggtgtctttgttgcaacaacgcaaccactttatagtcatcttcagattcatcataaccaaacccatacgttacaacacactcatcatcgctcgtttcaagatccgaactagacaatctttgttgaagcttgatggttggattccacaggtagagacttttgtcgtaatctacgtggaaacaaaccaatccatggcacgtccccacgacttgatagtaatctcttcctaaaagctcaccatcatgttctgagacgtagaccgttgacgcgttgtagagagaatggatgcagcatgacttgagatggtaccgagacgttgttatgactccgtaaggactcttcgtggaagtagttgccttcgatgtctccaagatcaaagcgtgtttcagagcaaacagagtctctgagatcaaagatctccaggagctgcaaacgcatttgaatcgcgtcaatgactttacgggtagtcttaagagaatctcttccatcatttcaagaggaagattatgaggtgagaacatctctctggtagtttcatccatgagccagagcagaggaaccaatagtgttgaaggataataaataagaaatattaaaaatcatttctttaggtatattatccgcattggggtataccggtatagcatgcacaagtggttgtggaaaaagaggagatgcatgtgtcaggataatgtaaattattaaatataatgtggatattatgtactttatgatataaatacagtatacagtatatatttagatatgggggataataaataatgccgtaaagatgttgacatttaaatgaaacttgaggatatgctaaagggtatgaccagaagacgttaaagtttgctacttatttacgtttcgtattaaaaattttggttcttgtcataagcaataagcaccaaagctccatcattaactacgatggaccgtggcagaaaatttccaaagtattataccaaaacaacaactttgtagggatatattgaaactgaagacaaatcataatggctttgaatggaggcagcggacaaaacggtccaatttggttgcggtttaatccatttcatttttgggatggacaataaacagctgcagactaaatttatttgtatgtataaatggtatgtagatggtccactgcgatttttttttttttttttttgtccggactactgcggattataattgatgaatgataaataaaaaacggtctgattcgttgacggttttgtccatcccaaccgttgtaaccattcaaacccaatatcttaaaaaaacgctatagttatggagttaagaaagtttttgttagacatgttttgggatgtttaaatggattgggttcctatatctacaaagtgagcaagctcaacacgagatccactaagcatagaacccgcaaatcatataatcaaatcaacgtacaaaaaacctcttatattaacaatggggtaagaatgggtcaacatttgctaattctttaacaaactacataaatgcaaaataaagaggatgttacaatgtctagtctacttagtagagtttttctagttcactctcggattgatcaggcctcctgggtactttagtatcaaattattacataccatataaaatgttatttttgcatgaattaatacgaacattttaccaaataatcaaatatataacaactttgatcaaagatactattaaattgatcaacttagacaaaattttgatattcaccattagttaacatatttatatgtaagtttgtaaaagaaatatagaaataatcaaacaacctaaaagaaatacgtaaattagaaaataacgttacaaaaatgacctatgtactagcaattttttattatttaatatttacaaaaaagacacttgctttaggttaatcacagccgtcaaatcttcccaatacgatcctcaaaattctgttcgtatagttaatcacagccgttagattccttataagaatgtaggctatcttctctcccgctcctaccccaaattcaaaattcgaattttgattcggtcaaacaccaaccgttgtaattctctctctctctctcttttcaataaatctcacttaaatccctattttcaaaaagctaaacgatacactcctttgtacgctcttcttcttcttcttcttcttcttcttcttcttcttcttcttcttcttctcctctctgtactttcgcgaaaaccctaattttctagatctgtttctctataatcgcctctctcactttgtagatccttcagatctactctccagtttctctctcagaaacacccaaccatggctaccaaacttccccttcaaaacagcaatgccgccaatgttgcgaaagctccggctaaatctcgagctgccgccggcgggaagacgatcgaggaaatgtatcagaagaaatcgcagcttgaacacattcttctccgtcctgatacatacatcggatctatcgagaaacacacccaaacactttgggtttatgagaaagatgagatggttcaacgtcctgttacctatgtacctggattgtataagatctttgatgagattctcgtaaacgccgctgataacaaacagagagatgcgaagatggattccgttcaagttgtgattgatgttgagcagaatctgattagtgtttgtaacagtggagctggagttcctgtagagattcatcaggaagaaggaatttatgtaccggagatgatatttggtcatttgttgacgagtagtaactacgatgataatgtgaagaagaccactggtggaagaaacggatatggtgctaagcttactaatatcttctctactgaattcatcatcgagactgcagatgggaagagactcaagaagtataagcaggtattgaatcgtttattgcttctgtgatgttgttgttgcatttgtggccttcgttgagttttatgatctgatttcgattgatacagttgttttatgattctgtgttgttgttgatgtttcaattgttgcgtaattgattcgtttaggaactgaacttttactggtgatgatttaggtctttgagaacaacatggggaagaaatctgaaccggttataaccaagtgtaataagagtgagaactggacgaaggttacattcaaaccagatttgaagaagtttaacatgactgaattagaagacgatgtggttgctctaatgagtaagcgagtgtttgatattgctggatgtttggggaagtctgtcaaagttgagctgaatgggaaacaaataccagtgaagtcattcactgattatgttgacctatacctaagtgcagctaataaatcgaggacggaggatcctctcccaaggtttgttctatgatttgtttttgctcagtgattataattgtgtttcttgaaatggatgttgatctttttgagttttgtgtgattaggttgactgagaaagttaatgatagatgggaggtttgtgtgagcttaagtgaaggacaatttcagcaggtatgtatttggttggctgttattattttttgttgttatgaagaatgagttaagtcttaacaaccttttctgctgctaccaggtcagctttgtcaactccatagcaacaatcaagggtggtacacatgttgactatgtgacgagtcagattacaaaccatattgtggctgctgtgaacaaaaagaataaaaacgcaaatgttaaggcccataatgtgaaaaaccatctgtgggtctttgtcaatgcattgattgacaatcctgcttttgattctcaaacaaaagaaacactgactcttcgacagagcagttttgggtcgaaatgtgaactttcagaagattttctgaagaaaggtatggtgtgctcgatctgtctttttggataagtgatgtaactggtttctagaagtgtgattaacccctttttcttatgtaatgtttgttttagttggaaaatctggcgtagtggagaatttgctttcatgggcagatttcaagcagaacaaagatctaaagaaaagtgatggagccaaaacagggagggttctagttgagaagttagacgatgccgccgaagctggagggaagaactctcgactctgtacgttaattttgactgaaggagactcagcaaaatctctcgctgtaagtggttttgatctatagtttctgctacctccctattttgataacaaaactcctaatactcattatggtcagttggcggggaggtctgtcttgggtaataactactgcggtgtgtttccgcttcgaggaaagctattgaatgtcagggaagccagcaccactcagattacaaacaataaggaaattgagaacctcaagaagatccttggactaaagcaaaatatgaagtacgagaatgttaactcattaagatatggccagatgatgatcatgactgatcaagtatgttaaaagtctactccctaactttacactcagtgcattattctatatggatatgttcttgacgaaatctccctctctaccttgtgcaggatcatgatggttctcatataaagggtctcttaatcaattttatccactctttttggccgtcgttactccaggttccatcattcctggttgagtttataacacccattgtgaaggtaagtacaaaaacattattcttttataatatcttatagtgcttgacatagtagatataagaatgctaacaactgccctgaatatattttacacaggctacgcgtaagggtacaaaaaaagttctgtcattctactcaatgcctgaatacgaagaatggaaagaaagtctgaagggtaatgcaaccgggtgggatatcaaatactacaaggtttgctctctgctataactatttaggaagaacttattgaaagtgctcatgttctctgcaagtttgcattactaattgtccttataatctccaggggttgggtacaagtacggctgaggagggcaaagagtactttagtaatcttggtcttcacaaaaaggattttgtttgggaggatgaacaagatggagaagccattgaacttgctttcagtaaaaagaagatcgaagcccggaaaaattggctttcgagctatgtggtatggaggattgagttatctttaaaaacgtgtgtttattgcttactacatctgcctgttctgatttcctattttccattcagcctggcaatcatcttgatcagagacaaccgaaagttacgtacagtgacttcgtgaacaaagaactgatcttgttctccatggcggatcttcaacggtcaattccctcaatggttgatgggctcaaaccgggtcagagaaagatacttttcgttgcattcaagaaaatcgctcgtaaagaaatgaaggttgcccagctcgttggttatgtatcattgctgtcagcttatcatcatggcgagcagagtcttgccagtgctatcataggcatggcgcaggattacgtgggcagcaacaatatcaacttacttctaccaaatggtcaatttggtacacgaacttcggtaagtatagctaatagaccaactgttgtcatttatctatgcttgtactcatcatagtgtacacaattgtagggtggaaaagattcagctagtgcaagatacattttcactaagctctctccagtaacaaggatcttgtttcccaaggatgatgatctccttcttgattacttgaatgaagacgggcaaaggatagagccaacttggtaattctttgcgctccttaattagttgttttttttcctaagactagttaacttaacatgttaatgttggttaggtacatgcccatcattccaactgtacttgtcaatggcgctgaaggcattggaactgggtggagcacgttcataccaaactataaccctagagagatcgttgctaatgtaaggcgtttacttaacggtgaaagtatggtgcctatggatccttggtatagaggttttaaaggaacaattgagaaaactgcgtccaaagaaggtggttgtacttacacaatcactggtctatatgaggaggtggatgaaacaactattcgaatcacggagttgccaatcagaaggtggaatgatgattacaaaaatttcttgcagtcattgaagacagataatggtgcaccttttttccaggtagaatgcctgctttaattagaaaactgtgctagtattcattgacgcttctttctgacttgttccttttctttctgcaggatgtcaaggcttacaatgacgagaaatctgttgattttgaccttattttgagtgaagagaacatgctggcggctcggcaagagggctttctgaagaaattcaaactcaccacgacaatcgctacaagtaatatgcatctctttgataaaaaaggtgtgataaagaaatatgtgaccccagaacaaagtaagaagagatccaacttgttttcattctgttttttgttttcttctctagaatacatactaatgttacatctcacgttgcagtccttgaagagttctttgacctcaggtttgaatactatgagaagagaaaggttagaaaaactgaaactatgattcaagtcttttagaggttttacggcaatggtctaacattaacgttctttatgatgtgtacacaggaaaccgtggtgaagaatatggaaattgagctgttgaaactagaaaacaaagcgaggtttattcttgcagttctcagtggagaaatcatagtgaacaagaggaagaaagccgatattgttgaggacttaagacagaaagggttcacaccatttccgaggaaggccgagtctgtcgaagctgcaattgctggagcagttgatgatgatgcagctgaagaacctgaagaaatcttagtggatccggagtcaagctccagttatatacccggctcggaatatgactacctattggcaatggctatagcttcgttgactatagagaaagttgaggagttattagcagacagagataaaatgattattgcagttgcagacatgaagaaaaccacaccgaaatccctctggctcagtgacctagagtctcttgacaaggaactagaagtaaggattcacactatcccttatttataccgcttaaacataacaaactatcacaatttgtcattgatacatcattttcctcatattgcagaaacttgatctgaaagatgctcaagtccaacaggctatagaggcagcacagaaaaaaatcagggccaaatctggagcagcagtaaaggttaaaaggcaggcaccaaagaaaccagcaccaaagaagaccacaaagaaagccagtgaatctgagacaacagaggcttcctattcagcaatggacacaggttagtctcttattcaagtgtttacattgtgttatgttttctgggttggatctaatatacattggaaattttgtattgattctataagataacaacgtagcagaagtggtgaagccaaaagctagacaaggagcaaagaagaaagccagtgaatctgaaacaacagaggcttcccattcagcaatggacacaggttagtctcttattcaagtgcttacattatgttatgttttctgggttggatctaatatacattggaaactttttattgattctataagataacaacgtagcagaagtggtgaagccaaaaggtagacaaggagcaaagaagaaggctccagcagctgcgaaggtaattgactgtataatctgtaaaacttgtttagtttttttcaaagtttgtattctgattatagaaacgaagtgattaaaactgtggtctgtttgtgttttgcaggaggttgaggaggatgaaatgttggatctagcacaacggcttgctcaatacaatttcggctcagcacctgcggattcaagcagtaagtcagtcacataattgacaaagaaacattgctctaacacaactgcttgtatgtattgctggttcctgaagtttatgtcttgtcttttctgtggtttaatcaacagaaacagctgaaacatcgaaagcaattgctgtggatgacgatgatgatgacgtggtagttgaggttgcaccagtaaagaaaggaggaaggaaaccggcggcgactaaagctgcaaaaccaccagcagctccgaggaaacgagggaagcagacagttgcttcaacagaggttctggcaattggtgtgtccccggagaagaaagtgaggaagatgagatcatctccgttcaacaagaagagtagttcagtgatgagcaggttggctgataataaggaagaggagagcagcgagaatgtggctggaaactcatcgtctgagaaatctggaggagatgtttctgcgatatcgaggcctcaaagagctaataggaggaaaatgacctatgtgttgagtgattccgagagtgaatctgcgaatgattctgagtttgatgacattgaagacgatgaagatgatgagtagagagagcgagaactgactcggttcttaatatgatttagtttcaaacttgtagtttctccctctggtcttctttggatttggtattactctgtagaaagacatatttctctaacgttggtcacaaaactcttacattgtttaagcgtttagtgactttttggtcagtcattctgtttttatttttattttttggctggcattaatttctctttggttgatttaataatagaaataactgcatatggatctttttgttttagcatataagcgcaggattgtatggtggcatatctaaaattttggtcttttttatgagccagagcagagggacttcgaaattttggtcttgtatagttctttatatacaaggtagaggcaaaagatagcggataaataaggtaaagtggtaaactgactctaggtaagcatgttgacaaggaaacttgaggacatggactagcagaagttatagggcaaaaaagtttggcacttttatgttagaagtattaaaaattttgatcttccataactggacagtgtcagaaaatgccaaagtattacaacaaagtttctgacgacaatccacgaacacattaaggagatcgaaacgaaataaaaaccgcacaaactcttcatgaaacgctaagttgtggagtgaaggtggttcttggtactcaagtttgagaggattcattggaatgaagttcttcactgttttgctgcaccatcaaacctgaaaggtagtagaagtgaagaactcatatgaagacagggtaaggacttaaatcggtaagcacgttgaaattaccttttacctatagaatccagatgttcctatgacttaagaataatccttttctcctcaatctgattttcaagttcaaacatgtgaaaaagggtgtataagtaactaggcagttaagtggtagagctctaatctttttctattaaaaccagaaatgaactaatctctacacaatataaagcaacaagaagacaagtagtggcatgcaaagaaagtaagcaccaaaataacttctggaaatttttcatgttaaatcttaaccactacctacaaaattattcagggacgggaaactataatcaaaaggacagtatatgatgttttagttttgccttagcgatagctcagtgcttcctaccacattaggactaattaatcaggccaagcaagagttggaacaactggaagattatatgtaaacagatgaaaattttgttgagataatttatatgttcacacacacacttcttctcctagaaataaaaaccgcaccttaaacttctcatcatcatttgcatcacctctttccactgagctgctagatggtggattctcttttgacttctccacatcctaaaataagaatcacagaaccgtcaaaacaaagttttttggttccagggaaaaaacatttactgaggaattacaaggcaataatctattcaatccactaacctgtgatgacatcgaatccaatgacaataaatgaccttcaagattcctttcctgctgactagaatctgtcgagttcataaaagaaagctcctattataaggatgattaatatcgatataatgcttctccattaataaacttttaagatacctgaatttgcatctccatcgtcaactttctcataatctgagtggggtttctctttcacagattttgatccagagtgtcttttcttgatcttatgatcctctgaactaacaggagataatgatctatcgccccgtcttttgtcacgtccaggagatgatgaccgcaatctttcatgacgttttgaccttttatctcttgaactgttctttttctctattgatcttgacctggagtgccgtttatgtcttgatttcttttcatcagaatatccaggggatgacctgatatctctcccttgcttaccctcagatgatggtgacctcgaccgtcttccactacgacgcttggactttttgtccctgcttcgagtctccttgttataactgcgcttaccttccactgattttgacctggacctccttcgacgtgatcctgtgtttctgtcttcatccagcttattcttcctagaagacctgtttttcgtttccaatgatctggacctggaccttcccctcctctctttcatatcatagtcctcgtccaatgattttgacctgcgcttactgtgacgggaatttagatcattgtcttgagcaacatcaacattctcatgagatccattgtcattttccaatgatctggacctagacctctgccggtgtttctgtttagcttcatcagaatttcgagatgtgtctctggttttactcctatcttcacgagatcttgacctcgaccgctttttgtgatgtttcaattcctcatctctagatttatcctttatatctgcagaatcttccactgatctagatcttgaacgtgttctacgtttcactttgttttcctcatcatctcttggggttgacttaacttccttacgtcgccttggtgatcgtgaaccagcacgagatgatttcttctctccacgtgatgagctatctcgtcgaagtcttgacagctctgaatcttcttgtccagattttctctttttagggcttacactcctacttctccttgaactagaagaatggtgttcatctgatctaccgtatctcctactttcagaaatatccctagaatctctatatgaccgccttctcccttcataagttgatcgccgttgatatcttaatggtgatctcgatctgtgacttcttgggcgacgaaacggtggtgaataggttggagatctccgtcttcgcctgtaacttattggtgattttgactttgatctcgaccttgcaggagacttagatggtgacctgcacaagagaggtgactatcagttcagatgaaaacgttatcaaaaagagaaaggagcaagccataggtaatagagagaaacgtctatagatttttattggatgcccacctagacttctgatcagcttctttttcatcatttccaactccatcaggtctcagtttcctacttatctctgcagctctagctgctgcaagctcagtggcagacttcattgtggcagctctatttgctgcctgctgagtagccacggcttgttgcattagtatagcctgctggaattgcatctgctgcatcgcgacggcctgttgcatcatcagtggtagtgaggacgaagaattatttgaagatggtttgtgaggtagcgattttgcaatctcaacattcaatgctctaccaaagacttccgtattgtttaatgccaaagcagctgttgcttcttcggaattcgagtattctatgtaggcgatatgctttgaatcagttatactacagtcaactactgtgccacagaagctaaatagctgcctaagttgttcagttgtaagcgatggacttaggttgctaacttggagaaatttcttcaaatccccgttttctcctttttctggggaacctaaaccaaaagctagtagaactcatgagtatcgagaaaactaaataaatatctaatgatattcaacttgagacccaaagaaaaaatagagatgaatatcgagagactagcaacaaaaggtacagtacctaaagatcccttgtttgattgagcctgtgcttgcatctgagaagcatgagcttgaagagcctgtgcagcaacaatagcctgcgcagcagccattgcagcagcagaaggagccataggcacctgactaaggttacccatacttgtcgttgcagctatagcagtcatcagcaaattctgaggagggtggtttaacttgcacatagagttcacacatctaccattaagatattctcgacaaacttccccaagtgaagctccaactccaggcaaaatagcaccacctgaaggaccagatgcaatccctggaaccatccccaacaaccccgggaaagcacccgaaacagaaccagtgtaattaggcatgtttggcattgtttgatttataagattcgagtatgaagctggagcagaacccatcagtccagtagaagaagaccctgttacaaaattccataaagacaacacctttaccatcaaacaaagcctatatacataaacgaaacatcaatggaaacgataagattcattaccttggctaaagaagacaggaaagggacttcccatgatagcattcccattgcattcaatattaaccatatagtttcctctcttaggcacaacataagtaacagcataactcccatcaccaacatctttaaccacaccttcttgatcagtaccaccaacaccaacaccaggagacactttaactctaatcaaagctccaccatttggaactttcctcccatcagaatccttagttacaacaacaaacgtagacggaacacaagccgttccaccaccaataccagcaccagaagctgtagacttactcggatccacaggaccaattggtttcctagacaagtaatcagattcatcatcatcatcatcatctgaatcactatcagattccggtgcggattccggtaccggtgcaacaggttcaatcaaatgtgtagtttggtctacacctttgaatgtagcttcaaaagctgcttttgccgcagcgtctttctctccttcgtctttgatttttgcatcttccgcatgtttcatccaaatgggcttaccaccagaagctgcagaaccacgatctgaagccattacaactataaagtaccaatttttatcttcttcaatctctcaaatgagagctaaatccctaattcgagaatttacaatcaacaagaagcagagcctaagattccattaccattaactagaaagataagaatggtgaaatcgaaggtagaatttgcaggtctagggtttctatgaaatcaagaagaagaagaagaagaagaagaaaaaaaggtcgaatcttttatctaatggtttttaatttagaggcttcttaattactttgctatatttgcaactgtggtccctaatatatttcaaacttatgtatttgatctcatacttccaaaattacacgtgaatcggaatttttctctttgatttaatggcatatttagattttggtcatttattccataactgtacttctttatcaaaaagagtataactatggtttgtgttttactccattaactagaatagaggaacaaagaatttggagattatttcattagttctatgcacaaatgggtgtataagcaaaagtagtttcatgtacttctccgattatatatggcggatagtaacatcagaatgtgttgaagatgttgatatataaaggaaacttaaggacataaactagacttgtgtcagttattggtacacaattccaaagtattacaacaaagagttgcagataacaacccaagacaaaaacaataaggagatagaaactgcacaaactcttgaggtggttcttggtactcacttttgggaggatttattggactggagttcttcacgggtttgctccacgagtattttctcaattgcatccatgaagcctgataagttttgccgggtctctaaatccaaggaattcgctagttcctgacgagtagagcaagagacaaatcgttacgcttagcaaaaccaaacgcacttacatctacaatgttgcaaactgtatttggtctaggacaatggcttaatcatgttattatatatcctaaatgttcgatttgagagattaaataagactgacaacaatgaccaggagaaggaacagagaagacctttgtttatgatggaattgtaaaatcgagaagaaagtgttgagtttggagaaacatgatcttacctcaactttgcagataaggctcagagaaattccctttgactgattgtcagagttcttgagagatgcaagcttcaatggggtattcagcagtggccaaccatcagagacctttaaaaatgcatcaatacctccagctatatgagccacaattgtttcatctttgtcgtagtattcaaacgtgtacctgccataggatcacaaaacatgcagtcaattggcttgctcagacactcaatgacatgagttagctacgaaagaaaaattcagcctctcaagctactgaaagggaaggctcacctaattgttttcgaactcatcacaatatattttctcaaagttgttgaaataattttatcttgcactttggcgacaacccactggactgaagatcttgtgtctagcactgcagagtgtaaccttacctgcctgcagttttaagaataatagaatgatatcatcttatcgtccctgataacttattagtcttataacttacgtaccatacagtttcagaatgataagtaatacaaatttcaggacataaagatactagagcgcaaacctgaaagaatcagctgcctcgatgatgtctcctatgtatatatcatttggaaacatctgagcaagaaagcagatttcaattttattcacaaaaaggaacaagaagcaagaaacagatacatttatctaggatttatgcaaaactaaagcataatagtcagcagtgaaagacggagagtgttcttacctcaaattttgttatctctgtagttttatccttaaggtatattagcaattcatggatcaattcagatggctcagtaatgtggtcaaatttgtgctgtccaagaaaaccgtctagtttttgaatatatgttcgcagttggagcctaataaagtttccgtcaaactcgagcaccttcaagcctgtcaatgcgtcctcaacttgttctgcagcatcaaacctgaaggtagaacaagtgaagaactctaatgaagacagggtaaatatgtaaatctgaaagtacgtttaaattaccttttacgtaacgaatccagatcttccaatgacttaagaatcatccttttctcctccatctgattttcgagttcaaacatctgaaaaacatgtgaaagatgatcaaatccatgcacaatataaaagcaataagaagataggcagtgacaagcaaagaaagtaagtactagaaaaaacatctggaaattttagagtacaatagatgctttttcatgttaagtcttaaccactacgaaattatttagaaattataactgaaaggacagtatatgatcttctgccttagcgtgctcgggaaaagtaggttagtacattctgccacattagctctaatcaataactggaagatagatgaaattttgttaatacatgtttcacacacacacacacacacacacaaaagcttcttctcttagaaacaaaacttaaaaacatggcaccttaaacttgtcatcatcaatcacttcacatacttccattgagctgctagatggttgattctcttttgacttctccacatcctaaaataagaatcacataactctcaaaactaagccttttgattccagccaaagaaataatctattcaaccaaataacctgagatgacatagaatccagtgacagtaaaagaccttcaagatccctttgcaacctactagaatctaacaaatccatagaagaaaactcatattataaaaataacagtagcaaactctatatgatctaaaactaaatcagtagaagaaaactaatgaagaaccttgggcatgagactgagaaagacgttcaatttcttcagaaactttggcactttcagcctccacagactgaagctcatttctcaagtactccaagtaagcatctgtcagatttccatcacttaatttcaccattatttgactttcatacttcatcttaatctcacaggaaacaacagagcaaacctgaatcttcaacatccaataaatcaacatcgccgtattcttcaacaatctctttcacctttggctacacgaaaacgaaattagcaatctaatcgaaaattagacaaatttgaaaaacggaaaagggttctcgaaatctcgcaattacttcaaactgaagaacaaaatcttgaaccaccagagtctcgtaatcggaactacacgattctacaggctcttctctgcaattccggggaaagaaatcgagctctttcacgcgcctgagaaaaatgagaacaaatagatgaacaaagcagcacaaaaatcaatgaaagaaagagacgaaagagaagtagaaaacctgcgaatctcttggagatcgagagatccgtcgtgggtttcttcttccattgaagaaagctttagtcttggggattcattttggcgctactgttagagaactgaagagagtgtagttgtgaagttgaaagcagagaagacgatttcaattttcaaatgggaaaggtgaaagagaaacggaagagaaacataactctccccgaggtttatacttttcttcaacattaacccctgaattctatttgaatcaatttgacccagagggttgaagttaattgcaattccggttcaatttattatgaccaatcgtaacgtattgaaccagaagactctttaattttaatctgtaacgtttacttccccttttaaaaaaaaagaaaaaaaaaacttaattaaatttaatcaaaatcataattatatatcagtgagtatgttccctcagctcccaaattcgaccctctagtagccacatctgctttattttattttatctttcagtaaatctgcccccattaaaatgtccaataaaaaatcttccttacttcagggtagagattttgatatttacatatagttattcttattgtaccgattgtatcgaatatttatatacttggatatatctttgtacatcaaatggagtcaataataatatcaagaacggtgaagaaactgccagctagagggatgagattgattgatgcagttatcaaagtggattgcaacaactctttcatgtgaatgtgatcttaatatcatgtcacacaaatacataatctgtttctactaattgcgttttgtgtaaaagattaataatacttcacatcttaattactctttaaacgaatcattgatctttcatgaaaggaaaagaaggttctagtctttgtcagaaatccataatccaatcttgtaaaaggcaaacagtttttgtcctaaaagatttgacgagcaacgaatcggttcattcccagccgttggattgatttaaatactcaggaaaagtcatcccaaaaaggtgggaacttgccactccacatcaccatggcacgtggtaagcttacagaggaaaacttcaatattggtttactttctccaccactcaacattttgtttgttcgtgcatgttgttttgtgtccgtgtattatctattaatctatgttagacatttttttcttcttttttcgtcaaggatattcctttttatgtttaaagtattgtgtacatatataaaaaaatattgcatattagattattgacttgaatcgaaggatttttaaaaaaaaaaaaactgtttgtagagaagaaaaatcgaaaactacttgtattcatcagaattaaaaaaaaaaagtcagtctaaaaatataccctaataaactgacatacctatttcaacgatacaattctataatgagttattaaattgatttgatttcgtattctctaaaatatactcatagacatagcagaaactagttaatttgcttatatgttcatattcttgtacatcatgtgatctcacgtggaataaaaataatgtgaccatctctaattctctacttcacttagtatctaagtatccactgtgataccttgttttctgctcaaagttgtacatgcgtagattaataaatacatttcaccccttcaattgatcccaaaagcctctacaagacagccaaaacaaatcaaggattgcgcaaagcattcaagtttcgaaacaataatttttttaatggttgacaaaaagcaataatttgtaaagcgattcataggtcagcttctaaatgttctcgaaataactcgaaccaacacctaaaccatttgttctaacgataatagacgaacgtattagagactcgttaggaaaacactacttgtatatattcacttttacatacatatttgtttccttcatatatttatttatttacataacaaaccaatatgaaaaacgtacgtttcatgaaagagaacgttgtagaacactatcaccgtttgcttgtaagaaaaaggcttatctcacctataaactcgtgagtcatatttatactcttaacaataataaataaaataaaactctattttggtaaccacaaaaaatattctgaggctaaaagcgcgtctgctggaaagttcacgcgctctgctaaccccaccgtccattctgactcttttagatcttaaccgtgtctttatccacatcatacgtttatacacgtgtcacacgatcacctattctataaaaaacattattttaatcttatcctttttatgcttcccctataaattatcttctcttcctccttctccgatctctcctccgtcacacaaaacttccgatttcaaaaaaacaatttgaaatttgtcaaaaggaatattctgacgatcgattcttgattcgttttctcgcgtatagagagaaaaatggcgcttaatttatcgcatcagctaggagtactcgccggaactccgatcaaatccggtgaaatgacagattcatcgttgttatcaatttcaccaccatcggcgagaatgatgacacctaaagcaatgaatcgaaactacaaggctcacggaacagatccatcaccgccgatgagtccaattttaggtgcgacacgtgcggatctgtcggtggcgtgtaaagctttcgcggtggagaatggaatcgggaccattgaagaacagagaacgtatagagaaggagggattggtggaaagaaagaaggaggaggaggtgttcctgtgtttgtgatgatgccgcttgatagtgttaccatggggaacacggtgaatcgaagaaaggcgatgaaagcgagtttgcaagcgttgaagagtgctggtgttgaagggattatgattgatgtgtggtggggtttggttgagaaggaatctcctggaacttataattggggaggttataatgaattgcttgagctggctaagaagcttggtcttaaggttcaagctgttatgtcgtttcatcagtgtggtggcaacgttggtgactctgtcacgtacgtgattcttctctcttgctcaatcacttattaattcgtgtatcatttttaaggctacttgagattggaaagattagaagtaggatttgagattatgaccaattttggaactgaatgattgaagtttgagtaggcaggattgttcatttttttaattgattgatggagtaacgtgtacgggaattgatgatacaatattcaagaagaaagtgataggtttaagagtgtacgagttacatctatttctttgttgcgtgagagtcttaaatttaatattgagcgacttgttgttcgtctttttctctgttgttttctccttacgaaactcttaactttgaggcctttatgtctctttcaagattgattacaaaagatggattctgtataaagacgtttcttttagattgactaatgagttatttgtttgttttgaatatagagttacttcatataggagtgaagatgtcattgtcttatcattcactaatgagattttgtatgttctaatatggaattttttttatttttttccagtattcctctgcctcagtgggttgttgaagaggttgacaaggatccagaccttgcatacactgatcagtggggaagaaggaaccatgagtatatatcacttggcgctgatacactccctgttctcaaaggtagaacacctgtgcaatgctatgcggatttcatgcgtgcttttagagacaacttcaagcatcttcttggagagaccattgtggtatgttttagcttctcttatccatttcgtgtttcattttagaacatgcctctttaactctctcaatttctctactatgtttggttggaagtctgagtttgccttgaattcattttttaacaggaaatccaagtgggaatgggacctgcaggagagctgcgttacccttcgtaccccgagcaagaagggacatggaagttcccagggattggagccttccagtgctatgataaggtatttaccacaaatcacacatgaatagtctctgattcatcttgcaacgaatgtcatactaaactgttttccttgctatgattgatgcagtactcgttaagcagcttgaaagcagcagctgagacttatgggaagccagagtggggcagtactggcccaaccgatgctggtcactacaataactggccagaagacacccagttcttcaaaaaagaaggtggtggttggaactcagagtatggagatttcttcctctcatggtactcccagatgctgttggatcacggcgagcggatcctatcctcagccaaatcaatattcgaaaacatgggtgtcaaaatatcggtcaaaatcgctggaatccactggcactacgggacccgctctcacgcgcctgagctcacagcagggtactacaacacaaggttcagagacgggtacctcccgatcgcccaaatgttagccagacacaatgccatattcaacttcacatgtatcgagatgagggatcacgaacagcctcaagacgcactttgtgcaccagagaagctagttaaccaagttgctctagccactctagccgcagaagttcctctagctggtgaaaacgcattgcctaggtacgacgactatgcacacgagcagattctcaaggcctccgcgctgaaccttgatcaaaacaatgagggagaacctcgagagatgtgtgcatttacttacctaaggatgaatccggagttgtttcaggcggataactggggaaaattcgtagcgtttgtgaagaaaatgggtgaagggagagactcacatagatgtcgggaagaagttgagcgtgaggctgagcattttgtgcacgttactcagccgctggttcaagaagctgcagtggctctcactcactagagagatagattgtggcatggttctatggtttatgtttgtatgcgattataatgaaatggttatatgacaatgccaaaaaagatgtttaggcttgttggagcttgtgtatgtattgttagtaaaactgaaatgtatgccacagctctggtttttttccggtcaggttgtggcatgctactacttttaatatatgctaaaagatgtacatgttctttaatgaagccaaaataaatagcatttctttaatacatatcactctgaatcaataaaatgatagataaattatgtgtgtgattggtttgtctgtaactgtagattttttactgtaaaatttttgctgtatgtgtgatggtggtagctgtagattttattgctgtagaaattaggctgtaggttttattaatttaatattattatttgaagaaattggttgtagaaataagattatggttgtatgtatttttaaacaaaataatattattggtaaattgtacttatgtgttatataatagaattcacaaatatcaatttaatatatatatatatatatatacatttttgcagtcattttgtgaaataaatcatgaagttggaatttatttataatggttgccattggcttttaattattgttttttttttggcaataaattgattaacaaacgaaaaacattccaaatatatttcaatcccatatatcatgcagatttctccaaaatttgaactagattttgacaactatttaaaacaaaaaatgtttgacaaaccaaaatacaattgcaattccttaaaatgagcaaaacgcacctaaatacattttttacaattcactaaatcttatttctccaaaatttgaactagatttcggcaactattttaaaaaaaatttgtttgacaaactaaaatacaattgcaatcccgtaaaatatttatttaaattatatatttaaattagcggtgtaatgcaggtttttttacgggacgggtttggcaagacgaatttggaatgactttacttaataacaattgtaaactataaaataaaaatattttatagatagatataatttgtaaacttttatatatattaattttaaaaaataaattgtatccgcggtataccgcgggttaaaatctagtatattacaaaactatagtaatgtttttaaagaaatgagaaaataaagtgaaaagaaaaagagaaaaaaagggacagacattctaaagacgataaaattatgctttagaaaaacatgaacttacagacaaaataattaaaaaaatattatttgggctgtgagaaaaaatagaaaagctaaaacatgattgtttcaattttagggctttaacttttttaggtggtttaaaaatttcttacagcccaaccaatcatggcctatgtaatatcatttgtaaacagtaaacttataacagtagttcgcaatttgcaaatagacgccttctaagttatactttggtaggtgcttttgcagtgtgtatagtttgctaggtcgaaaccgtgtttcttattcattggatgggtgtaaaatgtaaaaacttagacagtaaaatagctaccaaaagccatacgcaacggtattaacggtaaatttgctatagttccacatacaaacattatgtgtgagtcatttggattgtacgtttggtattcgggtcgagctatttgcatgtggtgaggttgtatgaaactatctgctaaaaaacatttagtcttacgaggccagaactagtcggacatttaccctgccactaaagtaaattaaggtaaacctaatttcagaagctattaaacaatgttttcaccaaaagaacgactaaaattagggagacagagcactaagtaataattagggattcttgtaataaaaggaaaatatgagatatacttaacaaataattaaggacagatagaggagccggattaatagggaagttcacgtgaaggcacagcttaaaccagctgagccaaacacatatactaaattctcattctcacaaacaaaaatcgtgggtccaatcttgattatgtggctgtaaaacctaaaaacataaactattcacatgaataagattttgattagacaacagtcttacttttgtctcttcctctataagattaatctgacccttgagccactcaaaaacaggtatgtctatattcatttcctaatgtgacatctacacacatattatctcttttttttttaatcatgtgactgtagaaactgattagtaaatagtaataggaaaacaaaatacttagtatagagttatatagagtatagagagagggatgggtccaaatagttgatgatggaccatgtgaaaaaaacaatgaaagcccacaccattaattgtggtaaaggatgagaatctagtgttgtagttttccatgtccttaaacggttaaacctatcttctaacaaaattctccaccttcccttctgacatctcccatcacttctctcttaatttattccatccattccaccaaatttttagtttcactttttttactgtagtgtgtttacacttgtgagtgagtgaaaaagtaaagctagagaggttactgttttgagatgctctttttagaaagggccatatataaatggtagtgtagtagtactagtggagcttcttcatatacaattttgacttctcttcattgaatgtaggagagaggctctttacatcataaataaaacaagaacacagctttcagagagatagagtgagattctccttcattaacatattcttcttcatgttataagaagaagaagaagaagtgtccaaaaggattagagatgggtggatgcacaagcaagcaagagaggagaggtgtgagaagtgtgaaggagacatcaaaagaccaaagcagaggaagaagacacctgataaaagagagagatgagagagagaaagtgatgtttcttcagcttaaagaggcggagagagagtggagaaaagagaggaagaagctgagagaggaagtgagaagactaaggaagaagctagaggaaagagaagaagcaaagacaacaacaacagaggaaagagagtattggaagtgggtggttgaggagatgtgtgtagagagagcagtgagagatgaagccgttgagaaatggaaacaactctatttagctatcaagaatgagcttgatcatctcatctcccacactacttcttcctccggtaaaataaactcaacttatttcaacttaaaattagaaaaagtaaataggatctttaaagtgtgtgtttgtaggagaagcaatcatgcaaaggaaacttgaggaacaagaagaagaagaaacagaagcaaagagagttgaagtattgagagatgaagttagagttaaagaagagacagttgagacacttgaagagcaaatagttttgatggatagacaaaagtatgagaaagaaagagagattgacttattgagacagagtctaaggattcttggaagcaagaagaaaaagaagacaggatcattcgcatcaatgaatctgttgatattgaagaccaaatgtgtcgaatgtacataaacactttttactcaaatagtcttctgcaaacagtcatatctcgtcagagaatcttgatccacaatgtcatatttatttctcttttggttattttacaatttttattttggaaatatagtaaatcatagcactatgagttcaaaaagcacatgtcccatgaaagatttgcacaaatcgtttttttttttttttgttggagttagatacaattctttagcaataatgataatgaaccatttttccaaagaacagaaactgtggaaaaaaacttactagacactaaaagtctaaaacaccacttgcttttttatagcccaagaaacttctagttctaattaagaatgtccaacttccggttcggttactgaaaattatcaaatttttgttagatgagataaagaagtgaatcctacaagaaatatatcatgtggttcggtttggtacaattttgatttctgctagggttttatcctttttagcaaaatttactttaatttccgtagtaaaaaagaagaagttttagttggtttatttcttatttttgcttcgattacggcatttaattttagcaatatttcattaacaaaaaaaaacaattctaattggtttatttctacttctttttctgtcttggtttgatctctattactatattgattatgaaaaaaatatgaaaccaaaaccatttattatgtcttcaattccatttttaacccaattatttcactacaattgtaataaccggttattgcacccctaattataactatttaagcaatcgcatataccaaaccagcgagttaaaccaaattgtttcccaaattatgctaaacgacagcgttttcacaaattaccaaaaaaacctatttttctgtatctatctgaattcagagtcctgaccattttatctcactctcacaaagtcttcacttttgaagtgtctcctccacacgcactgcgccgccaaaaaacccttctttaaaccctttcctcctcgcgccgtcatgcaagccaccatcttctctccacgcgccactctcttcccctgtaaacctctcctcccttcccacaatgtcaactctcgccgtccctcaatcatctcctgctccgcccaatccgtaaccgctgatccttcaccacctatcactgacaccaataagctcaacaaatacagctcaagaatcactgaacccaaatcccaaggtgggtctcaagcaattcttcacggtgttggtttatcagacgacgatttgctaaaaccccagattggtatctcgtcggtttggtatgaagggaacacttgtaacatgcatttgctgaaattgtctgaggctgtgaaagaaggagttgaaaatgcaggaatggttgggtttaggtttaatactattggtgtgagtgatgctatttcgatgggaacgagagggatgtgttttagtttgcaatctagggatttgattgctgatagtattgagactgttatgagtgctcagtggtatgatggtaacatatctattcccggttgtgataaaaatgtgagttttttttttttaatcatcgatctttgtgttgtctttatctccatgttttatgtgatttgtttgctataatgttattgttgtaatacttttagatgcctggaactattatggctatgggaaggcttaacagaccagggattatggtttatggtggaaccattaaggtacttacttttatcaaattgatgagaagatagtttcttaaaccctaaacccttgtgcctagttggatagcctattcaccttgctttgatattattgcagcctggccattttcaagacaagacatatgacattgtatctgctttccaggtatcttttcttctatctgctacgagcttggttataacaattttaatgtgtatttatgagacttcattgagttttccaattttgggattgagttacagaaatcttggtgactttggtgtcaaattgtaccagtacttgtgggattcatcatgttttccaattttgtatttcagagttatggagaatttgttagtggctccataagtgatgaacagagaaagactgtcctccatcattcatgtcctggagctggagcctgtggtggcatgtacacagcgaatacaatggcttctgctatcgaagcaatgggaatgtcccttccttacaggtgaggctttcagtcctgaagaccacatttataaatcaacttcaaacgttttcccagatttgtgcttaatagaaagttatttccacaagaacattgtagatcctaaactgtaattgtggaatgcttatttcaaaagttcatatatttgcttcttcttttttttttgaagttcttcaatacctgctgaagacccattgaagttggacgagtgtcgcttagcaggaaaatatcttctagaattgctaaagatggacttaaaaccccgtgacattatcactccaaaatcacttcgtaatgcaatggtttccgtcatggcccttgggggatcgacaaatgcagtattgcatctaattgctattgcaaggtgacagattgttatgatgtttcttattattaccatggaaagcaatggaccgaagtaatgaatggaaatgatttcaggtctgttggtttggagttgactcttgacgattttcagaaagttagcgatgcggttccatttctagcagatcttaaacccagtgggaagtatgttatggaggatatacataaggtaaggctttggcgaaatcgttttgcttattacttatctgtttttttattggtcagtttgtaagttttgttgtttaatctacagataggtggtacgccagctgttctccgctatttattagagctaggattgatggatggtgattgtatgacaggtagaaatgctcaaacattttataaactgacttagcaatttggattgatgtgaaatggcataactacgcttttgtatctctaccagtgacagggcagactttggctcaaaatttagaaaacgtcccaagcttaacagaagggcaggtatttgtaatgttattagttatctcattagattctaccgcctgtttcttcttgattatgatggttgttagttatacaggattctaattaattctgataatgttccaggagataattagacctctgtcaaatccaatcaaggagactggacacatacaaattttgagaggagaccttgcaccagatggttctgtagcaaaaattaccggcaaagagggcttatatttctctggtaatgttggttcactctagtacctcctttacactccatatttagctaatgcttctgaatattagggcttatatgatggaactatttattttaggtcctgcacttgtatttgaaggagaggaatctatgttggctgctatatcagcagacccaatgagttttaaggtaatttcctttctgatatgaagttcatctcaggagctggttatatatcttttatctgatgaaatgtatcgtgtttcagggaactgtggttgttatcagaggagaggggcctaaaggaggtccaggtatgcctgagatgttgacaccgacaagtgcaataatgggtgccggtcttggaaaggtatgatatgaccagtatgactgggttagtgagacatttattaagtctgatcaatttttatgttctaaattaaagaactcgttatttttcctttgatatggtctgactatattatgcttatggtagtgacctaaatctttttatctactttgtccatatccgagaacacaccttatataaagtgccaatatgttgctattgggtgatgcaggaatgtgcattactgactgatggtaggttctctggtgggtcacacggttttgttgttggccacatttgccctgaagctcaggtctctctctctcccttttttttttctctctgcccactggctccatcagagcaaaattctaaattttgcacttgcaagataaatttgatagatccatgtccctcttctgggatatttttcttgtgtattgaaaaataaatgctactgggtcatagtcatatatagttttagcaaaaaggaacaagggtcaagggatcctgtaatagtttgtggtggctcttatgcagttatgatgattttggaatatttcaaataataaaactgatattaatgtgattggagaatgtgaagataataatgctgaaagcaattctccggtgtgcttactatttatctgtgcaggagggtggtccgatcggtctgatcaagaacggagacataatcaccattgacataggaaagaagagaatagacacacaagtctcacccgaagaaatgaatgaccgtagaaagaaatggactgctcctgcatacaaggttaaccgcggagtcctatataaggtactatacgaatccacttgtatctatataatgtatgtctctttgacatctgatggattagtttctaatgaatggtttatgatattctaaaaacagtacatcaagaacgtgcaatcggcttcagatggatgtgtgactgacgagtaaagtgaacgatctaagagagagttttgtgaatgagcagcagaatgtagtgtacgttcatgagggaatttgtaagtttatttattgtagcttctagatcatgttactttgtgactgatcattagctatttgcagggttcgtttttaagattttgtttctcttaaatgtcaaaataaaaacttgtgattgtggccgaattccaaagaatataaagacagaataaagacggatttgcataaatacttgtctatgagattgaacttaagagccaatgtggcaaaccagctatgcgtgaataagcttgacgttctctacatggtttagaaagatgtgaaatccactaaccttaaaggcttgggttccttggatttcaagtcttttcatcgtctttctctcgtttctgtaggagacaacataagggtcataagaatagtaaaactcgagcatggtaattaatatttgattcgaccaatttatatcaaggtgcaagtatttgtctcaaaggctcgagcatgacatctcacagaattgtaaaatcattcacatttgaaatttgatatcaaacttaaaacagaatcaatataaactaattagaaggctgtggacgagggagacgggacaaccaacgagggagaacatactgtgaagcgaggagaaggttaggaccaccttgaaacgatggggaaaagtatctatgaacggtctccatatactcgttgcaccagttaaagctcaaggtgcaaccatccatacacttcctctcgtcttcggattccttgtgaagactaaacacatgcgtcctcaagttaaacaagaccatacctttcttgtttctgctccacaagtagatgatctcagacttcaaaggatgcatcaccaccgggaagtaatcgatacctagcttggtcacagacgccaagctggcttcccaaaagagctgccacgcctcaggaccatcagtgtacttgaccagcctccaaacccgtactttgcggtttgcgttcccaccaaactcgttgaaatacacaatagacccttccgaggtagtgattgttctccgaaaacgcggtaactcgtaatcttttccattatcggggaaataaatgatactacacgcatcatgatgacctccatagaaatcgtaagctaaaaaagaaccggtgaggttggaaagccaatgaagaatcccatttaaagcaatggacttgtgatgactaaaccaataggcagaatgaagacaagtcacatttttaatttcccattcccctgtgttagatgagtaaatcgcaaaatcgacttgagcaaaagtgtgagcgatcaaccacacaaccttgtaactcacaacaataccactttgcatctttgtaaccaatccactgtcgctgaaacgctcgtggttccttaatttctcaacattttgagaagtgtatttaggacggagagggattcgaaaccactcttgaaacaaaggattaccaacgtaatacataggagttccaacgcaagattctacgtaaagaaggaccaacccatcggtacaagctaagacttgtagtttcctgattgtggtctcggcaaagaaactcactaaagatccgggagaacgagtaagtccccatgttttgcatccatggtgaccaacgatttcaagtgtcagtttgtgaggtctcgtttggatgattgaccatgagactgaggaagagttgtgagacatgaagcaatctcggaagaattcggagtcgatgaccagtttccattctttgcacattgatctgaatcttgcgaggctcttcaatggaagtcgcaccaaaacttcaaaggtcaattctggtggtatattcatttctgcatgcaaaaaaaaaaaagacacataaccaatgaaatgaaatgcgatactcaaattacaaattagatttgtttttcttaaaaaccacatttataagataaaaattaaattaaattaatcgaatctacatataaatatatcaacgatataatatacgatacttttcccatgcggacaaaaaaaatgatcgcttgttttgtaaaatgcttatcgagaagaggttaaattgagtttgttgtgatggtctaactaatggtagcgagagagaaaatactatatctcttacctgattttcgtttttatgatgggcggcgatgacaaacaaactaggttaagttatcgagattatgaagttaaatgaaagaaagataacacatatttatagaataacaaaatggaaaacaataggttaaggtaactcaattaagtctttaatgtacatctttttatatcaaccactcatttgttttatccacaatttgattagccactgaagataaagaacaatctataatgatttgtatttttatttttatttttattttaatagtaagagattctggatctaggactggagaccagagcatttaatattatttcttcccgagtgatactcgaaccagagacctttttgcctaagactttgtaacaaagcttgataggctcttaagttcttatcataataataagaatcatgtgatcataatttcgttatgttgtatgtggagatatattcatttttgtagattccatatacatcctcttgttgaatggctcatatactcttgtatttccctatcatagtttgatgaagtcttaacgagaagataaaatatccaaaaccatacaagattcttgcttttggtaattatatttgctaggaacaatttaactggtctatataatcaacaattacaaaatccagtcaaaaacacactcatataacaactatctctctctgtttaagcttccgagtctcctctatccatttggaactctctaagttcaaggtgtttctcactataccatttttttgctcaatccaatgaaagaaacataagaaagcttagatctgcatttctctctgctctttaccaatcaaagaaagatgacttcacattctgtagagcatcttgggattttgaggagtttcttgacaaagtcatcttttgttgaatgagacttcaaacgtagagtgagtttcttgagtgtgggagagttctctaggaagtaccatactagcatcatctctggagcaagtccacaaattggggctttgaattcaacaaactcgagggacgatagcaaacactcaggcacagatgaaatactaactcgtttgatcgccttgggagacagttgatgggaagaaccagtccgttcctgtggagaataatgagacgggaataaacacaatgaaacaatatgcagaaacttcatagggatgataaactcatataggatttatagaatagcggaccatcactaagatgagggatttcagattcgggatactcctaagaaagattggaaaccatttcaaatctgatgcattgagagtaatgtatagactggacatgtaaccgaattgaggtagctgaacagattctgagtaatgatggatgagctgaaaccagagagataagaatgttgagttagaaactttcacacgataggaaaaatgtgaatgtccaaaacttgcattgacatatatataccttgaaagtttgtgcacatatcgtcatatctctgaccctcgaaatccaagcgagaaacatgtggatggtacttgtttttgcttcgttaaagacccacttatgaaaacggagagaaatatcgaacttggcatcggactccaaatcagttagtataaagctttttgatacacaatcatcagcacagtagaggagcatcaatcacaactccaggaacagattcaaactggagaaaacaagtttgtcggaaacagaacctcttcagtgaccgagagtgcacccgatagactcgtccatccatccatactacatcaatctttaactcctccaggacagggcaggacgagacaagtctctcaaaagttgttggtgtacaaaatcgaacctccaaattaaagaagggaaaaatgagcctaaaggaagatctttattaatataactcgatgtccggctgtttacaggattatctctacagccgagcctcgattaaggtggtacaacgaaaatatgaacttcacaagtcaaagttggacttatgtttctgaatacgaatgagaagtttctattgcttttctctgcagatttcaggtacattctcatgtccgtatttatagtactgcaaggacagtacatagtacagttttcttcccgatgtgggactctttcctgatcaataactccctgaaggtgggcttcgtttggtgctgggccattacttcttcagacgggccgatcctctcttctctcgtccaacgttgctagtcgtgatatgttgggcctttaatcatgttggtggggcgaagcccatatccaacagcaagatctttagacaaggtaatgaaacaaactcaggatcaaccaagttcagcctatagagtttgagagataccaatgtctcacaaacgtaaaggcttagtggcatctcacacccttgagtaagacgaacatgtagacgttggatcttacgcttaacaaaggcatcaatccatggtttgagataggatgcatcatttccatctaaagataacttgaggctctctatgcatgaaactctatcggaatcgaaaaaccagttaccaaaactcaaaaaggcattgaaacttgagaacttcgaaaatgacaattccaaattatgaacccaaagccagagagttctccatctggtggataaaacgcttgtcttcacagcttcctctgtgggaagatgattaagaatctgagttaacaaaggatctggtaactggaaccttgctggaaccttgtagtttctcgcgtgtgtatcagtgtatgtttgtttataaatgagcttctgatacacaaaagcccaacaaagcccactaaatctgggtaaaatttgatattttgttaagaagcctatgggcccaatacataataaaatgctgtttcgattgaatagaaaggttttactaccaaatggcaaatggtgcatgtattaacgacgaagctagcttgttcttcttttcgacggctctcctggtaacatcttcatgatccatcctagaaccctttctcctggtttggtttgtgtctccacaacatatcactatatttttacatatgaatcatatatagtattgtgatgtgaattcatgtttcagtttttccttagtcgtctttttgtttgtttgatatcttctgattttccatagtcgtcatcaccacaaaatatcagctttaataaaggctctaatacgtacgggccctattgggctagatgtgtttttccttaactaaataactaaagttataaaaagtcaccatctttttgttttactttaatttgttctaacgtaggggagactctagggtttattggagtgtctctttccaccatgagatcacggcagctgcataacgtttcggaggatcgagaaaccctgtctcgacgcaataagcgatcaaagacctcactcaatggccacatcccaatagatctccttatcgagatattcttgaagttacctgtgaaatccatagcaacatgccgtagcgtatccaagttctggacttacgtacttggccgtcaagatttcacagagttgttcttgacaaaatcttcttctcgcccgcagctcttgttcgcatgcgcaaacgacaatgggtacttcttcttctcctcaaatcagcctcagaatcttgatgagaactcgtctcctatagctgcttatcctcttacacatgtccctaaatcccgtgacttgggtcctccaatcaacggcttggtctctcttagaggtgagcggatcttaaaaggaaggataaggccagtcgatgtgtcgattatatataaccctagcacgggagaatccttaactttacccaaaacgaatatgaccaggaagaagatctatacggtgacgagctttttggggtatgatccgattgagaaacaatacaaagtactttccatgaacatgtcatatgagaaacatcccaagtgtgaggggtatcaagttctaacactaggaactggaaagctgtcatggagaatgatcaaatgttgcttaaactaccaacatcctcttaaaaatagtgagatatgcatcaatggtgttttgtattacctagctatggtcaacggctcttcatggcctactagggcagttgtttgttttgatattaggtctgagatgttcaattttatggaagtctatagagaactatcttatacaactactctgataaattacaataatggtaaattaggtatgctgatgggacaagaggctcacaaaactatcagtggaatatgtagaagttttgagttgtgggttctcgaagacaccgtaaaacatgaatggtcgaagcatgtatacttattgcctcctttgtggaaggatgcagttgcaaataccaggttatactttgcaggaatgattggtacaagtgaaattgtgttgttccgcccagatgagcctctttgcgttttctactacaatatcgatagaaacacgatcaaaagagttggaatccgaggattagaagcgtttaagtattttcgcatctttctaaaccatgtagagaacgtgaagcttttttaagcatttaagtacttaaacttgagatgcaaaatttgctcccaagaaaatacttgagctagatgcaacattgctaatttggctttaagttctcatcctaaaggatcataagatcttattttagtccttatcctctttttttatgtggttgttctccatttcatcatacaatataatatgtggttggaacatctgccaccagaattcctcctcttctcgccttctataggaaatcatttgattgtaattaatttgtattgatttcgacaaaaaaaaaaaaagtaaaattaatttgtattgttgaggatcattacatgttaactgttatatgaagtttagttctgatttgatggaacgacaaatgtttagtgtttacggattacaaactaatcaaacacttaactaataatatattgaacaaaacataaccggttaatctcgatggacgagtaaactatatcggtaatgaaaaatacgatcactttttaatcgtggaacgtaaaaacagagaaaattttatctgatattgtagagatagtcagaaagcctagattcaatatccattttgttcgaaatacgattagttacttgaaagtttaaaacctttactgtaatcacatgtattgcgatggtgatcacttgtatatatctcaatactatatgataattgatattgtgataataacaagcgtactagttaacttaaaaataattaatcgaatctacgtagaaatatatataatatatttccatgcaagacaaaaaaaataatcgcttgttttgtaaaatgtttatcgagaagaggttaaattgagtttgttgtgatggtctaactaatggtagcgagagaaaaaatactagatctcttacttgaaaacaacatgaattagataaattacatctttttatatctttaatgtacatctttttatatacatctttaatgtacatgaaaacaacatgaactaaatctttaatgtacatctttttatatcaaccactcatttgttttatccacaatttgataaattacaatccataatgacttgtatttttatttttatttgaattagtaagagattctggacctaggcctctgtacatcctcttagactggagaccagagcatttaatattatttcttcgcgagtgatactcgaaccagagaccattttgcctaagattttgtaacaaagcaggctagtggctaggctcttaagttcttaacaaagctagctaggctcttaatttcgttaagttcttagttcggttttggtggaacgactaatgttaagtgtctacgtattatctacaaattatataactaatcaaacccatgactgataatatattgaagaaacacaacccatttaatcgatggcaaaggctcgggcatgacaattgtattactaatacaagattatgatcattaatggtaatataacaacagtaaaatcagtcacatttgaaatttgattcaagtactcaaaagagagaataatagactaagaaggctgcggacgagggagacggtgcagccaacgaggaagaacatactgtgaagcgaggagatagttaggaccaccatagttatggatagtctccatatactcgctgcacctgttaaagctcaaggtgcaaccatccatacacttggtctcgtcctcggattccttgtgaagactaaacacattagtcctcaagttaaacaaaaccatacctttcttgtttctgctccacaagtagatgatctcagacttcaaaggatgcatcaccaccgggaagtaatcgatacctagcttggtcacagacgccaagctgacttcccaaaagagctgccacgcctcaggaccaccagtgtacttgaccagcctccaaacacgtaatcttcggtttccgttctcaccaaactcgttgaagtagacaatagacccatccgaggtcgacaatgttctcctaaaacgccgtaactgatcatcatctttttcacaatcagggaaagatatgatatgacatgcataatcatcatgacctccatagaaatcgtaagctacaaaagaagtgctgaaattgcaaagccaatgaagaatcccattcaaagcaatcggcttgtgatgactaaaccagaaggaagaatgaagacaagtcgcaattcgagcttcccacatgccagtatcagatgagtaaatcaaaaagtcgatggttgtactattgcgagggaacaaccacacaaccttgtaactcacaacggcaccactctgcatctttataaccaatgcactgtcgttgaaacgctggtgattacgtattctctcaacactttgcaaatagaagtaagaagggagagggattggacaccattcttgaaacagaggattaccaacgtaatgcattggagttccatagctagtttctgtgtaaataaggaccaacccatcggtacaagctaagactcgtagtctcttgattgtggtgtcggcaaagaaacccactaaagatcctggagaacgagtaagtccccatgttttgcatccatggtgaccaacgatttcaagtgtcagtttgtgaggtctcgtttggatgattgaccatgagactgaggaagagttgtgagacatgaagcaatctcggaagaattcggagtcgatgaccagtttccattctttcctaactgatctgaatcttgcgaggctcttcaatggaagtcgcaccaaaacttcaaaggtcaattctggtggtatattcatttctgcatgcaaaaaaaaaaaaaaaaaaacacataaccaatgaaatgaaatgcaatactcaaattacaaattagatttgtttttcttaaaaaccaaataagataaaatgtttaaatataataatcaaacctcattaaaaaaaagtgattcatgacttcaaaaaatgaaaaactaattaattgaatctatatgtaaatatatcgataatataatatacaagatttttccgtgcggacaacaaaatcgatcgcttgttagtaatcaaatatttattgagaagagttgaatttaagtttgtcgtgatgatctcttacctgatttcgttagaaaggagaaaaaatcataacaaatgaagatttttacggtgggcggcggcaacgaacaaagtaggttatcttatcgaaactatgaggttaaacaaaagattacacatatttatagaataacaaaataggattatggtaactcaaagtctctaatatacatctttttatatcaaccactcgtttgttttaacccaattctgattggttactgaagataaagtgtaatccacaatggcttctaaatgttttaaattttagattagattagattatcattagataccagatagttcctcttgttgaatggctcatatactcttagatcaaattgtgtgtgtgtaatcacctaattgtacttcggactgaaatgaacagtatttgaacataaccgatagtgttaacacttgtatttcatagtttgatcaagtcttcaatttaaaacgagaagataaaatatatccgaaaccatacaagattttttcttggtaaattatatttgctaggaggaacactttaacttggctatataatcaacaattacaaaattcagacaaaaacgcactcatataacaactacctttctctctgtttaagcttccgagtctcctctatccatttggaactcttcaagttcatggtgtttctcactataccatttttgctcaatccaatgaaatccaaaattttggatcaaaagaaccaaatgaattcttccaaaactaaaggagaagaagcaatccatggctgtgcccgggatatacagaatggcaacaagggtcacgactgagcaagccatccatgcattagagaagcttgcttgtccttcttttcgacggtcctcctgggaacatcttcatgatccatcctagaaccctttctaccacctaaagagagagagagatatcattaaactgtggtctttctcagattgaactttataaactctgaacacagagaacatgagagagtacctcatcgccttcatctgcaatcggtgttctctcttgaacaacatgagtgtccggctgctgcttttctggtgaaacattgtctatggccatcttctgcgctgttacaagctctaacctttgcgtctgcgcttcaagttttctggataactctttgttcagctcctatggttatgaaacatgagaaatataaatgatttggggatacagaataaacacacaaacagtaaaacgtaacttataaaagacccagagaaaataaggagcgcagggaccagcatggaaaaaaaaaagagtataagaagaagacaaggccttggattttgagtctatgaggactcggagtaccatatagaaagctcagccagagaacttatgcatgatgttatggtgacagaaaattcttactcaagtcaaagaagacatgtttttagccccatgaatttatgttactgtacctgcacatgcgcacttcgagataactcagatgacagtgcttgcaccagttcttccttctcaattgccaactgcagccgaagaaacaaaataatcatcacgttattatccagattgagaaaatgatagcaccttgagaattaaaaagtattgcttctcacagctaaagaaaacatcaaatcaatcatccataaaaactacctcagcaatcagcgtattaatgttatgaatcactctcatctgatcagctgggacgctcaatgaaaagccttcaagagttaattgtctagtttcaggaatgatagctgtattagatgaatcactttcgagcagagtagtagaatctgtttcctggttggagctctctggcgtagtatctgagattgctgcacgaagaatccaaagagtcaggggactggttagaagtcaaagattaaacttgaaactttttatctaaggtttgccgaagatgcaaatgtatgagtttagacatccaaaatacgcttcagatttcttaaatagtgtgcaaagaccattaccaagaccttctgtagaggttgacacgttctttctgctagttgagtttttactcagatcagtggattttccaccagatgaagctttctgcaccatagtttgtaggaccttcttctctgcaacagtagatgcagaaaataagctaatgcattgttcaatcacattactccttagaggagtagatttcaatgtgcataccttcctgaagagctttaatagtagattgtaaatcttgacgatctttctctaagctctgcaattttttcctattgaagttgataggtaagataaaatagaacccagaaagccataaaagttacagactgaatccatagggagttttccagtatcccacggttctttttggatcaaacatcatgtaaaggtgaagttacggacatgaatagaatacagtaaagagcctacttgtaagataacatttctgtttgtgccttctccagttccctctccagctttaactcattagatctgagtctgagagcctaatatatgttccaagaaaaatccaagctaaacaggtaagcatctgaaggtagacgaaacagatatttcacagctgaaatattcaaaaactaaactaaacatgtcactgcacacttttgcagctaagtaagccaaaaatgttagttgttttttcaaatttaatgttattgtaagacataacatccaaagccaaataccttatcttccaaactgatgacttcagaagccagtatttgggaacgctcatcagcagcattacattctagctgcgcgtttgcatactcaaccctgacagactcaagttcgccctggacagaattagtgttaaatcaagtaacagcttttaaagtaatctagaaatagctccagtgcatgaaagaacatggcatgcaattactcatccagaatcatactccaatttttagttttgtaagtaaacatcaaacaatctaatagtacagggatgtagaaaaatgcaatatcatgctttaataaagtatactgttcgatcatatacaactggaatttggtgactgtataggcagttaatacttaccatttgggcttggatctgttgatatagcctctccatgtcatcttttagttggttgacaagacctctctgtatgagatagaaacgagaacaagtattacataaaacattgggaggatttgtgactattataaagctcagtggacaccatgtcttatagcaaacaatatataacatcatgcattctcaaaagtagacaagcccagtaaatgtcaactaggtagacatcctgaagcaccttctccaaacacatagtctaacactgtgtgttttcgcaacaaagtctaaacatggtttaattcaagagcataacgctttaacgaaagactcaaatcacatccatccacatcatgaataataaatattcttatatttccatttcccaaggatcctaaaaccacatgacagtatactcttgctaataattaagcatgataaaatgcaaataattagtcatctactataagtggtcaagattgttttctagtacaaaaatcagagttggccagtattcagctaggatgccataagcttgcatgtacctgctggttataagtgtctgtcattgaagaattctctgatgctaaggattctgccagtgcacgtgaagcatcaagatccctttgcagtgaaaacttttcttgtgttaaatcctcaatatgctgcaagtgaaaaatgaaactgtagctcagaaaagtcacaggacaaagggtgtacaaagacgaacagtgttagctaacatcctaaagaaaaatcaaagagcaatccaagacaaggtaagaagattatgatccagccagcgagaggcatccactcaatatctttgacgatttggtcgtctttatataacatcagatcaattccccacttagttcttctaaatgagaagaccatactaagtagcaattgacaatacattaacaaaataaaagatggtgcaagaaataagtatcttacctgttccagagcagtaaaatcatcattttgttttggcatagagaaatcagtaaaacctggcattactccattggcagcaggatataaagaactccgaaacttttcaaatggattaggataatcagatgctccgcttgtcaaagatgatggtccattactgtctcttctccctgatatataagatggcccaaaaccatcactgccagatagttgggaaccactggatgtaaccaaatccgcttgtatctcagggtgttgatattgagtctctggagctcttgatatattgagggaatcaaggaaagacggacgagatctcttcacagttgcttcactcttagctgagtttaatggtgaagagcttgtgatattcacactgaaatctgaaggttcagaaggtcgagatgatgtgtctggagaattaaacaaataactgcttgacaaagttggcttctgcacaatgctacctcctagttcaccacttccctgttggtttttggcaacttcgtcaaaagaccctgccatcctggtagtaggttgtagagagtctagcaacaaaaaccgtaatgataaattaggttgttgcctttaaggaacaaaaaagaaggagggttaggacaaaatacattactacattaacctcatatgatagccacgtaccttttctggatgaggttaatccactgccgtgaatgaaaccatccatttgcattgaggttccagaaaaaagagatgcagtttctcttagagtagaagcacgatcaaaactttcactcgattgcttgtctatattgctataaggtacaacttcaggcctagtattcactgttaagtccttcgatgaacctatcaactctaagctattagaaaaatcaactttgcccactgattcctgaccatcatcttgtctacttctttctttgcttccatcatccattgctgtattcgaaaatgataaattatatacatctttggtatgggtttcatttgaggtagattcagcagattgcttgagaggtccattagagatagatgcaccagctccatctgaatctatgacactttgttggctattatcaacaggttgtgtattctgtgatgcctttttagctttttctgctgcttttcgtttacgaaactgctcaagctgaaaatccagaaattaaacgataagaaacacacaattttacgcattcatctttaaaaaaaacaagctttttgtcgaataaatctcaattctgattgcatgcgttaggacatcaatctcaattccaatataaacaacccacctaaaaaaaatgatcaattgactcagcaccgacaaattttaggggcaaattcaaagtaacgagagaatcaaacaaaagatgatgattatgatgatgatgatctaccttacggcgtccagcttcaacgtcctcttgcctccgggaactagtagctgatgccattgaaaaatactcgaaatctcgcagagggaaatgttccctctccaattgcttcaaatcaatgctttttcaattaccattgaatccgttttagccaaagccattcccggaaatcgccgttgttatgattgaggagaaaactcaaatttcaaaaagcccagatcctgacgcacagatcgagaagatatcgttgaaatttcggggtggaggaaacagatggagatctcgagaaaacaagttcaaaaatcgatggaattgtcaaacaaagaaatcgaaattagggttttcgatctgaaggagaggaggacgaagttcaaatattaattttgttcgtcagatctctttttaacagatccctttctttttattttccccttctctgctttgaattaaacgtttttactcgtttttttttttctttgtttggttgcaatttttttttaacgttcactcattgtttgtttggtgaaatttagatttcatgtagcttttgattttaaaaatgtataagaagtgtgtaatgtatttgttcatagtctgttgtattttttgaaaaataagagagaatgtttaggtagtaagaaaattaagagaaaaaaaaatggagagaaatgagtcgtgatggacacatatgacaggtaaagaaaataaataggagcatccatgtggcccgtggaacatgacgacagcccaccaaattactcatgtttttaaagagagaaattgacaaattttaatatcaatagaagcttcaaattcctctactttaggacaactaaaagagcaaagtaatgaagaaaaaaagtgaagcaaggtcaaccttttggtatcatctaggtgtttattatggggtttggttcacttttttgtttgcattgtttggattttggatttcttttggagttctatttcatattatcagtttttatctttgcgtatttaagaaacttttactgaggtaaaatattacacaaattgccactgattttagagaacaaattcaatttaaaaaactcgaaacaccgatttgttttgtagagctgaagcaaacctaaaccaaaaacctaatccaaccggaaccatttaattaccgttggttttctttggtttggtgtggttcagtttgattagattcaaggatatttagatcaagcgatataattttattttattttttggttaaacgctatataaaatttgacatgtatattatggcaaaatcacaaatgctggttatcaaaagatgaaaaaatgaaatctgtttctttggggcaaaaaatattacagaaattaaattggaaaatgagattaacgacttttttttttttttttttcgtcaaatgagattaacgatttttaagtttgaaatgaaagttaaaccctaaagaggcctaaaaccctaaaaggctcatatagtaactagcagctgcttctagactcttctccttcgcttattaagccctctcaactcttcttctctctctctctctctctccgcctgttctccattgatctaatctaactcgctcatcagaatcatctcttcatcgttaatcctcttccttctcactcaccatgtatcgtttcgcttctaacctcgcctccaaggcaaggtaatgaactcactttcttcgtgttttttattcactctcattggaagctaatgaggaattaaatcgatttgggttttgatctactctcttcaaattcatctgggctctcgaaatctactagcttaatcccgattctgaattgccagttctgataataaaaatggtgtctttattgttctctgttcttcaggattgctcaaaacgctcgccaggtttccagcagaatgagctggagcaggaactatgcagcgaaagagattaagtttggtgttgaagctcgagctttgatgcttaagggtgttgaagatcttgctgatgctgttaaagtcaccatgggtcccaaggtactctttttcttctacacattttgatttgatttggacatgatttggccagaggttccttccttagcatgtgatttgggtgaccggttgattctgtatcgaatttggtctaagactttctgctttatgtgattctaattttgaagggacgtaatgttgtgattgagcaaagttggggtgctcctaaagtgacaaaagatggtgttactgttgccaaaagtattgagttcaaagacaaaattaagaacgttggtgctagtcttgtgaagcaggttgcaaatgctactaatgatgttgctggtgatggtaagatatttcattttgattgattatgcggttcatagttgtagaaactttgcaaaactatgtaccaatgcttgtttaacttgtcatgcaggtactacttgtgctactgtcctcacccgggctatatttgccgaaggatgcaaatcagttgccgcaggaatgaatgcaatggacttgcgaagaggtatttccatggcagttgatgctgtggtgacaaaccttaaaagcaaggctaggatgatcagcacatctgaagagattgctcaggttggaaccatttctgctaatggagagagggaaattggtgaacttattgccaaggctatggagaaggttggcaaagaaggtgttatcacaatccaagtaagtaaatcgccgaatgattgctcatgttgctacttatatattggtcaaaacataattctgacgtgggtataatgcattgcaggatggaaagacattgtttaacgagttggaagttgtagaggggatgaaattggacagaggttatacttcaccatactttatcactaatcaaaaaacccaaaaatgtgtaagttttttactccctgctcaattaagtttcttgatgtgtcatatcaattatagaagttactgaattggaattaatctatgtaggaactagacgatcctctcattcttatccacgagaagaagatctcaagcatcaactctatagtgaaagtgttggagttggctctgaaggtatgtctactttatctttatagtaaatctgtaatcattttctcatgtaaatgctgtgtgaaaggcatctgatgtggtttctgttgtccaaataaaatcttacagaggcaaagaccactattgattgtttctgaagatgtggaaagtgatgctcttgcaactcttatccttaacaagctccgtgccggaattaaggtttgaacaacagaagctcttactaccgtctcctgacttttagctatgacttctttgcttttagattaatagtttcctccctgcaggtctgtgccatcaaggcccctgggtttggagagaataggaaggccaatttgcaagaccttgctgcccttactggtggagaggtagtacatttgttgtgtaatgtgttagtcttgtcaacaatggaatattattgacttagcttgatacaggttatcacagacgagcttggcatgaatctggagaaggtggacctaagcatgctaggaacctgcaaaaaggtagcctttgaaaccttaactgatatagacatggtggctcttagtatgaactagatttggctattacattctcagcatatccttgttggattgtaagtgtagttgagacttgtctggctatttgtataggttacagtctccaaggacgacactgttattcttgatggggctggcgacaagaaaggaattgaggaaagatgtgaacaggtaatttttaaccttataccctgataaattggttagtaataaaatttgtatgcaagaaattatgaagtgtatgaaagtagttcgttctaattgcttggtattgcaactaacagattaggtcagcaattgaactgagcacctcagattatgacaaggaaaaactgcaagaaaggttggctaagctctctggaggtgttgcagtgttgaaggttagtccatgttataatgttttgggagtcttagaatcatagcagcctggttgtaagtgtcttgttataacttctggagctaattgtgtttagattggaggagcaagtgaagctgaagttggtgagaagaaagacagagtgacagatgctttgaatgccactaaagcagcagttgaagagggtattttaccaggtatgtctcttccagtgaggaagactctttgatatagtgctaaaaagtttgctatgtgctaaagaaacaaatcaaaacacttgcaggaggaggtgtggctcttctatacgcagcaagagagttggaaaaacttccaacagccaactttgaccagaagattggtgtccagattattcagaacgcattgaaggttttctattctttagaactaaaatcctctgatctgataattgatgacaagaaattgttttaacgagttttggtttaccagactcctgtttacacaatcgcttcaaatgctggagttgaaggtgctgttattgttggcaagctcttggagcaagataacccagacctcggttatgatgctgctaaaggtgagtttcacaatccatcatcacttcacttttgttctctctgaagattgcatttagctaactgtggagaacaaactaggtgaatatgtggatatggtgaaagctggaatcatagaccctctgaaagtgatcaggacagctttggttgatgctgcgaggtaaataaaaagcgaacaccctaactaacaatgttcttcttcatttcgatatatgagtcttaagctaaaactgtatacttgcgttgttggcagtgtgtcatctttgttgacgacaacggaagctgtagtggttgatcttccgaaagacgaaagcgagtcaggagcagcaggagcaggcatgggtggaatgggaggcatggactactagatccactaaattctgtcttttgttttcaccaatcaccatcttaacttgagaagagagatacgattcttttaggagttttagtcttcgtctttgccttattgttgctcaataacctcaaaagttttacaataaacagagcacacttggcaatgttacgagacacactattagcatcaacaaattttcctaaggcatcatttgtgtttgtcattgcttctggttcaggtctggtactccaacaataaaccgacccttcaaattacagtatttatatatatacccaagtttcatcgtagttaaaccaagatttagcaaaattaagcaaccactaactgaaatgcaccaaaaaaacgaaaaccacaaaatccaaattaccatgaaatcgaactgaaatatattccggttatatacattgacacaaaccgaagataaccaaactattttcagttataattcatctccggttagcatctttgatgttgtcgagtgtcgaccatggcattgcgtttcccgcctcgtctcctctctcagctgaagctatctcggcgtctgaattctctcccggcaccggtatctgaagattccgaagacgaatctttaaaattcccatccaatgatcttcttctccgaacgagtagcaatgatctcgagggcagttatattcccgccgatagacgtttctacaacacgctgctgaagaaatgtacagtctttaagttgctcattcagggaaggatcgttcatgctcatatccttcaatctatctttcgtcatgacattgttatgggcaacactcttctcaatatgtatgctaaatgcggaagtttggaggaagctcgtaaagtgttcgaaaaaatgcctcagagagattttgttacttggactactttgatttctggttactcgcagcatgatcgaccttgtgatgcgttacttttttttaatcagatgttgagatttggatatagtcccaatgagttcactttgtctagtgtgatcaaagctgctgcagctgagagaaggggatgttgtggtcatcaacttcatgggttctgtgtaaaatgtggttttgattcgaatgttcatgttggtagtgctcttcttgatttgtatactcgctatggtcttatggatgatgcacaattagtctttgatgcgcttgagagcaggaatgatgtttcttggaatgctctgattgctggtcatgctaggagaagtggtacagagaaagctctggagctttttcaagggatgcttagagatggttttagaccttcccatttctcatacgctagcctctttggtgcttgttccagtacagggttcttggagcaagggaaatgggttcacgcttatatgattaaatccggtgaaaagcttgtggccttcgcgggaaacactcttcttgacatgtatgcaaaatcaggaagcatccatgacgcgaggaaaatattcgatagattggctaaaagggatgtggtgtcttggaactcgctgctgactgcttatgcccaacatggatttggaaaggaagcagtgtggtggttcgaggaaatgaggagggttgggattcgccccaatgaaatctcgtttctctctgtgcttacagcttgcagccattctggtcttctagatgaaggatggcattactatgaattgatgaagaaagatgggatagttcccgaggcttggcactacgtcacagtcgtagaccttcttgggcgagccggtgatcttaatagggcactgagattcattgaagaaatgccaatagaacccactgcagccatctggaaagccctgcttaatgcttgtagaatgcataagaatacggaattgggagcttatgcggctgagcatgtatttgaacttgaccctgacgaccctggtccccatgtaatactatataacatctatgcatctggtggcagatggaacgatgctgcgagagtgagaaagaagatgaaggaaagtggagtgaagaaggaacctgcttgcagttgggtagagattgagaatgcaatccacatgtttgtggcaaatgatgaacgtcatccacagagggaggagattgctcggaagtgggaagaggttttagcaaagatcaaggagttgggatatgtgccagacactagccatgtaatagtccatgtggatcaacaggagagggaagtgaatttacaatatcatagtgagaaaattgcgttggcgtttgcgcttctcaacactcctcctggatcaactatacacatcaagaagaacatccgtgtttgtggggattgccatacagcaataaagttggcgtcaaaggtggttgggagagaaatcattgtgagagatactaatcggttccaccattttaaggatggtaattgttcttgcaaggattattggtagtaaccactgaagaagtcaagtggcttctgctggtgtgtggagaaaaggccagtcgttgagaatcaatggttgtcactgtagcatccattctctatctggtggttagaggtattgatcaagattcaaataaggagaaaggcctagtattggatatgtgctacaagagagtgggccgaacatatgagaagtctatgaagagcttctagaagaagtgaaggcacacaaatatctcttgtagccgttgaagaggactcacgagtgtctttagcaacatggtcaaccaaggatcagtcgctctcatcatcaagaccaaggaacctcttctcttatgtctctttcagtcttacgttaattgtaaacggccatattccctttgtgtgtctttaaaagcattgtaaacacacaaaggttactatctaattctatcaacatgatttggtcattttctctcatatacaaactctcttgttcttcataactctcttactctttaatacaattccgcatattctttcaagaggtttctaccaccttgatttggttgctggaagtgctaaagaaagtgaggtgtggacaatatgcagcagagcagttggaaaagcttccaatagccaagtttgaccaaaagatcagtgtctgcagatcattcagaatacattgaaagttagcaattatctaaaacgaagaccatctgatctaatgatcataaacaggaagttgtttaatgggatttggtttgccagactcttgttaacacaattgcttcaaatgttgaacttgaaagtgctgttttgttagcaagctcttggagcaagataacacctacctcggttatgacttatgatgcagctaaaaggttagttgtgttcacaatccaacatcacttcacttttgatttatctgagattgtccttagctaactcttgatgaaaactaggtcaaagctggaatcattgaccctctgaaagtgatcaggacggctctggttgtagtgtttgagcttcccaaaagaccaaagcgagtcagcaggaggcaatgggaggcatggactataagatcactaaactctctttctttcaccaattggcttaaacctaagaaatgagatacgattcttttaggagtcttttgtctttgattttgttacccaataactgatttcacaataaacagcacacttggaaattttatgagaccaaaagcatcataattttataaggtatcattgtgttgctttcatggaatggcttctttgtttctaaattagtagatgtatcagtaccccaaactcagttattaattttgtcaaacaaagaacgaaacaagacttctacaatttatagtcaacatggtaacatcttacatgagttgatatactaaactgtttggattacagtagatatgatgaagctgtttggattattagcagacatgaacattcaaatcatcgacctttcctgctcttctttactgtagcacactccgggcagtaccatttccccttgggttgttctttcagaccgacgcaaccgaaatggaaccactcaatcttgcactgcattgaattttattttcagtcttaaagagtgtctcacaatgtgaaaagagacattagtttcaagaagccataccgcattgttgtcacacgcaaccatctcgccaaagctaacttggttgcagatgcagtaagttggttcgtttggatccacaggcagatccagatccatattacttgaagtcatcccagttgatgctgctgctgttgacgctgctgttgctagccttgtcctgtcacaacattaaatggatggtttcattggacctaagcttgctgaggtttaggcgatgtaatttattgagcaacatatgctaatgatataaaagatgaggctgaaagccacctacttttttcgccctcctcttccaccttcaccagcattcccggctttcccgttgttctccagttctaatgtcgcagcggcagcttctttctctgatagaaaccacacagttttatgtttattactgaataagataagagagaagctcaagctttaaaaacactaagacaagaataacagcaagccaaaaaatgacctttgcggatcacttcgtcggattttttcatatactggtcaagttgctgaacatgcatatccacctgaagcaatatatcatctgaaaaataatgactttaagaaatatcaaaaattccacaaggctaaaactgaactgctaacttaagctacacaaatccgaggtcagacaccataacagagaagtgtcctcttaaagagacaaggaaaaaaaaacttcataaccataccagatcatatgcctgcatagccagtgtgactttctcgtcagcaatccggacactgtgtttctgttcatcaagtgcttcctctgagaactttgtaagagaggtattaggtgtgatatttccagctctgccccttcttatatcctctatttctttttcacagcgttgttcattttgtcgttggttttctgcttaaaccacaaaagacacaaacaaagatgaaagcaatccacataacaaatcaacaaagtgcatatatagatgctttacaaagtcttactttatactaaaacccagcaaacaactcatccgaaaacaacaaactatgcagcacatgaactacaacgaaatgggtttagtctaatgactaaagatcatgtctgcggtaccccttttctaacaaattactaatcagtgaggatacataatgacaacaatgatgccttaatctgctgtaagtacgactctattgattgttaccttgcaaacttttatccaaatcgcgcaggagagcatatttcttctgcaaaacatgggccagcgaaacaagatctgcacatagatatcaagaaagagttgcttcattattctcgattgaacgaggtcaaatattgtctgatatcctaaggaagagtaaaccatgacagagatgcaaataaccaaaaccaagaacccaaaaacaatgcacacactatgatggatattagaactgttcctgctagataacaacaacagagctaatttcacatcaacactaaaaaagcttcttacagtagaactctttacatgttcagacaaaaacaatgattttttgatattcttgaaccaacagttacagtcatctatatgctatgctacatttcaagcatgtagaaagtagaaacccatagtataattcagagattcctgattcaatatttgcgcaagcaaaaattgaagcagacaaacattttggttatgacaagaaccagcgagaaaacacacaaatcaatctaagttagtgaatcactctctcgtcaatattgcaacaaaggtaatgatcaatctaaaacaacttgcgggaaaatcgaattagctaacgtaagaaggcgagcagtttcacgattcgttgatcacagtaaagaataaacacgattcgagagagatacgattttgcttactagcttcaaattcctcggcgaatgacatttgggaatttagggtttcccaaaatggatatgttgcaaaatgaaagaaatatatttgcagtaatactctttatttttgcctttttcttattttgtattggcgcacaaactaaacgatgactaattttcattttttgtgtaaattactagggaaaataataagaatttcgtattttgaatttttagtatcttgacaaaaacaaaataattagtaatttaattttttctttatcaatttcttaaactgaaccatgaactaattcagaattattcaacctaaaccaccaaaatttagctacaactagtttattttaatgaaaacattttggtaaccactaaattaaagacgctaattggtacatatatgagtattctatcaatctctgacgttattatttttggattctcacatattttgtatgaagaaaacagaattacacaagatatcacagctataaagaacacatttcaacaactacacaaaatcagaaatcgtaacaacttcacaatccacacctctctatttaaacagcgtttcccacattttttcatatattcatcaaacaaatctcaatcagttcaaaatcatcttccaacacaaaaaaaaaaaaacagagcaacacttaacgataacattctccatgatgatcaagcaatcaccattcttgcttttaacaacaatcttgttcacggttgctgtgtttgtagcagcgcttgatcctgcacctgaagaccccattttcgaactctacatgcacgatttacttggaggaagcagccccaccgcgaggcccatcacgggtttgctcgggaacatttacaacggtcaagttccatttgctaagcagattggtttcactcctcctgagaacggtatagccatacccaatgcaaacggcgcactaccaacggttaacggcatcaatggtgtacctcttgggaccggcttgtctggtacagcatactctggtcagaacctaaacggaattcagactcagttgggtcctgatggtctcagtctcgggtttggtaccattactgtgatcgacgatatactcacatctggtcctgacttgggttcacagccacttggtaaggctcaaggagtttatgttgcaagttctgcagatggaagcacacagatgatggctttcacagctatgcttgaaggaggagagtacaacgacaaccttaacttctacggaatttacaggatcggaagcgccatgtcgcatctatcagtgactggaggaacaggtaggttcaagaacgcttgtgggtttgcagaggtcagaccattgattccatcaggtcagcatgaagtggatggagcagagtctttgcttaggatcattgtccatctgaagtactaaacaaaacccaaaagtagccttaccaaaagatttcaaatttctacatgtgtgcgtgtgtgtgaatgttcttttgttgttgtatgtaacagttattgatcgaaagcaaatcatccaaagccatgaaacttctaagattgttaaaagtgtaatttttgaacattgccttaaagtctaagatggtgaccacaaaagctatataaccatgacactcctatctacctgaagctggacgatatactaatgatcaagaaaattgcagagatatcttaagaaactttattcaaagaagatgattcatgtacatcaacccaacctggtcacattcacacgtttaagcactgtggtttcatccaacccataaagacaatctatcaaatgcattctcaatgacgctggaccattcgccatcgcttcacccaactcacctgcaatgccaaagacagccatagcggaaaccgtagcttccagtacccgtgatgaatcaatagcaagaaacgctacaatcaaaccagctagagaacaaccagttgcagtaatctgttgcatcatcttcgtcccgttgtgaacaccaataacctgtttcccatcagtaacaatatcaacagctcctgacactgcaacaacagcaccacttgacatcgctaatgactttgcagcttctatagcgtctgttgattcatgtgagctatcagcaccctagcaaataccaactcatactttagcaaaacaacttcactacagagtcatcaaaacctctcataacaaaattctcgaatcattgttaatctcaatacagtgtgatgttacaatatataccttagtttgtccacgtgaagcagaggagagagcaataatctcagaaccgtttcctttgattacagtaggttttagctcgatgagctccaaacacgcttttaatcggaatccggagcaactcacggcggcgggatcaagaacccaaggctttcggagctgagaagcgagttcagcggcagctttcattgacggaagccagtcaggtgtaagtgttccgacgttgacgcagagcgcgtgaatatgaggagtgaaatcaggaatctcaacgacggaatggaccatcgctggagatgcaccggcggataaaagcgtgttggcaacgagatccatcgagacgaagttggtgatgcactgaacaagcggcgattgttgccgtacggcggttaagtgagcccacacgccggagctccactcgttttgttctgattttgattccattctgctttaaccagtcgtgcgtaaatcacggattcaaatatatataagaaacacggtttggtctagattagattaaaaccgggattttataccggtttagacttcaaccaatgaaccgagtcgtttcatttctcagctttgagatggtttttctacaacaacaatggaacaaacactctcaaagtcacaggttacaatgtagaagtggaactctctctaaagatacagaagcataaagtaccgttatcttcttcgtgtcttggacaactatttactctattgaaagtgcggtgaggatcatccgatcattcaggtacgcattggtgcaatctgaaccaatcgtttgatagtaactcaacaattcgtctctcgagcctatcggaaccagaaccgggccgaaggatacccgagtcaccccagacggaacacgagctacggtttttactagaatctcctaaacaccaaccaccaggcacaacttcaccaggtttgcgtcccagaagttcatgatcgatgcgatcaaggacagtgtcgtcgtacctgaatcctcttgcaaaagctgctccggagtcaaccatttctgtgaactctttgtgatcaagctgatggtatctttctttagaagtgtcgttagaagctaggtagagtaagttgttgttcatgatggtctttttgaaggtatccgtgttgcagaggatagttgggaagtagttggaaagagaatcaggtgtgttggacaagtacatgagtagagtccgagggaagttgtcagtgcctaagacacagtgctccatgaaattccggcttaagatggagaaagatggacctgccaaatagagataatggcatttagtttaaatcatcaaagacataaacggtatctcaaacccttcttttcagatgtgtcaattctttttcctaattatgctatatttttctcaatcccctccaaagatttctttttcctcaatatgctatattcagtaggaactaaatataattatgctattcaataggagaactttgttgttaaacaaccaacaaaatataacagtaatgagaaccattgtaagcaatttctagacactggcttccctttcctcacttatctgcttaaagcagctaatagcattactgataaacaagacgtcatgtagtctatattctgatagagctttcacctaaacttatccacttctacactatcacgtatctacctaccaaattatgaaatggtgccaagaaactgctaaccatgtaaaagaaaaagggattaagtttctacaaaacagcataattaggaaaaagtaatcttccataataatatcaatccaaatgattgcacaacactgaatatgctaaatagcaaacaaggtggtcaattagtaatgatccacagataaatgcagaaaacagaaaagggaaaatgaaaacgtaatgtaacgtagctaagcatacctgagaataacttgaaagccttaggcaactctcgtttctgcgaagcgaaaaacatatcggttttctccacaagatagagccctggatcaacaataactggcttcaacttcctggacctacaagaaaccaagagaaaatgttacactgatcctaaaacaatgaatcttagctctatggaatcaaatccagcctacaacacaaagactctctaagtgaaactaaagggaaacataatcttactctttccaaccaatgtagctagtgtggttcacaaaattcaagtccttaggcaaatgtgacataatatgaagaagctctacgcaaaatcaaactcagaatcagtaaaaacaaacacagaaaaatcacaaatcaaagagaatttcgcaagaagaatccaaaccatcttgagtaacgagaggataatcatcaacactaatactaacaaaccaatcccaagttcctgacaatctaagaagaatcgaagcaccatgaagcgtagaagccatcggagacgatcctctctgatacgcgaaatcaggcttcccaataacatcaacattccttgcagctctaaaaatcggtacatcttgtacatcaacagcgagccgatctcgttcagattgtgtcgctaagctatcgagatgaagaagatatcgatttcgaggatggtaagtagcgtagagaagtcgaaggattcgtcgcgtgtcaccagaagatccggaaattaggtaagcgattgaaggaggagctgtatcggcggcgattttggaggaagaaggaaagagtctcgggtcgggtcgtagatcatcgggtcgtccggtgtaggaagatgaagagtactgggaagaggaagagagagagaggaggaaacatagagagagaaacgcggtggtgaggattatgtaaagagtgactctcggttgctccggtgtgtgctgcattttctcacggcggcgcgtgaaacttcgacggctagagaagaaagctaactgtagtatgtaatggtcacagtacgcatcgaactctgaagatagaatctttttttcttatatagtttaattaattatgtagcttattacttaatggtaacgactaacgacgatattattactaaataatttgattctataatttccattacatcataacactgaatagatgattttattacacattttacaaatttgtaataatcaagttcttgagcggcttcttcgccattcttggtcaaaattttaatatatgagagaagagcaattgcagcatattttcactgaaatggtcaaattccaaatatttcaaaaaatacgtctcaacatatgtaactaaagcaagacaatatatcttgcaacgactcaagtactaataaacttatgtacaagacaacagaagagcaagcatgaatgatattgggttgttctctattgatgaatggatcaaaagttttgtgtaaaaaaataggaaagatctaagctaatggaaacgtagcttaccaaaatgttctcgtactgaatgtgaatggccaactaagcagcgacaaaaaatgtctacccatcaaaaataaagtatgtgagatcatacaagcacaagatggtgtggaagaaaagtaattaatcaaccatttgggtcagataaaagattttatgttgcttaacaagcgtaactacatttatacatatttataaaagtacaaaatacacaagcaaaaagaatacaaatcgacacttaataaccaatttccaagatatttgagatcaatgtcaatatcgtatcatcatatacatgaacatacatttcaattgtagatttatgtgtcacatcgttagccaaaatagtatactaactaatatgaagtcttgagcatatattgatcacttaaagaactgctttaagatatatcttccttaccatcatcaactcaccataattcaacataacatttgatagatgagcttaaaatcttaagaagaacaaaccaaacctacatcttataacaagctagttagtatttgaccgtcaatccacaagtaaacataaatcttaacgtatgagactatgagtaagcatcaacacaatatcagatttgaaacaaaatggttttgaatggtaatctcgcatcgaggatagaccctgaaattttggtggtctaaaaattttctaaaagttttacaaatttgggagcctatgtataaaagtaaaactaaattagaggcctttttgtaaatacatgttttatggaaattcacaaaccattgtttctcctatttgtttaaagacgacactgtcattgtgatatatcgttttgacaattaccgattttaaaaacgttattaaaatttttttagcttttagagatacaacattatggtcagcaatgaaagctaacattatggttaatgaacaagaggagaacataaatgtcaaaaaataaacattaagaaagtggtaacgtttgattctaatgaattgtgttactttcatgatataaattgaatttagatcgaatcttgtctttgtttaaccaaaacaaaaaaaatctaatcaatccaatttgagagagaagtcataacttttttaacacattgttgacttaagtatcttctaaagatatattcaaatcagatttattttctaactataaattacaaaaatgttaattaaagatttctaatgttgtactccctccgtcctactaagatgaattttttagaaatttcacattctttaagaaatattgtataaagacaattttaacctcttaatatactttaaaaataataataaatatttatctaattatttagtaagggtaaaacaggaaaaaaaagtttataacattaagaagatttgaataacattaaaaagatttgaataattagaatcttgaacttgacaatatttaaggtaaatcgcatcaaaaaaaaaaaaaggttatcccttaattttgaattcataatggcgtaattgtcacaaactcacaactgtgtaatattcacacctttatttttaattataggttttttattttaaaagtaatgaaattcacttttgctttcaaaataattcatagtgtagtgcgcgtagatcatacatatccccaatctaccccgcaagttgcggtggcaattttcataaagtcaaaaaagtattcaacacgtgtcgttccactattcgtccaacactcacgccctcgtaatcctattggttcatatgcatcaccctcttggtcactcaattatattatcacccttcaactttatccataatcacgtgaatgccattacactaaaaacagtaatcaaacttttttatgttaataaaataagaaaatctaatgagagtataagatcaaaaagcgtctatcataagtacggtcgatcttctccttctattttataaggtccactgaagtaaataacaaaacaacgactcacttttggaataattacactcacaccattcaatcacgccgttgattttggtgactaatattaaactcagtggaccgcgttacacttgattgtggcttcaatatacgttataggaaaaagtgaatttaaaaggcaaaggaaaaaaaccattttgtgtcatccccttccccacttccaaccaaaattaatttaaaatgtcaaatattttttcattttcctcttttcgaaattaaagaaaaccctaaacgccgttgtctgatattgagagagagagagagattaaaaacttcttctggttccttttatcaacattttttctctctcttaaaacttcgaagcgatttttgatttacagactatggaaatggaatcattcatggacgaccttttgaacttctctgtaccggaagaggaagaagacgacgacgaacatacgcaaccaccgaggaatattactcgccggaaaactggattacggccaacagactccttcggtctctttaataccgacgaccttgtaagtcttcccaaaaaaaaataaaaaaaatcgcctacacatgtttgttattaaatggtccggtgtatagtagactcggccgagttgactcgccggttcacggcggttggggattgttgactcagccgggtcaaaagtttcgggtttcggaaaacgcgttttactttattgtgttattaaacgtgcacgtcataagtgggaacgtttcgccggttccttttttgtgttgttgttaaaagacgaagctaccctttgatttttaatcctttgggagatttgtttcgggagtttttggagggtatattcggaaattaaaccattttttagtgagggtcattgtttcgtgagctgttcgtcacatgatggtgagctaccacaataaatttcaaccatttcgaaaattatatatgtcacacctttaaatttgatttattatttgatactccccaattattattgaaatgacgtaactacccttccgtttttatttcacccacccactctttttatcggaaaacgagtacgagttgactcagtcgagttatggagtttgactcggtctaatttgtttgttgcagggagtggttgaagaagaggatttggaatggatttcaaacaaaaatgcttttccggtgattgaaacattcgtcggtgtattaccgtcggagcattttcctataacgtctcttctggaaagagaagcgactgaggtaaaacagctgagtccggtttcagtacttgagacgagtagccatagctccacaacgactacctcaaacagtagcggcggaagtaacggaagcacggccgtggctacgaccaccaccactccaacaataatgagctgttgcgttggttttaaagcgccggctaaagcgagaagcaagcgtcgtcgtacaggacgccgtgatttacgagttttgtggacaggaaacgagcaaggaggaatacagaagaagaagacgatgactgtggcggcggctgcgttgattatgggaaggaagtgtcaacactgtggagcggagaagactccgcaatggagggcaggaccagcggggcctaagactctgtgtaacgcttgtggcgtgaggtataagtccgggaggctagttccggagtatcgtccagcgaacagtccaactttcacggcggagttacattcgaattctcaccggaagattgtagagatgaggaagcagtatcagtccggtgacggtgacggtgatcggaaagattgtggataaaaagtgattaggattaatttttattttttcggagaaactttttttttttttttttcgtttaatttctctttatttgtttttaaagtctgttttagggttttgcagttggaatttaggtttttaattttttgcttatcttttttatttgtgaaattagtggtaattacttatttagggaatattatggtcatggaatggaagataactttctcattttactgtttgtttgattctaatggtaattttaaaaaatagaagaaaaaaatagatttgataagtacttgtttgataatataaatttgacccttttaaattgtctattttagttaggccagctaattatagtgatagatattggaattatacatgagtcaattttggtggtttcttgcatgtcttgattgagtgattcttcttttgcctttaattactgacattgtcgaaaataacatattgtcaaaaaaaagatagatagcaaccacaaactattaaataaatgctgatattataataattctgtttttttccaaagtaaggaatgcaataagatcaagcaaagcatttgtattttactattgaaaacgaaattcagactattgttgggtgagcaaaaataaaaaggaattaataagtgtcaacaacttatcaactaacaaccaaatctatcaaagcttgagcaattattttattttatattgtacaagacattttaatggttccatatgatcaacatttatccactaacataattatgcgtagtgactcattacaaaacataatttcgtcatgttgatctaaccaaaacacaattatgatgtgtgatcatgtttggttaataacaaatttacaatcttaatacgattttagtcaacatcatgatctctggagacaaaaaaactgatgatgcaggcgtataaaccaaataagtagattagatgtaacattttcctaattgttttagtagtttgattaatttaatgtaatgaagggattagagtggtaatgtatgattggagggagagtcagtgagtgtggagtagtagtcacatgggggatttgatacttagctaatattattgcacatgcctttactcttcttcttccccgatccaccaactccattgtctccattctacgccatgaatcatatcatcactttttttttctttctaaattattcaatacatatatgtatctaacatattttatttcattgtatatctatactattttttgtagatattttgcatttatatagaaatctatctatgaattcaagtgattgtatgtatcactatgattcttttatgttgagtatctgattgttaatggaaaataatatcttataacttataagccatggcaatgtgcatattgggatggttaggtatatcaaaatttgacttttgaattgtatactacattatcattcttgtaattttttttgttagtgtataaggaacaatgtatcttttacatggaacaatacatctaactattagaggtaattcagttcatagccgtaaaaataaagttagcggatattttacttatactatgatatttgaatcctagattaacaaagaaccactactcatgtgaataaactaagcattagatccaaataccattgaggcattgacactgatattaagttttggtgataaaaggaagaaaatcatattcataaacaattgtctttaacaaatagaagctattgggctgaagtggcagtgtgctctttgtcttttaggatctgacaaaacatatgtggactttaacaaaacgaaaatgggccagacaactaaatgctatctcaacatatttggaatctcaactccctttttttttgtcatatgaatccgttattagtagctaactagaccttctaatgaagccataatacctctcaaataacttaatgatagacttcggcaaaaagaaaacaaatccctcagaagacaactcgcaaatctttcggaagcagcgttgtcattaagaaccatgacaatttgacgcctcaatcaaaatcacaacctaagtttttattagcatttgatgcccagtttgcgttaacgtcagtgattatagatcttttgtacataaacaagacaagaaaaagaagcttataaccaagaaaaatccttggtccaataaacctcatcactactaaaataaaatccatcttctctaacggaccaagaacacttcttagtagatccacatctattgctgtctctagaaaccttaaacgcctcgaactgtttcctctttgaatcccacttcattgtacatgtgtactctgccatccatgaccacaaatcgatcttggccgtccattcgaagtcatcaccttcttgaagcgcacgaccaccgagatctccttgcggcgaagtgcaccagataactagagggagagaagagttgtctctgaagctgttgatcacacgcacgtcgaattcttctcctagaaacatagtttgtggctgaagcatcaacgtgaagatgatcgttaaggagatggcgataagcataaacagaagaagaatgattgtttttcgagtgttcatgtttttttttttcttcttaaacaatgcaaagtacagtttgaattttcttaaatatgaaatttcacaataattaactagatttgtttctaatttattaaggaaaaatgaaaatggaaacatataattaaaaatggcagaaccagatataaaaaatcttatctaataattaataaatctaaaaagtagcacgagaaaggaaacaaatttcgaaaatcaatgggttatgtgaataaaaggaacacaatataatatttgttttggaaaataaatgaaatctaaaaattatataatagggatcacttcggattataatgagatacatgagagattggcgggcacatattgatgaaattttccttgtgtgattatattttatatatagccatcaaccatttgtgacttcttatgaatgaatatccataaggatttgtgagagatcaaaataaacaaatgactatatatgtccatggcgtagaaaaataagcacaagaaagataagaaaactaaacgacataggataaaagaggaagaaaagagagctcggaggtgaaaataatcatacttttatttttttgtgacttcttatgaatacataaggggttttataactacaattatatcataaagtttaagcatactctaagagtattatgatatatatataactcaacgatacaataacacaatgcaagttgttttgggaatcaccatttatattgcttttggtatttatgaatagaagcgacgtataggtagaaaccatcaggattgatttgccatagacaagaaccatcgggtttgcatcttgatttgtctctatcgagatcaaagaggacgaaaggagtcattttggccgatgatgagaagatgacgcaattccatctagttgattggtcggtgtcaaacataagcacgtaagtctcacctcgaaataacacctgagacgaagtatctaatttggacgaggtgcatcttatggtgaacggatgagagtcaagtgcaaggttgttggttacctttacggtgaagactggagccgtgaaagataacgaagaagtaaaggctaaggctaaggagacaaggaagaggctatatgctttggtggatatcatctttagttttgttttacacactatatatcaatattcgagtgaatcatatatatatataagaaacttctttgactcacaatgtaatgatcttaccatgtaatcttttaataataaaaatgagtcaagtcaagcaatgagtcaagtcaagtcaagaaatttatcaaaaggaaattaataatgaaatatgcataaaaggaccacgaatcagaaaagagttaacaaactagccatggtatgagtgtacaccatcgctcttcgattacaattactcgtatacccatttaagcattttatttgttgaatgctatttgtttctggcataaccgtggggattacaaaccgggatgacaaatagagaaagaatgcgaataagcagaaaatgttaggatacctattctataagaaaacaagaatttgttgacaaaagaaagaaagttcgctaaaagagttatttagtgtctcaaaataaagagatcattgtttccacaaatagctagcatataatcatcaaaaatacaagaatgagatatttacaaaaaaaaataaaaaaaattaatacattttatcacaacacactagtgaactaaaatccatagacatatacaccatcagtgatggtccatccccatgcgagtggattacaaatatataatttaacataagtgtgtaaacggagaaaaactaggtttacaagcgttttcttttttcctaagacggaggtgatgttgttgaagtgttacgttggaaactgtatgatgacgaaactctatcaaaaaagacgaaaggatgatgaaacgcaatggttaccacaattatttcagattttaagaatgagataatttcataattaaaaaaaaaaaaaaaaatttatgatgatgttaagtatcggttcttaaagtgataacatcgagttagccaactttcgtatatgtgatatgaagaagaaaaaaaattgaatcatacgtatgttttcgttacgacacctaaaccaagttcttttctgtgatttcttcttatgaactaaatcatatcataaatttaaaaataccttagaaatcttataattatattatattatacgactgaacgatacaataacacaatgcatattgtttggtgtatcaccaattgaattgcttttggtatttctgaatagaagcgacatataggtaaagaccatcaggattgatttgccatagacaaaaaccatcggatctgcatcttgatttgtctctattaagatcaaagatgacgaaactactctttcttgctcccgatgagatgtcacaagtccatttaactgatcggtttgtgtcaaacccaaactcggaactctgaccttgagatacaacagcagaccaaatatctttttgtggcgagatgcaacttatggagatcggattagagccaggtgcaaggttgttgcttatctttatggtgaagactggagccgccaaagataaccaagaggtcgttaaggctaaggagaccaggaagaggctatatgctttggtggatatcatcttttgtttgtatcaatatttgtgtgaattaatcatttatataagaaacttatttgactcccatatatagtaatgatctaattaccatacataattatcaaaaagatagaaaaagagtcaaaatcaataaattagtaactaaattaaaaactgattcttaaagagtactctaattaattagagagaaatttacaaactagtgtttggtagactattaaaaataaaataaaatgaatcaacaccatttttcattctcttcaagaatcccattaaaagtcaaaaccatgtttgggctaggaaaaatatgtttgggctttagtaggcccaactacccaaaataaccacataaagtaaacggttatcattaatgggcggttactaatacttaataaatataaatatagttaaattaatatcatttctagagcttatcctaatttctctccctttcgaaaatcgaaacaaatcggtgcgattactccgttttgaatttcaccggcgacgatggctttgaacaatccgcgaagaacacggagatatctcgctttaggtttagccgatgaaccaatcgccgtaccagaaaccgtttacgctcaagtccgtgagaaaaaacgtcaaagcttggtttgtcgagttcttagccctagaagacaagatctctactctgtgatcgataaactccgtcttgagtggtgtctcggaggatatgaatgtcatggacgcattatcggcggcgggaagtgtcagttcgtgtttgagaaagagcgggatttagaaatggttctttggttggtccttacacgtttgatggatggctcgttgtgttgcagaaatgggaagatgagcaaggtcctgagtttttgaagtcggtgcctatgtggttgaagattcgtgggattccgattcagtatctttgtgatgggacggttcgtgagattgcttcgtctatgggtgaggtaatggaagttgaattagatgatggaatggttgatttgagttctgtgcgtgctcgtgtgaatgtttgtgtggatacacgtttgtgttttaagaaagtggcgaggtttgattctggagaggttaagattgtgagttttaggtatgaggatattggtatgagtaaagcgaggtttaagttttgttttaattgtggggatatgaatcatttggctaggaattgtttgatcccttgggttgatgttcctgatccttatgaacgttctctttcaccaccgcctcatgagtctaactctgatggttctgctgagggcaactgtggtgatggtggaacttcttctggtactttggagctgctcgaattggtggatgcggttcaggactttcctgttggggatggtgagcagctcgaattggcgggtgtggttcaggacttgcctgttggggatggtgagcagcagcagcaaggtcttgatggtgttgaggaagctaatgctacgcaggtggattctgaaatggttggaatttcatctgaggggtctaaaaggaagtttgatgcggtggagcagggtgatgaaaatccggaaaagcggcttagaggaatcactgatgcaactgagggaggaagcactgacgcaactcagggaggaagcactgatgcaactgaggagggtttaggggttagccttaagccacttcaaggagaatgatcatatgaaagttaggactgttagggctctgggttataaagacgtttcctaacagtgtttaatgtcttatagggttatccgaaaggcatagtttgttctgaaacagtatgtataaaagggtactacgtaggttggctacgtaggtcgtcggtagtgtttctaggttctgcaatcgttttggtccacagcggagatgagatcgtaatgtagtcaatgctgggtatagtgatttggtgtatgccggattgctgggtttagagtttcattttgaaaacattatggtctgctcttgctgtcttactgtttttctctagatttctgtaagacttcagtttctgcaaactctttacttgacttaatgtataattaagttattaagtagtttgttttctctcgtttgccgcaatcactattttaactgattataactttcaaagtacccagtgttacttataaaataatttttataactttataagcaccaaaatttggatcatagatacaaaattaaaagatcatgatcactttcttgaaattggagtttctcttagttgataacttatcaaagaattgttacataaatgaaccaatgattcttcgagtctaaaagaataataaagaatcaaaactgacgaagaaagattgatataaattcaaaacactgaagaacaatgaaactaaaacttatacagttcgaaaactgataaacttaaaatatctataataggaaacgataaagctaaaactctctatgatctcactaacttaggagataacaagagtaaattcgagaacttaaaatgtagctcaaaacttaaaaagaacagaaatgaaaatgcattagtttccctttttattattatgctttcccatacgcagccattctgctaggaggaagcttcttctctgcttgacgccttcttctcttggcctttctcgatagtttagcctcagcctcagcctcagcctcagcctcagcctcagcctcagcctcagcctcagcctctttcggtgttggtttggtctcaacaacatcattcttcttcctcttcttgcttttcttctcatcgtgtttaccctcccacaactccctgatcttacgtttctgctccttgaccttatgcctattcacctcccaatccttttccacataaggagccattttcttcaatggcacatattggttcagctctgcgtcatctaaggtaagtatctctcctgtatccagttcaaatctgtttggttgtactttcgcatacttaaaccttgttctcaattctccaattgtatcctcataatctagcttgtagtactcctccatcaaagcttctttcgtcttttgtacaagagacgtttttcgctttctcttcctcttaccctctgcctccttctcctcatctacttcctcttcttcttcgtcttcctcttcctcttcatcttcttcttcttcttcatcaatacccaacatgttttccttatgcttcaaaaccttttctcttgcggctgcaaaaacatccccacctttagtcacatcccaatctttaggaagtccaagcaattcatcttccttgtcaaaatctggtttctctccatcatcatcctcatcactattcaaatccgaatcctcctcaccatagtacttatcatcaaacgcagctttcatcatcttatcatactcctcaggatcaaactcatcatcaaaatctttggcatctaacggacactcttctccatccttaaaaccagcaacagaaagcaccttcttcatcttctccttaatctccttcttcttaacattcttcaaccgcttcaactcctctttcctcacatcatcctccttcttcatcctctcgtctttattcttcctctgcgccttcctcgcattatccttcttcctcaccgacccttccacaaccctagactgacccataacagtgtccccagcattctcatcttcatgcctatagtttaataaatccaacggtcttcctgcctcaaaatcctcctgatcccaaacctcgtgatcatcctcactcaactccttcaactcttcttcacctggaaccctctcctctttctccttccacaactgtttcaccaagtaatctttcaaaaactgattctcagtagcctcagcttcatcaccataatactcatccattttcttagctaactcctcatcaacctccacatcatcatctccttccttctccacaactctcaaaaaatcatcatcttcaccactctcgttcccttcagctttccaagcatcagtcacagctttcctcgtttctttctgctcctcagcgtaagtcctaactttcctctcctcatcttcctcaacaaactcaggacctccctcaagcaaatgctgtgcctgaacatctttcaaatacatcttcttcttcttcttcttctttttcgtatccttcttatcaacctcatcttcttcactactctcatcatcatactcatagaacttagcatctttgtccttaataataggatcctttttctttaccttaatcaacaaatcaacgaatttgagattgctttctggatttccaagatcagaatccggctcagactccgtctcaggctcttcctcggactcgctgaagagaccttgcttattcttctcttcgtatcgctgaagatcctcgcgttccttgttgtgcaacaatctcttagcgaaatcgttatcgacatcgaaacctttgaactgtgaaagttcgccgtcgtcatcatctggtatcgctttcggccgccccatcatgctactagggcttctgcaaaattgttcaacttaagtctttctcctatttatacttcgtcatttatacagaattgcgcaaaagaccttcttacttttctatattctcaaaatttgacaaaactattatttattgaaaataacaagaaataattcactaccaaaattgattatagatgttttatgattgttgtcaatgtcggttcgatataaaggttcatatttggtgttatagtataaactaggtatggacattcggatttggtttggtttgttttggattgagatagtttggatataaaagttttgtatcgaatcggagttattatggtttggtttcggtaagtattggacttagattggtttcaggaaggaaaaacagtaagaatttttttatgtctactttgtttagtttcaaaaccaggttttcagatatattgttcggttgttggttggattcaagtataaatattgaaaaatctattcaggttttatgactatagattcggttttggaaccggatttttcggttcggttcatgttcagttttcgagtttaatgcctaagcccaatattaaactgaaaaaacaaaaaaaaaatatatattgttttgggattttagacaaaaaaagcgtggcaaagtaaacgatggttaacataattttctttaaaaaaaatccaaaaggacgaggcaaaactatacaggctagagtcaaatatctttaagatctctctattgagtagtcacactctttgccagattcctcggttgatcaacattgtgacctctcaaaacagtcagatgataagccaacaactgtacccaagaagaagaagaaaaaaaacaccataaacacgtcgaaaacgaaaaaaaaaaatacatagattatagattgatttagaggttaagaattttacctgtaatggcactatattaataacaggttgtaaacaatcttcaacttgaggaacttcgatagctcgacaagaaccactcgagcttaccgatgcagcatcaccttttgagcacattactattagtctccctttgcgtgcgtgaagttgctgaatcacagattgttgtttactgaaacaagcatcacgagtggcaatcacagctatggggagattctcatcaaccaaagctaaaggtccatgtttcatttctcctgcaagtattccttcactgtgcataagtgctacttcttttacttttaatgctccttctaaagctgttgcgtagttgtatcctctgccaaacactagcagtgactgctcgtctatcaagagttgcgcgagatctttcatttcatcgtctagctttagtacttccttaaccttatctgcagtcaaataagattgcttaaaaacagtcttcagaggaagtaacttttctctaatttactcgacttacacggcaaatcaagtagtccatcgattatagcttcccgtctcttttggctggagattgtgtcacttcctattgctaaagctagcattaccattaccacaatctgacttgtatatgcctgataatgtttgtgaacgcaaaggtttttaacctccaaatccaggaagatgtatgaatatacattcagggatttacaaaaagtacctttgtacttgcgacaccaatctcagctcctgcgtttatatggacaccacagtgtgtttttctagctatggagctcccaacggtgttagttatgccgacacataatgcaccgttttctcgagcatagtccaaagcaagtagtgtatctgcagtttcaccagactgactcacaaacaccgcggtatcttctctgtatattggaccttgccggtcccatagatcactagcaatctccatactgactggtatacctatggaaagacttcagttagcagagtcaatttcaaatcaagaaaacatacagttttagtagcaattaccagagagttcttcaaggataggtcttgatgcaagagcggcattgtaacttgtcccacatccaataaaaactatacgccggctgcgtcttatggtctttaggtgatctttcagcccacctaagaggacggttttcgttttacgtgaaccaccgcgtataagtcggcctctcattgtagtagttaaagattctggctgctcgtggatttccttttgcatgtaatgatcatattttcccttgcttatttgctctacctccatctctagaacagataaggcacgttccactgaagcaggtctcgataaaccattacaccttcccctctcattttcaaacttaagtattgatacacctccatcctgttaataaaatgtggaagtggtaagcacaaagaatctgcataaacaatattaataacatatggttatctgtcatgatatttgttacatgtttcagttggtacttgtgaatgctgcacatattctcagtgatcagtcaataagattagttggtcagacgctagaattcaacattcatacttaactttgacagggaatgaatacacactaactaaaatataactgaataattgttataccttgagattgacaacttcgccatcttcaatcaccaaaactttctttgtgtgctcaacaagagcatgtggatcacttgataggaaaaactccttgggatggtcattcttagatagaaagtgagcatcttggaaaacatgactattgctctcaccttgatctagctcctacgaaagcatatgcaaaagtaaggtataccgcagttgcttacaaacccaaaaggttccgattctgtgagtgaaaaaggaggtgagaaaataaaagctagcatcatgatccagttagaatcttaagtacacaaatcaagctagcaatatgaagcaactgtgccactatccacgctaaaacaatcaacttttgcttctataagtatttaagagagactagcaaggaaacgaataacagccctcttgattctagtgacaaagagttacttactttaacacctaaaagcaatggactaccaagcttgcacgcaattaactcattcggataatgccagcttttaaatataagagcataagctccttcaagatgcctcatcacttcaaacacaacttcacagaatgtaacagtttgtccacctacaaagcataagaaatagatatccccatgaaaatgagcatactaactaaatcaaaacaaccactacttcaaatctcatgcacaataagcattaccttcttcattagctttgtcaaaaacaaacttagcaagcttaggaattacttcagtatctgtgtccgattcaaaagtaaatccatgcctcactaacgtttctttcaatacctaacaacaagaacagaatcaaaatgtgttctttttatcaccaaactctttttaacataagaaatgagaagttagaaacctcatagttagtgataacaccattatgaaccaccaaaaaatcatctccaggaccagaagattgaggatgactattccttggagctggctcaccatgagtagcccacctcgtatgtgcaattccagcatgaaagtagaaaacttcgtctagattcaaatccgtattcgtaatctctgcaaaaatcgagaaacaacaacacacaaaaattcagaaaggcgacgactttggattcaaaattcagagatccgtaagtaaagtaaccttcgttaacggaattaacaagtgattcaatgtttcctgcttgacgaaacacgagaggagaagaagaaggagaagaattatcaatggcgattccagcagaatcgtagcctctgtattcaagacgacgaagaccattgaagagaacatcgagaatgtatcgtctctctttgttcgcgtgaaaattcagatacgcgaagattccacacatggttgttgtaatctctcttttgaaagaaaatgtttctcagtttttcgagggaagatgaagaagaagtaaggaacggtgagattcttattttttgactcagatttgggtttgactttgtaaatacgatccataagtttggatagtttcgtctttttcacttctgtcaggagctatgacgtggttgttcctgattggacagatagcgagtttgcttttttgttggagcggaaccgctacgcgtggctagtgtcacgtgctgatataggccactagccactgtccctaagttcagatcaattcataattaaatacagtaaaaatcaattcataattaggaatctctctgttttgaacatgtggtttataagttatcattatgttaatcaagtttcaaaagccaaatatcaatctaaatagaatagtagacacaatatcctaattaaccctaacaaaccaaatacttcccttaacaaaaaaaaaacacaacattctaccgtacccaatcaaaaacaaccaatgattcattcacttttcgcactttctcaagcgactttgttctgttcttgagcaactcgttgtacttcctctgcaaatttggtaaaattcttctaactccaagtttcggatctttcatgattcctcgtggcaactttctgcgtcgttgtttgtaaaaccgtctaatggctccataaacacccacctccggcttctcattatcctccgccaccgcaaacttaatggccgattctatggcatgaaagtacatatcatctttgaacagctcgtcctcttccccacgcgtcatctcatctcgtttctcatcttgtattaaaccgtggtcgagtaggatcatcctaaactcctcttttagacgaggataatctcgtaacattaggtcaacatcatcttttaaaatctgcacatcgttatgttccttgaacctcacgaaagcctctataagcactccacataattcctcgcagtctcttctcaacgactttaagaactcctttattcgtttaacattctttggatcaacaaaaacttccttttgacgagaactggaattcgaatcttccagaaatcgatcaaaggcatcgagcaaaacgtcgcagttcttgaaaatagtcgtgattctgtttttgagatcgacttcgctcaaagatccagaatagtaaagcttcattgcagtagtatatcgaaggaagattcctctgtggtttcctttttcatcaatctcttttactttcttcacgaactccaacgctcgcttaaactctttctgcgagcaatcgttggggagttttatcggatacttgttcgtcgtatgcattatcataaacttgttaatctctcttctgtgtttgtattttttgttgagtaaaaatgtaaacttatctctatatatataggagatagtcagatagagctgtttctatttcctaatccatatccgagtaggcgtttttagaaaatggaaaatctgctgtcaaacaaaaaaaaaaaatggaaatcctaatacatattatattttaaacttaataaaatatatcatgtcatacacatggcaatcccatttttattatattgtttcatggtatatacaatgctctgttttagtcatgtgcaaattctaatgatttttattaataattcacttataaatatatatatcataaaaatcaacaacatgtcatacatcaacagaagtagtgtctttataaaacttgaaaataatcatagtaaaattagtagtgacagattttaaaaaatgacaagcttatgctagtactttacaaaataaatagcattatataaatattttactgtagtatgagtcaatactttttaaattattaatttagtcaatatatgttagatgcaaatgtattttaattattttttttattgaccaatactttggtagtataatattagtagtattagatattattggctataaatagattcaacattgaaacacaaatacaattaaaaccaaaacaaaaagtaaaaaatggctaagttcattgtactcaaaatcacatcaagaaaaagcactgaaatcatacataggtctcaatttggtgcccccaaaccggatttttaacaaaccgaaaatgtacattaatttccctcaaaataggaaaaccggaaaaccaaaaaaatcagtaaaccgaacccaacggataataaagaaaagaaaaccaaagtctaggcctagaaatttcgatggtatggaaattacgattttggacccaaaacaatatgtacaaaaaatcatataaataatcgaatttattccatcaaatcttcttccttgtctggatttggttcaccatcgtcggaaatctctgatctctctcaggatcgcttgttcgctacgca

SEQ ID NO: 1306 - DNA, 11831 bp, Arabidopsis thaliana
gtctcgaagtaataagaataggaggaaacaaagaaatctccggccaaatcccatcagagatcggagattgttccaatctaacagttcttggtttagccgagacaagcgtctcaggaaacttgccttcttccttaggtaagctcaagaagctagaaacactctcgatatacacaacaatgataagtggtgagattccttctgatttagggaattgctctgagcttgttgatctcttcttgtacgagaatagcttgtctggttccatccctcgagaaatcggacagctaacgaaactggaacagctgtttctatggcagaacagtctcgttggtggtatccctgaagaaataggaaactgcagcaatctcaaaatgatagatttgtctttaaacctcctctctggttcgattccaagctccattggtcgtttgtcttttcttgaagagtttatgatcagtgacaacaagttctccggttcaataccaacaacaatctcaaactgctcgagtcttgtccagttacagctcgataagaatcagatttcaggtctaataccgtccgagcttggaacactcacaaagcttactctgttctttgcttggtctaatcagctagaaggaagtatccctcctggtttagcagattgtactgatcttcaagcattggatttgtcgcgcaattcgctaaccggaacaatcccttccggtttgtttatgctaaggaacctcacaaagcttctcttgatctcaaactctctgtctggttttatacctcaagagattggtaattgcagctctttggtgagattgaggttaggtttcaacaggatcacaggagagattccttcgggtattggttctcttaagaagataaactttctcgatttctcgagtaataggctacatggaaaggttcctgatgagattggaagctgttcagagttacagatgattgatctcagtaataactctcttgaaggttctttgcctaatccggtttcttcactctccggtttacaagtacttgatgtttcagctaaccagttttcaggcaagattccagcgagtttaggacggcttgtgtcactgaacaaactaatcttgagcaagaacctgttctcaggatcgatacctacttctctagggatgtgttcagggcttcagcttcttgatcttggaagcaacgagctctctggtgagattccttcagagcttggagatatcgagaatcttgaaatcgcgttaaacttgagtagcaatagactcactgggaagattccttcaaagattgcgtctctcaacaagctctcgattcttgatctctctcacaacatgcttgaaggagatcttgctccactcgctaatattgagaatctagtctctcttaacatatcttacaatagcttctctggttatcttccagacaacaagcttttcagacaattatctcctcaagatcttgaaggaaacaagaaactctgttcttcgactcaagattcttgctttctcacctacagaaagggtaatggacttggagatgatggtgatgcttctcgtacaaggaagctaaggttaacactcgcacttttgatcaccttgacggttgtgttgatgattcttggcgcggttgcggttatccgagcgaggaggaatattgataatgaaagagattcagagcttggagaaacatataaatggcagttcacaccgtttcagaagctgaatttctcggtagatcaaatcattagatgtttagttgaaccaaatgtgattggtaaaggatgttcaggcgtagtttaccgcgctgatgtggacaacggagaggttatagccgtgaagaagctttggccagcgatggttaacggtggtcatgatgagaagaccaaaaacgttagagattcgttttcagctgaagttaagacactagggacgatcagacacaagaacatagttcggtttctcggatgttgttggaaccgaaacacaaggcttttgatgtatgattacatgcctaatgggagcttagggagtttgcttcacgagagacgaggatcttcgcttgattgggatcttagatacagaatcttgcttggtgcagctcaaggtttagcttatttacatcatgattgcctcccacccattgttcaccgcgatatcaaagccaacaacatcttgatcggtttagatttcgagccttacattgcagatttcggcttagccaagcttgtcgatgaaggtgacattggtcggtgttctaataccgttgctggatcttatggttacattgctccaggtatgttcctacatttatctttcttagtatcataagcaaccaaagtggtttagttaatgctaatgcaacatttggtataaaaaaagttcacaatcatgaaaagtgtagttagatgttttcttacgttttggtttctattttgcgttgaaacttagaagtctgtgtcgtgtgcagagtatggatatagcatgaagattacagagaagagtgatgtttatagctatggtgtggtagttcttgaagtgttgactgggaaacaacctatagaccctacggtaccagaagggattcacttagtggattgggtgaggcagaatagaggtagcctcgaagttcttgactcgacattgagatcaagaaccgaagctgaagcggatgagatgatgcaagtgttgggcactgctttgctgtgtgtgaactcgtctccggatgagagacctaccatgaaagacgttgcggctatgctcaaagagattaagcaagagcgtgaggagtacgcgaaagttgacttgcttctcaagaaatctcctccgccaacaacaacaatgcaagaggaatgtcggaagaatgagatgatgatgattccggcggctgcagcttcgtcttctaaagagatgagacgagaagaaagattattgaagagtaacaacacgagtttctctgcttcgtctctgctttactcttcttcttcttcaatcgagtgattttaaggtttgaaggttacgtgagaagaaagcttttgtgtgttgtttgagaaaatggcctttttttttcatttatcattttaagtctttatatatgttatgtataaaagaagaagaatagaatgagagaagtgagtcagtaatgttatggaattgtgattagtaaagggtgacatgatattgtacctttttgggcggtttgaaatcaataatttctctagttttctctccaagtgtgactttagattgaatgtagtcctttatagttttcactcataaacagtactatatatatcaccttccagaaacgtattaataataatattgaattattgatgcataaaacaattcttcaaaaatgatatttcatggggctcttgaatcagtaagccacataatattggaccatgttttggtttacatgcaacattatattgcataccgtccggccaattgagttggtctctattttctttcttcgtgtggccaattttggcacaatgaaaaagcatgcatttgacctttttcattttttaaaccttgagcctttcatatattcttaatcttactataattgttgatcaccaaatacatttttgagagctagagctggtaaatacgtttagctctatttccattcattataatttggaaaaattggatattaaggatcattttttcaaaaatttgtccatctataccttagtttgtaaattgtcatctatgactaaactacccttattcatctataaaattaagttttaagacatttaaagagataaaaatagtaaaatcatgttaataaacaactaagaaaaagatttctagaattttttttgtaattttattgagaataatcagtttttatatcaatgatttttgttctgcaatatttagaatacattttctgccatttgtacatattctgaaaaaagtagattatgcattctatcatttatacatgttccgaaaaaaatagaatatgcattctaccatttatacatgttccgaaaaaatagaatatgcattctaccatttgtacatgttctacggattttagaattgaaatgtgttctacaaatttcagaatacatcattttatatgttctgcaaaatttagaagatatattctacacattactcaatgttctacaaaattcagtatacgtatactacgatttactctatgttctgaaaaagttagaatataaattctacgaaatttagaatatatattttgaaaaaaatagaaacctttaaaaatagaaactaaatctaaaaattaggaaattacatatttatgtaaaatattataagtaatcaaatatatggtgaatattatgtatttatagtgttatacgtaatttagaatgagtattttgattagtttagaagtaaaatcacacaaattagattctctcttataaaaacctaaaagatttttttgtttttctcctttccacgagagtttctttctcatactcatttcatgatcttttcatattttttataaaattatgctgcaaatcaaagttgatgtaaaaggctcgttgacaaattatgctgaaactttttataattggggtttagcctctattctagtgagagtttttggatttggagatatagaatcatatttcttcagttctatattttatttcattttataattaagggtataattggtttttaattttccttaaaacctatttcaccaaagttatctatataaagtatagatggacaaacttttggaaaatcaaaagtattgaagattgtttccttcaatgagaccataataaatttactcttgaaacgacccaaccaccatttgtcttgaaagaagatggattggaaatttggaagtgaaaaacgtaaaaagtcgataaaggttaagcaaaaactatttgtgtaatggtttatcgaatatagcattgacaattggctatagacttctgttagtactgtttcatttcattggctcagtctctgctatccaaagagagcgttttggaaattggcttaactttaattatagtgataaacgttaaagtcacaaccgtattaaagtgatttgtttcaacgtatcaaaaaattaaaaatcgtttcatacatttaatcgctaaatttaagttttaacaagcaatagtagaagacttcaaaatgtaacagcgaaatgcagacatcttgatttgcagcttatcatattaaaaaaaaattacatcgaaccactatatcacattgactctacttttgcactaggataaaatctaaaattttaggatatacgaaatacgaattaatgctcgtttcaatagtttactaattcttgtgaatacatctatctaagtagctacgaagctccctatacataaaaccattacatttcccatagaagaggactgtcatgaccaatgataattgtgaacaagtcattaacactttcttcacctttaattaagtcttatccaattaattatcttcaactgtaatccgtctctttccttctatataatccactacattccatgcatgcatgctttcaaatccaaacataacatctcaacattgaactcgtttgaaatctctaaacaagcgatagagctaaacaaaatggcaatgaggttctcatcacttactaaaatcgtgcttctctctgcagctatgttgcttttggtccacgcaagtgctcgcactttacagcaaactcagactctgcctctccaaggaggaggagctgctcctaccaaagatgagcctcatatggttaatgcccctcttgaggaccagaagaacttcatctacggcggtggaattggcggtgttgccggagttggtggattcatggggatgccaggtggtggaagtggtggctctggcatgactttcccactcccgagtgggacgccgcttcttggtggggctggtgggcttggtggtttgggtggtgcaatggggttccctggtggactcggtggtggacctagtggtggtggtgttccaagttcaagcggtggttctccttaagacagatcatgatgattaattggttcctatgtagtatgtaactccaagatgtttaggaggaagtgaagttttgtttcgttgtgttaagtttggatctttgatgtcgtttctgtgtttctcttatcgtctttttcgtcatcagtttatggtttgacgttatgtttgtgtttccttgttcgtaatttctttaataatattcgttctgtttttgtttaaatattctggtatgttttatagaaatctggcatagaaattaagtcatgcaacaaaagctcgaccaaatcattactcattacaaaagattaatttcaccaaatgatcttagaacccaacgttacaaacaataaagtaatgatgctttcagtttgtgagatttaaccacaccaaagcatggcaatattgaccatgtgaaatcaataataaaatatggttacatagatttaggcattttagatgcttcttactcatgacaaaatcaaattatcgacactataccaataaagcatactagtaataataatctagccacaaaacaccgattccaacgagaattgtaaatatacaaatcaaacgatagaagcataattcaacaagatccgatatcgaatataaatgcatgcatgtggttagttatctttagaatgaaacataggcttagagggattggagatcaaaccggacaagaaggcaaagatgtttggaaaacaacgacacgggtcgtcaactaagatttcgacataattatttcattttaaatttactgctaacaaataacaatcctaatgtatttggttgttatgaatgtataaaattaattatccaaatccttaaaccttatttttatttttatctttgataaattgatttaaaatatataattagggtcaatttataaatttgcttttaaaaggacccccattttctatataatttaaagttctctagattttaatattactaatattttcagaaattgtagaatatggtcttttagcctcgtaagatctctaacgagttcggtctctccgaatttacccaagttaaagtcttgtatcatggaacaaaaccttgtatgttttcatggagaccgtttgttcgtaatgatcatcgttatcaactcatcagcgttgcccatatcttcaaaaaatctcgataacttgagggtaaagaaagtcgaaagtggtttcaaagaatcagataggagacgacttagggttagagtatatatatatatatagttttaattaaaagttaatgttcgtggatcgatatgttaattcgttaggttttgtgaaacgaatctttaatatattttgtctgtagttttagcggatcggcccgaacggcccaaataatctcgaagcaccccatctgacatctctaaacatggttacaacttacttacaacatgtggcaaagctgtttaaagttacaaagtaacctaattagtaattacaaaatgaaaattgaaattgtttaaagtccggtacaatacttgaattgaatgcttcgattggtcaatccaaaattgaaccggaattgcaattaactccaactctcgggggtctaattgattcaattataatttaggggttcaatgttgaagaaaattataaatctagggacgtttttcaaggttatgtatcttctcctttacctttcccatttgaaaattgaaatcgtcttctctgctttcaacttcacaactacactctcttcagttctctaacagtagcgccaaaatgaatccccaagactaaagctttcttcaatggaagaagaaacccacgacggatctctcgatctccaagagattcgcaggttttctacttctctttcgtctctttctttcattgatttttgtgctgctttgttcatctatttgctctcatttttctcaggcgcgtgaaagagttcgatttctttccccggaattgcagagaagagcctgtagaatcgtgtagttccgattacgagactctggtggttcaagattttgttcttcagtttgaagtaattgcgagatttcgagaactcttttccgtttttcaaatttgtctaattttcgattagattgctaatttcgttttcgtgtagccaaaggtgaaagagattgttgaagattacggcgatgttgatttattggatgttgatcacacacttgtgttttgcagatgatttgttagttttcaccgatggcaagaaaagttctatagaaggaattcttcagatctttggtaaatttgcagatttctccggtttgcagattagtctcgagaagtcgaccatttacatggctggagtgaaagacaatgacaaagcagacattcttcacagtttcccttttgcctccggcgcactacctgttcgttacctagggctaccattgctgacaaaaaagatgacgacaagcgactacggccctctcgttgaaaaaatcagagtacgaataggtaaatggacggcgagacacctctcctttgcgggtcgtctacaactcattagttcggtaatccatagtctaaccaacttttggatgtctgcgtttcgtcttccaagtgcctgcatcaaagaaatcgatagcatttgctcttcttttctctggtctggccccgaactgaatacaaaaaaggctaaagtagcatggagtgatgtttgcacacccaaagatgaaggagggttaggcatcagatctttaaaggaagcaaacaaggtcagtttgttaaaactcatttggaggatgctctcgtctacttctttgtgggttcaatggttgcgattatatctgctgcgaaagggttccttttggtctatcagtgggaacacaactctaggatcatggatgtggaagaagattcttaaacacagagctttagcttcaggttttgtgaagcacgacattcacaatggcagcaatacatcgttttggtttgataactggtcaaagataggaaggctgattgatgtaacaggtcatcggggttgcattgacatgggaatcactcttcacgcctctgtagctgaagcggttgtgaaccatagaccaagacgccaccgacatgatactctgcttcgaatagaagacgtcattgccgaggtgcgccaccagggacttacttcgggggaggatacagttcgttggaagggaaatggggacatttttaaaccgtgttttaacacaaaggagacctgggctgcaactcgggaaccaaaactgaaagtcaactggtataagggtgtttggttttcacatgcaacgcctaaatactcagttttagcttggatagcgataaagaatcgtctaactacgggagatcggatgttaagttggaatgcgggagctgactcttcgtgtgtgctctgtcaccacctcgtggaaacgcgcgaccacttgttcttcacatgcccttactcagcagaggtatggtctacactcacacgaaagctcctttctcaacatttcaccaaccgctgggaagctattctaaagctcttaacaaacaagtcgttggggcacgaggttccgttcttgacaagatacacttttcagctaactctccactctctttggaaggaaagaaatggcagacgacatggagaagtgccgcaggctgcagctcaaatggttcgtttccttgataagcaagtccgaaataggatctcttccattcaaagccaagaagacagaagatataatggttgtatgacatgttggttcggttctagatagtgtggctctctacatattctttctgaccttattctttgactcttgtatctaaaatttataggcacaaacgttgcactcgatgtaaatcagttttttttcgaataaattttaaattttattcaaaaaaaaaaaaaagaagattcaggtttgctctgttgtttcctgtgagattaagatgaagtatgaaagtcaaataatggtgaaattaagtgatggaaatctgacagatgcttacttggagtacttgagaaatgagcttcagtctgtggaggctgaaagtgccaaagtttctgaagaaattgaacgtctttctcagtctcatgccctaggttcttcattagttttcttctactgatttagttttagatcatatagagtttgctactgttatttttataatatgagttttcttctatggatttgttagattctagtaggttgcaaagggatcttgaaggtcttttactgtcactggattctatgtcatctcaggttatttggttgaatagattatttctttggctggaatcaaaaggcttagttttgagagttatgtgattcttattttaggatgtggagaagtcaaaagagaatcaaccatctagcagctcaatggaagtatgtgaagtgattgatgatgacaagtttaaggtgccatgtttttaagttttgtttctaagagaagaagcttttgtgtgtgtgtgtgtgtgaaacatgtattaacaaaattctttgcttgtcactgcctatcttcttattgcttttatattgtgcatggatttgatcatctttcacatgtttttcagatgtttgaactcgaaaatcagatggaggagaaaaggatgattcttaagtcattggaagatctggattcgttacgtaaaaggtaatttaaacgtactttcagatttacatatttaccctgtcttcattagagttcttcacttgttctaccttcaggtttgatgctgcagaacaagttgaggacgcattgacaggcttgaaggtgctcgagtttgacggaaactttattaggctccaactgcgaacatatattcaaaaactagacggttttcttggacagcacaaatttgaccacattactgagccatctgaattgatccatgaattgctaatatacctgaaggataaaactacagagataacaaaatttgaggtaagaacactctccgtctttcactgctgactattatgctttagttttgcataaatcctagataaatgtatctgtttcttgcttcttgttcctttttgtgaataaaattgaaatctgctttcttgctcagatgtttccaaatgatatatacataggagacatcatcgaggcagctgattctttcaggtttgcgctctagtatctttatgtcctgaaatttgtattacttatcattctgaaactgtatggtacgtaagttataagactaataagttatcagggacgataagatgatatcattctattattcttaaaactgcaggcaggtaaggttacactctgcagtgctagacacaagatcttcagtccagtgggttgtcgccaaagtgcaagataaaattatttcaacaactttgagaaaagattttgtgatgagttcgaaaacaattaggtgagccttccctttcagtagcttgagaggctgaatttttctttcgtagctaactcatgtcattgagtgtctgagcaagccaattgactgcatgttttgtgatcctatggcaggtacacgtttgaatactacgacaaagatgaaacaattgtggctcatatagctggaggtattgatgcatttttaaaggtctctgatggttggccactgctgaataccccattgaagcttgcatctctcaagaactctgacaatcagtcaaagggattttctctgagccttatcagcaaacttgaggtaagatcatgtttctccaaactcaacactttcttctcgattttacaattccatcataaacaaaggtcttctctgttccttctccaggtcattgttgtcagtcttatttaatctctcaaatcgaacatttaggatatgtaataacatgattaa

SEQ ID NO: 1307 - DNA, 35471 bp, Arabidopsis thaliana
agagtaaaggttgttaggtctaaaaaatgactaaaaagaatatttatatctaaaaatacgagcaagtacttgtttgtaaataaggaactcttctgggacaagttcaagaagcttcaaatcttttaaaccgtcagaattcttgctgagccgcgaacgatgtcgaccgacacctgtttaggtgttggtcaatactcaatacatttgttttggtcagactctaaatttgttcttaaactcaacttcttcggttttacttcaaaatatttttctatctctaatttagttccgatcatagaaataccagattctaaaaagactttataaataagaaaaaagacttgaaaacctatacttgttcatagctaaaatagaaaaaattgaaatatattatttttaatttcttaataagatttcaaacttgattactaataaatcataattttgttatatatatgtagcttgatatagtgaagggattatgaaatgattcacaaagacacagttataagaacgcataaatgtgtgtgatagatggattcgaaagatttgctggatgacaactcataaccgtgttttctgctacaaggtaatactaatacatatcgcattgttttatttataaccgaaaacaaagtgatgaatcatcattccccatttatttcgaattcatcacgacacactacattcttataaccatgtgtagataaatcatcacataaagtctcaactatatcatgtcacatacataaaacaaaactattgtttagctattgagattgaagccgaaataatacagagaagaaacaaaaaaaaatatgatgcataaccccaaatgtgacattgggtcctccgagaatttctatataaacataaagctacacaagatctgagatgtttatgcaaaaaaaaatgttattacagtttggaaaaaataaaatgtagtttagaggatgttgtttacttgaaaaccatggattcaaattttgaaaaatcgaatatttgcaatgtgttacaccaggactgacctctccatttttctggacataaaaaaaaataatcgatttgtgaagaaactatttaactttaaccatatttacttcagttgttgaaacaaaaactctgaaacctctctctctatgcctaccgaaaaagatggagttgatttctatcttaaaattttgtagtatttacttaatatataagaactttgagataaaaaatgaaaatgtgatattatgattgagtacatctagattttattatatatatttttttttaatctttagataaaaatttacattcgttttttaccaaaaataaatgaaaaattacacacatctttgaccagaaataaatgaaaaatcacacacgtctttgactacagataaatgaaaattcacacacgtctttgactagagataaatgaaaatttacacacgtctttaattagagataaatgaaaaatcacacacgtctttgactagagataaatataaacttacacgcgtcaaacaggatcaccaaccacgacaaaatgacttctttctatgatttaaatcttttcaaaactaaattacaataggaaacagaaacaagattattatgatttctttcccaaagaaattaactctaataattcaaaataaatcttaccaaagtagaatttcctgaatacaaaatagagattttagtggagaaaacccttttaagtatcggcagatcaattttaaacccttcaaataaattatatatattaaagttggccaattctctcccacaacttgacacatcagcacatgagagcttgccacctatacttcataaaataaataatacataattagtaattaattcaacataataactaaaataggaagatataattaatcagaacttgaaccatcactctttctacatttttttaattcaatatatcctctttaattttgagatccaaatatgttacacatattccttgcctaaaaattagacgattattatgaaagaaactaaatgaatatgcagattaaatatatttaaacttttcgagatttatgctaagaaaacaagtaatttgaaagatggttgatgagctatccttataactaatacgtaagatataagattatgacaagaacttaaccaaactttacaataacatcaagttgaatatgattagattggatatgcagagacatgattaataaagacatgttatatttttaatgtaaaaaacaaattttctaaaatttcaccgtctcacaaactaaatatataaccaaaagaacaaagatatataaattaaaaaaaaaactgagaatctaaaacaacaataaaaaacaactcaagcactttcgttttcagatgaactaatatagttggactttttgaaaacaattacaaatcatatttatgtttcaaaatcgatgcattcaactttactttatatgaacagacattatataaaacaatttgtaaatagtaatacataaacccgcacgtagtgcgggtattcatctagttattaatgaaacaaactacccctcaagtaaggaatcttaacaacaacatccccaactaaataatcaatgaaaacaccctcaaataatggttactcaaacaaaaaaatcctgaactttctattttggtttgttgaaaataacattttttgcataaaaacaataacagatgtaatcatttgaaaatctgaaacgatcaatcaatataaccaagatattgttttagaagttgatgaaattgacactttacacgagttagtacacaacagagcgaatggttcgcaggacctctttagatatgaacagaaacaaggaacagaggcaaaatactctccctaaggagattttttaaaatattattatgtcaaatcctaaatctaaaccccaatccaaagagatttgcaatgtggtcaatcctgtggtccaaattgatgataaatagccgaatccacgttagagaaatcatggactatttagttctaatcatattattcatactaagaaagaatgtggttgaatcaatgggaagcttgatcaatgtgaggtcattactccattgtttggccttttggtggagacaacatcagtaaatgcgtcgacaagttggccagcaaggctacctggatcatcctctaaagtctgcacaaatgtgctcacaacagattgctcctgagcggttgagctcatgctgaaccatgtcaagaacctgaccctgaatgttgttttaatgtggccttcacgctccagccacctgatcaccttcacacatttctcaagagtgtcatcaatcgacgaactgtcacactcgtggttctctgagtcattactgtctgaaattgctttcctcttcctggtcatgaggaaatcaaatccggtatcatcaccacttccatctgatataaccaagcagtcgttgttgttcttccgtctaccgttagacacagcatcatcacagttatcatcatgatcaccaccatcagcctcagcaagcgaatttagcggcactccattgtcttcacctccagaagaatcaggtggagtgaactcctcattcaagtctggcactgaaactacatttagatcaaacccatgtggccttcgaggtggcaattcttcctctggcggctcacaaattttctcagtatctacattgtaaaacgcttcaagcaagccttcctcctgagcttcagccaactgcacatacttcccaagttgcccaatttgaaatcttgaggaaatgctacttttctcctctctatctgagggctgagcgttacctactaaatcaattgttctcttttccttaccatccactggtttcaatatctcaacgctcttcgtaaagcacatagcgttcgaatggccaaatataccagcttctgtgtaagagacaacacggaatgtgtactccgtgcaaggctcaaggtcagatatcaccatcctcctctcagttctactgcaatcaacaaataaatcatcctcaggcatctctcctttcttgaaataccataacttgtaacccttaacatcatattctacagcactaggtagctcaatcagacgaagagtcacttgctttggtgcaatatcttcgaaatgaaacctgcacgcagctggaactaaatctgcaaaaacatatatgaacttatttcattactctctctttcagattcattgcaataaacatatctccaatactaacctctacctgcattggctgacaactcccctgcctttttaattgcagaagtgcaaagctcttgcacattagctgcaacaggaagcctactaacaatgcctctatcagttctagcagtaggtccatcaagaggtccaacttcatcctccagcatagacttagcagctctaacaatctcatgcaattcactaaaccgactagtcccattcaacagtctataacccaaatctattctataacacagtccatcacgtcgtcgtgcttcctttgctgccacaagctgctttttccaacatcttcataaacacacacgcacattgagttatacaaagccaattacagcaatcaaacaaagagtaaaggaagaaattttacccaagaatttgagaaactttgccacatgagtagcaacaaaaacaaccatcaagcttcatcagattcccaagagcaataacaccaactttgacttctcgaaaagcacactcaatgtgacacgataagccacagaactcaacatcatcagatttctcaggctcacaaactaaccaaagactaggatccttgttttcatcgaaattatgacaaacacaacaagaacatctcttgcaaaaggaatcttctttaggcacattagctctacacgatgcattcttgcagatccatgatgatctcaaacacccaccaccaccatcgacgtcttgttgttgttgttgtttcccatttgattcgtgcttcttgtttgactttttgttcgtcttgcgtgaatgtgagatcttcgatttcgtcgatgatgaatccatacttgctcagaaagaaaaaattaaagtctttgtagctcttcttcttcacagatgtcttcgtcgagaaacaaggattgtttcgtcttttttgattcaatgtcgaaattgagaaacatggttcggtgattgagattacggaggagttttcaggtggctgtagatttaggcgtcgcctgagaaaacattgccgcggcggctgaaatttgggggaaagagagaggaaggagatgaaagttagagattctagggtacacgtgtcatttgtttttttgtttttttataacatgtatcatattgggcctatttctttaaagggcctccattttcttagtttcgagattttagggacaaaaaaagggaagaacacaattcatggttttaaaatcaaaaccgaatttttggaatatcggagtggttctaaatttctcaatccgaatccttgtatccgaatatcggagtgtccataactagtaaatatttacacacatgtaaattttatacatatataaaagtataaaactaagcaaattcgtatattatataaattaaactaaacacattcctatatcattttttcagtttaataattacggttaggttccagtttggccaattgagccacataacataattattatatgaggatattatttttatataattagtattttttatttagttgtcttttattattttatcatggtctcttaaaacaaattttcattttttctcaaacaaaaaaaaaaagaaaaagaaaaatagtgaatgtcgaaggtggcgataggaacgaagaaggggggaacaacagagaagatatcttaagaaaaccagcgacttggtcttctacttgttcttctactatggagagattgatactgctggtatattagtgaaaacttttggaagccttttcgatacagaaaaacagattttttaatatgcaatgtaaattagtcttttcgtattctacaaaaaatatagatcccataaaaaaaaattcacagtaaaaaaattagtttgattatgttagtcatgtattgattttaagtatggacactaacacacataaactttatgaaaaatcattatggtttatactgaatgtgagacggatttagaagatgcaaataagtgaattaacaaagttgtactaaaagatatatgttcttgataaaagagtgaatattacgtgcaataatatggaatccataaaatgagctgatccatttcatagctagattaggtaaacgaggcaacgtatcaggctataacatagagggggctcctatggtccacactctgcacgaccaagtaactatgtactgactgattttgtaaaatacttcagaatccaatattataaacaagtttttaaccaaatcaatattctaagttaagatgtataacgagttaatttaaaattcagattcgtggtcaaacttataaacttattattagactttgaggactatcagaactaattataaaacttaagcatgtgcatgtatttactatttagtgaggactgattataaatttcatattaaacttggtaacgacaaccacttggtgttagtataaacgtatcatttaatgaaatatagggatataaaagtatttgtggaataaaaacacataaaatttgataagaattctcacatcaaaataaaatatgaatttaaatatatcaaaaggattttatccgtttattattgattgggtttgagttgaaaactcatcataaaccttgatatggattaattaaagtgatctaaaatgaatataactaatctagctaatttagaatttggtctcaatgaattagttaacaatagtcatcatttcagtgaagtgttcgtcatatgattattatcgttttgaatgtatggagaaaagaaaagcatccccactaatttgtatatatgacaaacgagatagattcaaaatgttacaaaatagagtggaattgaacaaaacaaaaaagggatatagattagagattcagagaaaatagatgcatgcatgtgtatgtacgcaaaattagataatgacaataatataacatgaaagatggagattgacatgaaaggcccatgtggaaagaaaagagtgattcaaggagaagaccaaagctgagcattcttgactttacaaatactctctaacacatctaccggcaatatgttccctttcaccaccaccttcttgctctctagctccactttgtaccatgtcactcctgtttattattataaagaatccatatttagactttcaacagtttcataagcatttcctgtttagaaaatataataaataaatcatacaaaagtaattatttaatgtcagaactctgctatctttgaatttctgttctattgtagtttgcaatgatttcttacaaaactatttcttatttatttttaacaaatgattagaattaagggttagctagattttattttagaaaattaagagttagctagatctattttttctctaatgataaccatttgaaatattcagtaagtatgctaaattatattttttttaaaatctgagttttggtttgattttttcttggttttggttcatcttttatgtttgtggtttcaagaattcagcttcactttttggaattttcccacacagaaaatacggaaccattttggtttaaataatgacattggcgacaaagaaaatatgaaactatacacaattattgaaggggatttatgacttgtaattgtatttccctaaaagaaaagcctaaagaattaaagaagatttggcgttaccgtctaatttagaaatatgcttctcgactttcttcgcacatccgtagcaatgcattgacacctttagctccactatctgcacacatcaccatcaccattccaaactattttatttacaattattttttaataaaagttcgaacttaaactcttgaaataattcatttaaaatcatagatgaaactgaatttgtataactttattctaatcagttttgggagaacaaaaaaaaaacactaacttggaataacaagaaaaacgcacaccactatagcagagaaaaagcccccacacaacttttgaagagctaataaaacatatatttcactgcttccaaaacatttgccttgtgataagcatttctcaaagctcaagaaatcatcatacatattatgctattaaaggatataatgttgttaccttaggcttaagatgaaaggcaagagtctgacgatgatcagcagctacaacatcttttaacctcatgactttcccagatttctctgttgaagaatctatcaatggctctttctcaaactcttcttcttcatctcctagagtgtttagacaaaaacatgaacactgatttgtcggaagaaaaagacaatcccatactctcccaatcttctggagctttcccattggtttgaaaactaattaagggttttaagagagtgtgatattgggatgatgttgggaagactaataaaaaggagaagttgggtgagaaatgagagaatatgtaagagaaatacttgcttgtattacacacttacactgtcttaaagagatggagagagaagcaaggtgtgtgaataagtcaaacattgaaatgatattgtagagaccgatgaatttacaatagttttatttatttatcttcacttcataaactaatatgttaaatctatcattagatctatgttacttttggcatttttcttcctctttaatttagttttagaccagtgtggtgaaccaatattattataactcttgattagtatggcgagtgtaaccactaagttagcttatcttttgtgtaacttttaacattgaacaatggcattgtcatccaatggagaagtatgtgaaataactggttacaagcatacaattatatgttatataatatgatatgacaagtgataaaggaaacaaagaagaagacataggtcacatctcacgttcaacaactctccaacattgacaccaattttcttatgtcattggaaataaaattaaattgaataattcatataattataagagtaaattagtgagagaggcatgtgatgcaagctaagttagtgtgacttgtagataagcatcttctcttttggcttcactctcgccgctccacttctctacattttcttttaaattgttaattttgattatcccatctctttgtctctttatatatgattcgtctaaaaaaatattcaaaactggtcttgttaaatctaaattctatactttaaatctcccatatcatggataagatgaaactgatcatatgatctttcgaccagaaatatagagcaatgataaaaccaaaaaaaaacaaaacatgagtaagcctatgaagaacatgtggtaattggaccgtaagaaggtattatatgctaagtgctttaggttaatcacgtgaaaagacaaatgcataattcttcttctgcatgccaaaacatgctctttcggtttcatgcttaattatcgaagctaccttaattatgttcctacttcatgtgctttttactccacttatttatttattttctactataattctgaatcctcattagctggttacttatatttaatttaagaaaatgcataattagattttataatactatatgtacgaaaatactgaacaaagaaacaccaaaaaaaaaaaaaaaaaactgacaagaaaaggctggaacaagtttaaatcaaactagttatcaacctcacaattggtcatcatttacggaaaaacttgctaagccaaaaaatttgaatccagataaattcataaatctagaatcataatatcatactacagatccttggcgtatataattttctgcgtatactagctatgctattcaacttttctaactatgaaaaattgatataattaattcttaattaatatatcatttcacatattggcattagcaagcaccgcccctctattattggaaggcatggcctcattggttcaactcactttgtttatagttcaatctttcatttcatctttcacacttttcagttgcatacggcaatatggcatgaacccatgagacagccaaaaatcatatatatcaaagttgaccaagtctcttccacaatttgacacatcagcacatgagagcttattacctatatttcataaaataaataatacgtaattagtagttaattcaacataataactaaaataggagaatataattaatcagaacttgaaccatcattctttctacatttttttaactcaatatatcctctttaattttgagatccaaacatgttacacatattcattgcctacgattattatgaaataaactaaatgaatataataaactaaatgaatatgcagattaaatatatctaagctttccgagatttatgttaagaaaacaagtaatttgaaagatgtttgaggagctatccttataactaatacgtaagatataagattatgacaagaacttaactaaactttccaagaacatcaagttgaatatgattagattggatatgcagagacatggttaataaagacatgttatatttttaatgtaagaaataaattttctaaaatttcaccgtcttacaaactaaatatataaccaaaagaacaaggatatataaattaaaaaaaaaactgagaatctaaaacaataataaaaaaacaactcaagcactttcgttttcagatgaactaatatagttggactttttgaaaataattacaaatcatatttatgtttcaaaaccgatgcattcaactttactttatatgaacaacattatataaaacaatttgtaaatagtaatacataaatccgcacgtagtgcgggtactcatctagtaaaaataaaaattgaagtagaaacccatttaacttttcttttttctcatggttaatccttttatataaataaaattttagatgataggagcattatctaattaagggtacatatatgactaaaatttggcctaaccacatcgacttaaatcaccctgacttattccggagtgagccagtccgacaaagaaaacttggtccatcaaagtttcaattgatctccaacaccaaactagggagatcttgatcaacttgctttgctaaatcatactagtagaccacaacatgtttagcctgtaatctggtcgtttgctaaatcgattgccacttttgtttaattcgtttgttatttacaaggtaatgattattctcatatttctacatgtccaagcatttaaacatggttgatgaagaagcctcgttaatatggaaagctcatccactaaacacaaagtacttatgagaaaaaaacaaatctgtatcaataatagatatcataatttattattttcgaataataatttgtttaagcatgatcggaaacacaagataatggagagaaagctggagccacataaacatagctgcgtcgatgattattaagttcagaaaaaaaaacgaaatcaaacatacggacattttagttaacagaagtaaaacacataaaaatgttctgtgttgcgcatatgggaatgacgcctacacaatgtcggatgtccaaatccagggaccaaagactatgtaacataagtgtatatgtaattatgtatggtttggaaaaaaaattactctgctttttatatttggatcgaaattaaaattaattatacgacgtggggtcgtattgtaaatattctgaaaaatacattaaattgtcgaattgaaatgtcactacttaagtataataatcactgcatatggaccatatctaacactatagctgagtgactacactcactttcgtctttacggctatctaatgtttcttgcttgtgttatgtctcttctctttacttttagtttactgctctcacagaaaaatctaaggtataagacttgactacgtaggactaaggacttaccacacttaacggtaggtccactaaagatacaagtagatgaaccaaattatagaagacatcgaatgtacatttccaaacaattttctacctttcgtactaattttaaacagagtcgtacattctactacattttgtcttcattaacaaaactcacacctgtatttgggcttaattttacttaatggcccaaatagccttctttgacttttgttttggaaaacttaaacaatctagggttttaaagctcgatgtgtacttctattcaccagaaagctgttaactaggtgccattttatccttgttgtgttgttgcaatatcaacttatcgatggttatagtcttatgtacacttatctatccgttcctttgttttattcataattttttttttttcccctttgagataatcttaagattggtgttgttttgaaaaaagtatttacattgggaccatcataacttataagtcttgttaagagtgaaaattggtttctacttaggtgtgttttggaggattgagacatcgttcaaagtgaggatccacgttacccctttttgtttgtatactttttatagaatctttgttcatgatgacgaaagagtctttggacttgtttttataaattgaatttgcatgctttgtattggctatgatttacattttgacattagcatgtgtaattttatgtagagccatcctatggataaggtctatatttgtcataataaaaacccttaaaggtcatataataactatttttgtatctaccttcctagaacaatctaaaaagatttgaattccccaatctaatagtctaatactattttccctagaaaaaaaaaataaaaaaaaaaaatactattttcccaccaaacccatgagagcatgtttgctttgctaccgcaacttccatcttggtcgtaggtgaaaaacgtggtttagttctatcccaaggtgaaaagagatccaaaacgacaaagttctttgtcgtttcccaatctctctttacctatcaagtcccagttggcgtttgtcttctgctctttagtatgagaggagccaccaacatccaaactataaacacatttcatcaaaaaaacattacaaaactgtttcacagtctcgaaattttaaggatgaagcattcaaaaatgttgtcatgacttactgtatacgcaaaccgcaagccactcgttcacaacccttacccaagtacttgtccatcccacgtcaatcgtccacctgaacgcaaaataacaaagaaaaattgtatgagttaaaaatctcaagcttcaaaatgagactacaaaagtctcacaaaagctagctcacaaaagattgttgaaaaaaatattactttttcatgggatgatgagtgttccaaccgatgagtagcatagcgaagtacattgctcctgtggcaaacacaaaatgaaagaatccatagccatatggaacatcatcttcagcttcttcttcttgatcgttctcatctttcttaaattggaaacattgggagtctattcctgtcgaaaatgtcgcgataaccatcgcaagtagcgcaaccacaaagctctgcacaatgttattcaaaatcagcatattacttttgcataaaacagaagcaaaggaatgttgagaggttaagagagtttacaatgatggtaagccagtctgttctgtttgaagctgctgcttttctattacaactttcgcccactggttcactgcaccaaatattattggagatgaatcaatttacaattataagtcttcatcataaaagaaaacattatagctccacattcactactaagttcaagcttcttatgagcatatatatataaatcttaggagatgcagaaaataacaaatacatttaggatgttcataaatataatgagatgtatcagaatttccttagaaattatatcaaacttttttgggaatttttttatactttttcaaaagctgaaacaatgagatttactataagccaaagataaatctctacaaaaacactagaaaataactagattatgttaataggaacctaaatatttcaattcggttcctaatttcctaggatccttaaaccaagaaacccgacccaaaaccgacttggaacacataattctagaaccctaaaaaagaaacccatagaccagtcatcactcttccccttcgcttggagctttctcgctaacggaagcttaactctccgttgctgctggtttttgaggagatggaggaattgggtttgaggttggtagctgtgtctgcgtttccttgaacctgaaaatgtcgttaacgacacagaagccattgtcttgttgaaccagaagaaacgtttgtgtaaacttgtacctcacgttatctttcttcctagtcaagtaaccattgacaaagacaataacacgaccgttccccataggatatggaataccaagtgaagtctcgatctcagccgtgtaatcttcgtatctcatagccagaaactcatctttcacttctttctttgtccagaaagctttcttgacatgggttgcaggatcacgccggttaaacagacagggttcattgtagaagatatgaagatagtgaggttcttcgttaagaatgtaatagtattgcttcacaaaggtcttgctaacaatctctgcagtagtgttgttctctgacatatctccagggacagagagatttgacgatggaagctttgaaaacagaagtggaagataatgaatggttcttggcctatcttctccaccatatatatagtggctaaagactcccaaaaccaactatatttcctaatcctacttgactagttctactactaactcctaattcctaaaccatactaactttagagaagttacctaaaccacaaaataaatttaaaaatctctgtagagaataacttcaaaaaaataatcaaatccccaagtcaaaacttaggaaaaaagagaaataaatgaaacaatgttttatttatttgattttcaaactttttaaccaagtgaaattttttaatttgaacaactaaccggctcggtcaaccaaactatcagtttgtaggttaattctgtttttatctgatttaaccgggtcaaataatttagatttttaagatctaaccggaccggattatcggttttgaactttttaagacattgaaaaaaaaaacagagatcaagattgaaaggaaacataaacataccttcgaatggcacaccagcatataaacacaacatagagtcccataagagctggagtcaagtatccagcattaacctgttggtgttggcaaaagcacaaacaaaccttaataacctcaaacatccaaaacacacatgacatgaagtcatgaacatgaatagtaatggaaacaataaagacttactttaggatggagagcgatgcttgtcatgagttggatgaggaacaaagtccatgttataaagaatatattgagaagacatgaagaatcaggcgcgtaccaaatgtacatcaaaatcactcctactatgcaaactgtgtatgaagtagttgatagtaacatcacatagacacggctacaaaacagaatagagtattgcttacttagtataaactgaaataaaaactaaaaatatattatgattcgaatttgaaagaatctaaccatctttctgcatctttttgggactgatagcattcgttgagccattgaatgaaactgatcacactaattagctgtattaagagaaataccctatagagaaaaaaacaacaatataagatttgggatttttcacatcatatatacattgtgaagttggactagtcaatcaaagtcttaccctgcaccaaaatgggcaatctctcctgcaaaatcaaaccaaagaaaaaagacgtatggttaaagcaggccacatgattattagaggaagactactttcatggaagactaaccgtaaaggtgaataatggaagaaggaagcaagaagggaatgatggttaaggcaggccacatgatgagcttaacaaaccaccatccagaatgccatctatctcttgatgaatgcgttttcgacgtaccaagtgttgaaagaaacataacaaagtagaacaactgaggatataacggttaagctcaaaacattttctgatttagtgactcaaaaaatcatataaagttgtaataacaactgaatcaagaaaggatacaaaacatcccaagctaactcttaagacaccgtcggtccccaaacagttttcgccacctttacagttcttgaatcctgcaatatgatcaaacttataagacaacgaattacttagttatacttaaaacatgattctaatggcacatacttgtcacttttcttaaggcaccccgaccataatcacgagcagcccaagctagtagattcgcaatgaggaatatcagaccgtatacatatctagccatccagggattgcagccgttgcggaactgattaaaccatgatccattcttgattgcttcatagctatcgtttctgatgctttggttgttgttgctaacgcttgtaccggtctccattactccttaaagttaccaagactctctcctcttcatgtcattagaagatcaagaaattcaagaaacagatcactcattccatgggaggattttgcatcagaaatcagtttcttagatgaaagaatcgtcaataacgaaaaacgcaaaacaggagcaacaaattcctgtccctgtccctgtcagagatttctcgtccttcagatcaaaacctgtggaaataaacaatgagaattcaaaaaatgaaaaacagagtcggcaagaacagaacaagaagacaaaagaatgaagcaaaggataagaatctgattccgttatcaaaacaaagagaagagcacatacaaatcaattcagaaacggtggagattacaattggtagattttgaagtgaacaaaattcatgttttacatgagaaacatctttagtctattctcaaaaaaccacacagaatccgtttctcaacagaaagcatctcgtttcgtttctgtttcagccgaacataaacagagaatacgtatagtgcaagtaacctttatcttctttttaacctaaactaaaaaagcaaatctttataagtgtcaacgagaatccacaatagatggctcattttaatccaagatttgcaactttaaaccttaaccatatgaatgataaagactaaaagacaaaaacataccaaacttaaaaagcaagacagtcaagattcttaagaattaaaactctcaaagtcaagatttggcaggaactactcataaatactaatccaaaaaagcaagagcctttttgtgttgtaactataattaccctaatgataatggagaggcgtggataaacaaagaagcacccaaaaaaactttatttgacaaggaaacaaaaggttaagagatcaaaagagaaaacgaacaaaaaaagagtcagatcatataaagataaaagagtttatgcaatttgtcacaaaatttggaattgaaaaagaaacgtgttggtacggatacaattgggcagacgaatcttacgaatatgaatgggtaatgttaagcagcaacattagatgcgcttttctagggttttattggtccacttaatagagtggagacacatacctccacttagacgaattgaagagagtgggataatggaaagactatattcacaaaagatcttataaagaaaacgtcatctacaatattgacattaacatatacattataaatattcaaatttcttttatctctaaagtatcttcaatattttcttatattgagtttcatactttatttactttccataatagtctaatcttgaacttccaaggcccaagaacagaaaaaaaaaaaaaaaaaaaaaaaaaaaaaaaaaaaaaacttgaccataaacccgtaggctagaacatatcacatatggcaagtaagggctatagttttagtctttagaggttagaaaattatggatttcgtgggttagagtaaccaaccatcacaaacggcgatgcaaacggatcagatccgtgcgtataatagtaattcagccgcatacataatgtttaaattacataaattaatgtgagttttttaaatctagatttttatgatttttaatatttagttggtaaataatttttatttgtattaaatataatccactgaatttatattttaatatgtatgaaacaaggtttaaaatgtttttttttgtctttcagaaaagagttaacaagagaaaatcaatagctcgctttaaaacctttccataaaatttagggatataggaagtaaaactgtgtagatctagtgatcattctcacgttccacgttcgtatatatagactaataattatgatttgggagtaatgagttcatggccttgccattatgaattacaaatatacaaatatgaaaaatagagagaataatggtaaatttgaccctaagatagaggtagcatgtgaagatgtgaagtattggaatttgtagcctaggtagtagatcagaatgtttagattctcagaaataagaattggtctatcgtatcatatctcataacgctctaaactaaagtaatgagtatatagtattatttaacacactataggtaggccatgatgtatatggacctcttcaaatctttcgtgccaaaaagacaactcttgataccaaaaacttactttgacgattaaaatcgtttttatttacctaaattggataacaaaccggaaataaccgacacctaaaccaatcttgcacaactagatgactagtaaaccataataccaaagagtcatgcatacattggttgttgttgtttttttaattgttttctaaattgagtgtgttttcattgactccacacaatcaaatggacagccaatagacgttgaaatttttgtatgtgtgtgttctcttttgactcagtgaagagaaaattagttgagtttagccgcagaaattgagttagattgcaaaagaaggaaaaacaaacgtaaagcgatactaaattgtttaaattacatatgttttaaaagaaacaatactaaatgactaacgcaaaaccttagtttcttaacaacttaactttgacaaaaaaagggtcaaaaacaaaacgtaaaacaattgtaaattatgtttttaaaggaaacaacactaaattttgactaactcaaaacgataacttcctagcgactctttaaactttgacaaaaaggtcaaaatctgtcaatagctaagctcctcatgtgttttttcgtcatacacatttataactaaacatgaattatgaaatcaataattatgttgatttttcacggctaatcttgttggcaaagtgagataattagcagaaagaaaagaggctgaaaaagaaaaaagtgatgaactaagggtcccatgatgttccacaactttggaaaatgttaaaactaaaattttgacaagtggctccgaccaatattccggtggtcttcccggcgacgggaagaacaagcaaaaatattacatcactaatttttcacccggagctaagtttcgttttcccgagatacattcataattcataactagcacacgcaacacgaacatgttttaaaatctcagagatcgtaaaaaaaagacaagaacaaataagagaaaagaaagagaaagaacctgtgatttttcgtgtcttgaatatatgaagcgagattggatctagagatgtagagaatgttgagtgttgttacctccacaagcttcttctaaatgtgaaaccaaagaagaagaagaagaagataagaaggacaaaaaaaaatctgagagaaatgtgaaaacgaaaaaagaatcggtttcaggttttatgatcagagcttttgcttttagaaaacagttgtttatatacttatatatacaaaatctagagataacatataaagcttagttttttgtgaatatctttttttctatgtaagttatattttatttctcctgctgttagcttcctatttccgctacatcccctcgtattattctttaataagaaaaataaaaaaatctacaattctctttttataaccacaatatttgataatttatcaaacaaagtaattcataattttaaaataatataatatttcttattttgactagaaaaaaatactaaatataatcatgacaactatattgccaatatacaagaaagaaattaaggaaaatattattacaaatacacacacctctgtttttatggataaacatgccaattagactttaatagttatggtattaaattttttactaggcaattaatttaccacaaatcactaattttagtgctgactttaaatttgtacttaatgattatattataagtgaacgtgcttgttcttatgatcatttattgtcttatatctagatgtattttttcttaattattactcccaatctcccaccgtttataaaaacaaatgactataggatttataatccactaagatcgaaacccacgctatgatgtggatatttgttttacaaaatttacagatatcagaaagaacatatatttaaattgcagttataaatctcaaagaaatgaaaatattacctgtcgattcaaacattttaaccttagaagcataacaatctaaaaatcaagtatatgtttcctactctaaaatcaaaaatacaaaagagtgagtgagtaaccgtctcaaacgtcaaaaacaaattgtgccttgcataaatgagaagttcaaaacaatagaatagaattagtgacgctttgtaatcaaacgctcattacattaatcaagtaagacaaacaacaataactacaaaagccaatggtgcatatgagtttgtttccttcgttgggtcaaacagttgtatgtatacacaatgaaaccatcttttgctttttggttataatcatcacaacccatttgctaattttttcctcaaatctttcctcaaacattttcaaatatgatggagctttaagaattgacaaatgaaaaacactttgtatgtaaaaaacctctgatcaacataactttaaatcaatgaccataactactaatcaagttttattttttgcatcattcaccataagtttacaaatttatattcatacactaactaaataatatatttctttaatatatacacaattttttgctcactgaacaatacatgaactatcatattctattaaaaacaaaaacaaaaaacattaacaagaaaaaccaaatagtatagacatcctctctaatactcacaaatcctaaaattttgacattcgtagcacaaaatttttattgttatgaacaagcaacaaaaaagttttagataactcgatattgctctcctctttcacaatcattcctaatcatttatacggaattgtaaatagcaaacccataaattaatggtttggtagagaaccattagattagttttagcaaaaaaatgatctaaacattgatgtgaaaaatgttgataacaatattggatttacaaaaaaaatattagtttggtgattataacttctcaccattttgccgcgttaatttgattagtataaataaaataattacatgaaaattagtatattgattaaaggtacatacttacatgatatattattttccacaaataagaaatacatatatattattttgcatatttattaaatttcagttatcacatagaaaccagaataatccatcgcagtagcttcgaggcacgatatatttctcatctttgttttcattgcaaagttttgtgcaagcagtctcacataatggaagagttgccttttgagaaactttcatgcattgattcgggatacagtgtttaacacacacttccatcgtactcgcgtatgttgaaacaatcatcgtaaataaaactacaatcatcaaaacactgtatatcttttttgttgtttgagttgccattatttgaaaagatgcgtttctgagtgttcaaacttattaaattttgcttaggttatatagcaatacaaaattgtaaaggatgaatattgttgagttgggtgtctatagttatttactttatatagcaaaaaatagttttgacctcttgaaattatttattttggaagtatatccgtttgtttttttggttgataggttagtttttttgtttatgttattggttgtccaaacaatttatcgttccaattttttgttgtcaagaaacctataaatatattattctcgttccaaatttttgttatttacaaatatatctttcttgagattcgataattagtttctaaagaatcgattatattgttaatgtttctgattgacggtttggttcataattttttttttaaaccatacttaatttattttatttttcatgacttcagtttttttttactattatatgacttcagttactattatatgatttttcagctgatgaaattataggccttgattagtgaacaatagctagaagagcaatagaaataagaacaaaatgaacatgaaagaaatgaattataaaaaatgaaagaaactaatttaaaatttttgaaaatgaagttgaagatatggaattcgaacaaataaccaagataatcaaacttttatataattgtcgacttttaacatatgtatcatgaacataatgctatcatgtattccaatgaccctgatattgatgccttaacgaattagaaacgctcgggactcgtactttcttgacaaatgaagctgagaaacgtgaacgttctcagttggcatcttataagcatctattaattatcacttcaaaagaaaaattagctagtaacacacttggtaaatcattgtttcttacatcgagcttttggttggaaaggacactggaattagcgcaccctgatcgaaacttaattacaatataacaaaaccaataacattatatacatttgaactggatatgtgagggtaaaaccaataacatttaataatctgaaaaatactcaaaataatagcgaagccttctaagaaacacgttggaaattcatctactccaaagcgaagaatgcaaggaaaaacgcataaacgaacaaacaagagaaaaggcaaaagactacgcaatttcatgagttaagtttttgtctcagatgtggagaaatgtttagtctttatcaatatgagaaactgaaacacaaggaaattttattaacatatgaatatcgacgatctcaactaataatgtatacgaagttattaattcttgtattgcagaaactaactaatccaccaatcaactatcaaaattttatggtattgataaaacaaaagtatataatatattttcttagcaaaaaaaaaaagtatataatatatagacatcatgaagcattgagattgagaataacgtatccaagtggaatgcatatctttgagtttattccattccatattatttttatcttgttaaataacgtgaggttattgttaagtggatgtttaaagtgacaaagattaacagaaatatcattcaaaatttagaggataattaacaaagctacattataaacttaattaataaaatttttattaaaccacgtcattgatttgtaaataaaaacgtcataagagtttcatcccaaaaaaaacagctcacattgtcctaaaataaaactattaataccttttttaatcattaatggatattcatctaccatactagagacaaactaatgaacttcacaggtggatgtcaacgaatcaaagtttcaaaagttataaaaaagatgtccatataaattgattaaaaaaaaaaaatagaactcgaaaatatgaaatctcaaggaccggacacgacaggttaatggtgtagtttgtgggtgcttttttttctaccacacttaagaagatggatcattatgcatcatccacttgttcttcgtttttcttgttattttatcaattaatttattttgtcttcttttttattttgaatatttagaatttattttcacaagttttttcttctacgccagtagctttttattttagattcactaaaattgcgtaatgcaaaagatataagtttcagcatgcattggcgtccacgtgagtccttctcaagtctcaatgacaaggttcttcttgaacggtccatactaaacacataaattcattgattaaagaagaatatattcttattcaagtatggatggattatggatatcgtggatgaccctcacaattttcaaatttttacccaaccaagtatcttttttttttttgtgaacattatatattctgttgtagtcacatcgaatcttcatctactggtggagaaatatcataattttgttttctttaatagagagataaaccttttgtggagtttgtgcacatgtgaagagtgaagcaaaagcaaaaatggatacggatccggattcttaagctgcttaatattggagaatttaatggcttaattcatcgtttatcaacaagaaaaacaattgaaaaccctacaagtgaatagtgatggaaaaaggttatgatggtgagtttgtatagaagcactatttggtgggggaaacttgggaatcaaaaactcaaagagggattacgtacataatagtcaaaaagcaacaaagattcgcgtgcttcctatatgtgtttatgtctcagtttaactttttgcctttattcaccccagccatgagtttgagtataccacttctcatgcgattcataagaactgcattataccatatactactttggcacttttggtctatgtagtggagaatagatcaagtttctttgaagaatgaaattctgatagaattcatataatcttttttttgtcggcccaatatgttttataaagcccaaatgggaaaatattcagagttcatataatataagatcagtaattcactgcttcattccaagccaatttattgaaatacacacttgattttgggtctatgttgattatgggcatatggtccagttataagcataattgagcaaatctaaattgggcctaatttgatcaaatgtctagactttctttgggaatagaaggtctagtgaattctttgggataaatgtttggatactaatatgttgttggaagtgttatgcatgcaatgattggctctatgccagagcttacatatgcagtgagaatggttagtctttttatgataaaatcattaagtgatcactcagaagaagtaaattggctgttaaagtacattaaaaccaataaaccatcaacggggtcgaatagaagatatttctctacaggccagacaacaatgtgtcacttctatacattaaaataagttgaaagttaaatcggttacatatagacatgccattcttactttagtgttcgcgtgacatactatattgattttcttcatactttcccaaatcattcttaagtacatttatacattaatttatgcccataactaagtaccaagcacatggggtaagcacttaaacctaatttctccaactttttaatcactttacaagaatgtaggattcgcaattattcataactgttcaagtttatattactgcttttagtaggaaccgtttgaaagaccaaaaaaaaaaaactaagaaacttgagttatcgtcgttaccaacaaatcaaccaagcatttacgagaatcagagaataaagaaaatataagtgtgaaatttctcatttaagataatagactgctttttcgacatcattgaaatcctaagtcgtttttcgccaattctggagaaacgtcattgaaccatcatcatccaagatttggattaggagttgaagtctgagcagtgatcaactatgaacagtttttttttgggtataattctcgttacgttaagtttaacttttgagtctgttttcaatttttcttcaagattaggtggatgatctatttttgttcaattaaccatttgcaaaataggttcagaagaacttatttcacatgtcggaaaacatatatagtagaaatgtaaaactctaatttgcctagttgagttccattaaaaagttggaagtgataggagaggtgaggtaattcatatgggaaacaagaaaaacagtaggaacttgtcagccccacccgtgaagtaaccatcatctttttgtcggtccactttctatggtgaaaatatttatccttccttgttaaaattcatgcacttaaatctatatttttttctaagtgtgaaaaataatacgagttgcatacgatgaaaattataagaactaatttgagtataacaagtttttttgaagaagaaagtagtcatatattatctaaatttgaataattttggaatatattagaaaatggttttaaataaatataaacttgtaattgggtgcattattagaaaatcttaacgtttagaaatagcaaacgagtataggataaagttacattttaaaactgaaatataccaaaatagaagatttaataatagtcacattttcaatgaaaaaaaaactaacatattcatcaatatgatatgttcctattttcattgtataaatgagtgacatgttcatcaaatatatgtttttcacataagacacctatattatatatatatatatatatatatataatctatcaacttgttattcagactgattttgattcggacaaaagattgttctcctgtcaatacggcttagaattttccagcaaaagaaaaatgttggaacaaatccggttcgaccggtaatttaggctaatccggatatttcgatctatactataatgggtcgctcttctcacccaaaagagaaagttgtgtgacacaaaaaactgaaattacagtatacatatataaatctccaaatgaaaaatcaatgtaactagaaaagccaatactattaaaacaagaacaggaaatgacgcatgaaatcgttgaattgacgaatacatatatttctcttttgtcggcagcaattctactgtatctcttcttcttttcttcttcatcttaaatatcgcaatttcagttttcaaggcaacaaaaaggttaatacaaaaaaagagaaaatggtaaaatgaggggagacccacaaattaaggattgttcaattacattattaatttcaagtacaataagtcaatagcacttttctgaaaaatctttgcgctaatcaaggctcttattcctcacttcttctgttattagtatatagtctaggagctaatcatggatgcaacatgttaaaacaatgttacctagtgtaagtttttaaaaaacagttagttgtactcagtcacttttctgttattttaattgaatttttaattgaatttttaattgaatccaaataggtctatttccttcccacgtgaagcccaccattattaactcaatataaaatatagtcgatcaaatctctttattaaagttgaggaatatgcattatttgaacacatatgtatctttcttcttcttcttcgcgctattgacaaattatgaatgttattattgtttatgtctcaaatcggttcgatagcaaacaaggaacaaaataaaaatgtaacagcctaaagatctttctaatagatcaaacacaaactcaaaagagaaaaatgtggtcgagttttcactacgaaattaggaactcaaatagaacacaaaaataaaaataaaattaatcgaaaaaaagacacaaatgaagaaaaacattaagagcagaagatgttgctccgattttatcatcatcctctatacaaacatttcctggaaaccctaataatctctctcttttttctctcttattttcatttgaataaatcatctagacaatcttgatcacgcttaaatctttttgatctctgtaaataatctatggacgaagtctggtttctgaattttcaatctttcttaagtaatggaaacgacatcgtttttgatatttgggggtttacctctgaaagaatcaatagaagggtggtggtgggggagatgcataggatactccgatcaccggcggtaatggcccttcaaattcaggtgatggtggtggaggagaactgtgatggactggcggtggaggaggagaactgtaatggattgatggtggcggtggaggagagtatacagggggtgacggtggaggagagaagacaggaggtgacggcggaggagagtaaacaggtggaggtaacggaggcgatggcggaggaggcggcggtaatgctacaataggtggagacggtttaacaacagaacgaccacaaccaaaagatccacaatccaccgaaggccgtgacaagaaagctgaacattgccgtgaagatctctgagcaggtcttccgggcaaacaatttctccgatcatcaaactcagacaacctcaaacacacaggagcttcaccagtaaagaaattataactataagtgaaattctcaagcttaggaagctgacaaatactcgccggaatcttcccagataacaaattatgagcaacattcaactgctcaacctccaccataccaccaacactctccggcaacggaccaacaagctcattaaaactaacatcaaacaccgtcacattcttcaaccttccgatatccgccggtaaacaagaattcaaaccattgttcatgaaaataatctcattaagattcttcatctccaccaaactcgtcggaatacaaccatggaaatgattattcgcaagaacaataaccgaaaccggagaatcaccgaaattttccggtaactcaaaccggaaccggttatggtttataaaaatcgcatctagatttttactaaaaagctctttcggtacggttccttcaaactcattaaaccggagatctaagaacttcaacgacggcaaatgaagaaccaccgtgggaaactttccggcgaaccgattgttactaagatcaagctcgaacaaaagcttaagctgcttgaacttatgaggaacagtaccacagaatcgattcgaattaacatgaaacaaagctagatctgttaacaaaccaagctcttcaggtaaatacccagcgatatcggcgtggttgagatcgattccggcgacggtacggatcttccggttatcaagagctttagaacagaaaactccggtgtagttacagacattggatccgatccaattaacagtgatattattaggatcagagagaatagcttgtttccaagcttgaagagctatgtaagcactacgaagccgcggattctcgaagattagtgatggatctactgtgacattctcaccacggtcaccgaactcgtcgcggtagtagagaagttgacggcgttggatgaatctgacttcggtgtcggagagaggagcattggatgagattgagagagaatgagagatttcaaagaagaagaagaagaagaggagaaggagaaggagagattgagtggtgttgttcttcatttcacgatacgatacatctgcgtgaggagtggtagaggtttgaaaattcgaaggaggaagaagggtaaaatgggaaatgagaaagttgggagaggatttttgagttttgtgagggagagagagagagtgagtgtggggatttaaatgaaagagagaagacagctcaaacacagctcaggcctacacttacttattcgttttttttttttttttttgggtgtaattattgataaatgttttattatgaaaataaaataaagatataaaaattcgattttttggtgtttgcttttggaatggagcgtcttcgtagtttggaaagtatgcgttatacatttgtttttattttaattttgggtcaatcttaagctgctcagttttttattttataatatttgtttcttcaccaaatcaaatattatatgagcccattgtgagatatatatcaactttagaagttaagttgtggtaccattttttcatcaattatttgtaggtcactatccttttaaacagaagatttgattccattgaagctaaaaataaaggtttacgacttacatgctagtaaattggttgtttaaaagttcgagattatgttagaagtgttaaaaagaaaagtatatccttctaagtgttacataagatcaaaatatttagagagtgacattagagttagattcaaaatgagatagaagtacctccatttatgtttactaagcatctgaattcttcgagaacaaattttctaaggagggtgaaactatcatattcaacaagataaaacaaaataataatgctgaaatttaataatttttgtcatactttagaaaaactataaatatataaaggctagagggtcttattattgataatcaaatcatatttatagttttttcggaccatgtattgggttttggtattttagattttcatttaaacggttttcgtctactaattttataatcaattttagggagcgaaatccaatataatgatatgttaacgttgctctaatttggaaaatcaaatattcgagctaggtaaaattgattgagtataggcggttaatcaacaagaatcaatcaatcattttgggtgcatggttaaaagttatggcatatgcaaaatgaaaatataatctatgacattctgattctgcaatacatatactgtatattgtcaaaatgagaagttctatgttgaagaggaatatacaaacaacactcttcttttttgttaattgtagacacaacacattatgccttttaaattccacattgttttgaaatgtatgtatcaaataaaaaggaatgtgatttatttatgtggagattataaatgtatagtcccaaaagaagatagagtcttgattatgggctaaagatgtctttaccaaaaagtattaaattattgtgcatagtttttggcttttctttatttgtttctcgtgttaatcagtggttctcattgtccaccactagctctttccttttagttcatattgcttcctatatatggtcaaaggtataataattcgacgctaataaagaagaaacaaattgccagcttttgaacctcttttattcttgtgtatatgagaaaaaatccatatcaacaaattccacggaaatagacataatgtcaatactaaaattaattatcattaatttgtgtttggtgtatcttacttctttctttttattaattaacaactcataacaaaagaagcagttaaatgataaaattatgcaaaaataaaataaaatgtagaggtggttaagggaagagtcggtggttcttgatcgtatcggttgtgatcgtgaagctatttacactttaatttaatgtcatttggctgttgccggtaaaaatttagtgaattcaagagtttttatttttaggtttccaacatttaattttctctatcacgggtttatttattagagctttgttctagaaattattattgtttttattcagaagatgtcgattacttctccgtcaaagtatggctgctttggacgtatgtgcattcacaagataatttgacaaggattagctagggataacaacaattagaaaactattgtgcaaatggttatttgttatttagaatacataaatatattataaggttgttgtggtgtctagtcacttagatttaggttaataataactatgatattattggtagctagtggataatttgtttaaatcattttcataaaattccctgcatttggcattacaaaaacctaaaacattataaaaaaaaattggcatatcattgatggctacggtatacctaagtgccgagaatccatgcacattgctagattaattgtttgtgcgaacgaaatgttgtatgtaatatatgtttaaaaaaattaatacgataagagagtctagttaagaaaaaaaaattcttatgagatgcaaaatgctattgtaacgttttacttcgactgaattcagatacatgttacgaatttgcgggacggatatattagctacttgtcgatcttttgcaagaatcacatggttcataaatttgatgcgccgctaaagctcgatcctagactatgctatcaaaataaacatattcgactgattacggtgatgattgttcatgtactgttttgggaatatatgtgtgatgtctctgattatctaccagcttttcattaggtggtgagatgcgcaagctcgcaatctttcgaaacatattgatgccaacgatctttagtaaacattttgtgagttcaacatccacgtataataacctgaatgattaatgcctattagcctagttttaccctaataataatatctactttctaatgtatattactaaacatttatcaaattctatagcactagcattatcatttcacgggcagaaactttggcaaggagcagcactaaacaattaagtcagcagatttatgatttcataaaagatatgtagaagtataacactgttttaaaaacccaaaacactattataaaacccatacattttcgaatcttttattcattctacaaacccatacactattataaagcatggatacaaataatttgataaccgactccattaaggtttataataaattataagaatttcgcgacacctaacagcctaactaccaggttttataaaaatcattagaaggaggaccaaacgaatcgctttagtaatcaaaagattagttgtctaattaagtttgcttttggagctttttcttagttattgccgcaatgaagcacaccgtgtggggacgttttgacacatcaggtaatgttctcatagaccagcgggatgttcgaggcttttaggtcgccgacatgtgtcgatttttggatagtcgaatttaatagtatattactttaacgaaacaaatatgtagaaaaataaccatatgctttttacttttgcataatcacttctgttcaaatttacttggtatccatggtacatcatcatgtaaaacattcgttatgaagtttttaaataaagttatgttaatgattcgtgccaaaaggagcacatttcgccaatagccaaaaagaattgtaagaaccgaattacaatagagtatttgaatttgtatttttaagaagtcatatgttttttatgttgaaaaacaatgtgaaggaattgaagtcatctagagtgagtcgagacgtatattaaacattcaaactagtttaagaagtatgtataactcgtcctatacacacaagttttgtatcctgacactttttcttgtgggccaaaaggtcccataaataatgcaaacttcactaattcacgagatcgtgtctccatatgaaggaattatacaagtattcagatcttgttacagtgtaaaatattgaaaaaggtgaaagtgttgcactaaaaatcagccgttgatgattgatgaaggagcttagtatggaggatctagagtgaaccatgcaaacatatacatatttttgattattttattagatttgtacgtattgtatataaatttggaaattatgcataatatgcatagtattcttttccgtggagaaacatatagatttctcacctgagcttatatgaaagtaaccactatttttctcatcacaaatctcgcaacacttcttaatatgctagtaaaactataatgatctaacgattggtactgttttattctttttaaattttaaaccaactgctatttttaatactcaaacattcactttcttaaaaaccaagtgcttctaattactcttaaaacctaaattatacatttgaatctaggttatcacttctcttgttaaatcaacaatgctatgcggttaaattttgtcatgaatttttgatttaaataatagaacgaggtgatcaacattttcatctgttaccggcttcgtctatatgaggaggccaagtgaaagaagttataataactaggtaggtcgcatggtaagtttcccatgaagtcttcaacgtcttttgtccacttgattgtgcgctaaatactgtgtgaacattcattcattatcttaagaacccaaatgcttttaattactatttaaacataatttgtacatttgaatataggttatcgagtttctcttgttgagccaacaatgcaacatctttatttctgccattttcaatttaaagaaaatgaataaaataaaattaagtattttgttattatatgcttagtcttgttaatgtaattataaggaagataatgttccttaatagactagatgtgattcatgagaaccatgcacaagaattcaaaaaccctagaagattcgatggtaaatgacggatcaattagcaaaatattcatgtacatttactataacgctattgtatctctaggattatcgggttcttgtaatggatgatacaccacaaaccttttctatatttgtaatgcattatgattgacaaaaaaatagtgttccttgattttttttcttttttttgtgtgtgcatcaagtgttacttgttaattcattattcatttcattatgtttctcatacactctagccatctctgtttttttcaccaactaatcatacaattttataaatttggcgatttttttaaaaaataaagactctatagtctatttttgataattgtatgtaacattatgtactatgaaaatatcatgcaattgtgaagatgacaaggttgtcatatcttcttatgaggtaagaaattatttcttagagtatatgatcatttgctattagttgtattttctatccttctatagatatgtgaacttcattctctagttgagtatgtatcagagttacttttaccttccagtactaatgaatctggaagctcacacagaataaaagttcttgcgtagagaaatacaaaatcttagtgcttagatgaacatttgaccagtgaggtgaagcagaccactatggttgagatcatctactagcaaccagaccatccaaaatctcttttcttctaaccaagagaccaagtcagtgtcccatcaaatttgttttttaatttttattttggttaaatatcaaatcctttataaccaatttctcttttcttctccatccaataagtcttttctatttggaatctcatgtaaatcaaagtgctttacaactttttggcaaacattttatctttaacactagaccaaaaacttcctcattaattaactaaactatatatattattggcaatagagcatcctgctttcgtaggaatccccttaccaaaaaaatcaccgaagatacttttggactatatatttgtcaaatcaataaataaaaataaataaaagattaagaaataaatgctcaaagcctcaaagtaaagacaaaagacaaaaaattggtgaaagcaacatagttggcattggagtgagcgaacgtaaccactcataacgcgtttgaaagagattgttgtcaaagacttgagaaacttcgtaacggttttat

SEQ ID NO: 1308 - DNA, 65177 bp, Arabidopsis thaliana
acaactgcacttggaatctactgcttcaggttagaattaagattaagatactctttcttcttaccattttattgttttaagtttacaaaatttgacaagattaatctgttttttttcatcaggattactcggaaagaagcttgaagaaacaaaatgtgattgaaatttttatttataagaaaaagcaaatcttaaggtatgctttttaaggttttagctttcttcttccatatctcaagtgtgtttgtttatttggttatttgctctaacatttttttgttatgttgtttcagggagaaaaaaaatgcaaatcccaacacgaatctgaatattttgttacttggaattaaaaatgattgactgatatgcttttggatgtatactcattaatgtttttgttttagtgttttttttcttgttcggttgaaatagggtaattcatgtagaacctttttgtgtaacgtttctaagaaaaaaaaatatgggattgttctagatttttttttttaatttaaacctcgttattgatccaacttttagctttttaagctttattttatgattctcactgctggaaatgcaaaaatgatgaaaatatttattttctcgtgaaaaaaaaaaaaaaaaaaaaatctcgtgtaaacaatatatttgtcctcaaaaacattacacgtattcgatcagtttagaaataccctagccgaatgtaagatgtgtagaaaatataattaaatgtgaaaagcaagatcttgtgctctttaggaatgaataatccaatcatgaaacacaaacaatataattaaattaacaacggaacaaaacaacacaatgattatattttaacatagagatacggagaaaaaaataatcagatttattttctttattttgtaggtaaaaatatgaagaataatttttaaaagagacaaaacataccttagaacattgacatgtctcaaatgatgtctattgttcaagcatgctgcctagggcgtgctgacttttgcattatttcccttcttttcttttggtataataaatctaatgggaagacataacatgaggtcaaatttagacaaataaaaccacaagtgagattaggggaactatttgtggtaagaagttatttgactaaaaaactgttagacaatgacacaatgtattgacaatgatacaacaattccattcggattttctatggttaagtttataaaatatgttcttgtttgatagtactgtatgtcttaaaaatgtaaaacgtatttcattagtattaattttggcatatgagtgtgttttttaaatcagccaacattatattaccgttttttttgcttttttgtgcaaatcattaaattaccgttttatcatgtaattttactgtttgtttagaattgtataattggtaaaaaaaaaacagcaaaagtatactctttcaccgttctatgattaaaataaaaaaataaataattgattttatacaatgttctttaaataagattgctcgttagaacaaaattttggatgagagtttgtaatataaatataacattaaagagtaacgacaatggggttgaacccaaaaaaatgacaatggagtaaatattttacgtagtccaccacgtcacgttaaacattgaaggcatgagtccatgtcccataactctctagagacacattctcaaaactttcacgtttctatttcagctatttttattttcttattacgtttcgtgaattttggagtagcacacgacacatgtatgaacttatgaagtacccaaaatcaacttaaaatagaaaaaaatgatgttcttgggccatatcatgcctcgggttgtatgttatgctttcaatagatgattggtaattaatttcttttgtttacgaaagtcaagcttatatttgttcgttttaattatttttttatatgattatagtatttattgtaacacgtaagtacgtaagagcatccccaatagttaagatgttaaaacatcttaatcttgcatcttagtttttttttaaaattaaaattttgctttttcaaagttaagataagttagagaatatcttaacttatttatgctccaatggttaagaagcaaaaagttattttgggaaaaaatttaaattatttatgttttaatggttttttttttcttccttttgtttatttgtgtacccaataaatatacaacacatgtccactttttaaacttaagaaaatatcttagttaagatataaatcttagctaatcttagctgcttttattaaatttaattagtttattagttaagatatagctaagatatctcttatttgaaccgatggagttgctctaacacaaggattgagcttgatttgactctagtgtttatatatactatatttaaggctatattttcaaatcgaaaaatacattttacaggatatataaccaagaattattattcccgctggatcatatagagataatattacggaaaatgttatataatgaaaacattacattgtaaaactgaaaaggacaaagcatgcacattttaatcattaaacagactatatgataagaagaagaaaaaaatcaaatagatcctacggaactagtcatatcctatctatttctcaaaacccttgatacaacctatttttgttacttgatatctttctaatatttctctttaaattattctaacgaaactaatattagtttggttctaaaatgaaattatatatccggattaagcaatttcgaataataattggattatacaacgagcaaaataaaaagatttagatatgaaatcacatcatttgctggtatatatatatttgtatgtcttatataagaaattgacaagagaataaacacggacttctaaaaagaacaaacggcaaatacatgatttcatttgtcctccacatatatttcctcttgcatttcatttgttgttacttctcttttatttcactgtcgctctcttctttttctttctatttttttttcttctattgtaatattttttcattttgtctatttgtgcaataatgtttttggattcatttagatatgtctggacaatttaaaacattgacgtgcatgttcgtatatatagaatcagccatacaaaatgactagaaccgacttatttatagaaaatgccatcttgtctaaatcatatagctctacctttatcttaaaattaaaacaaaaaatattctttgtagtttagtgattttgtgacctttttaaatattttttcttatttattgataccgtaaattgaattctgaagaatgaatttgataaccacatactacaaaaatttaacacacagttcaaaataatctctttgtaaacatggaaacttagttaattattacaacacaatagactataacttcaactgtaatcataattttctattccaaaacttatactataaacttgagtttgatatttaaaattttgtcctcggctttaccaaattcaaaaaaaaacacaaaaagaaaaaacaaccctaaggtgctttcttgatcataccctttttctttttacttttctttccctaattctttttttttacaaattaattactaaagaatctccacaatctgattttcctaattacttcataatccccacgctaattacctctctcgattctcacaatcaaatgctgattcttcctatcaaattccatatttttaaactttgcccaaatttgaggatatgatgtcaataatcatgtcaataattgacataataaataataacaataataaaatcagttatttttaagaatgaaataaaaattgaaacaaaatttgtggggcaaatgaaaagtggaacaaaaagaaaaagaaaacgtaaagctaaagcaaacaacactcttgaaggttgaagtctatagctaagcttcactacactttctcactctttcaaaaatcctctcatctatcaaaatccgagcaaaaaaaaaagataaagtttgaaagaaaccctagtttaagatccgatcgtcatctccaattctctggatcttcaaaaaacccaaacaaacaaaactatacatacaatcccaaatttcgaaacttttttttctttgcgttgctctgtttcttgattttgttaagcaatgaaagaaagaggaaagagaacagcaatggaacgaagaaacgacgacgtttcgttatattacagtactccgtcggaattcacttgccggaaacatccatctgtttcctccggcgttggtatttgtccgtactgtctcaacgacagattagtcaatctcgtatgctccgaatgcggcgagcagcgactctcttcttgctcgtgttctgatatctctcctactcgaaccgtagatgccgccgtagacgccgccgtcggagaaaacgttgtcaggatctcttctctcatcgacgaagagagggcgaaacagaggaaagagacgaaacagaggaaaacagaggaagtggtagtgttcaagaggagtagtagcagttgtgttgagattaataagaggacgaagaatcatagattctcgagaatcggtaggtttttcaggaagattaatcttaaaaaagagagagattttgagaagaacaataataatgattcatgggttttggattataacaatgatgtgaagaaactaggagtttcgagatcgagatcgctttgtagctttcgaggaaaagatttgtattgtatcggatcagaagaagacggttcttcgtattcgggtgctttctccgccgcgaggagctcaagtgttaatggcggattagggttatgcgaaacagagtattctcggaagagtaacttcgaaggaaggaagagcaacttcagcgagacgacggagcattggaagagtaatttcgaaggaggaaggaagagtaatttcagtgagacgacgacggagaatcggaagagtaatttcagtgaatcggagccgccgagaagaagcggtttcgaggctaggaagagtaatttcagtgaaacagagtatcctactaggaggagtaattttagtgaaacagagtataatactcgaagaggaaacaatccggcgacggcggagaatcatccacggaggagtagtaattacgaagcagcgaggaaaagcgattcggcggcgatgaattttacgagaagggtaatgtcgatgaaagagagtagctacttcaccggaggagaggagcctggtttcattgatcttaagtttgattcttccggtggaggaggaggagatgtaaacgacggcgttttggaacacggaggaggaggatcttgtcggaaagatggaggagagttgcgtaagagtcgaaagagtttcaaaggatggaagtggatatttggacatcatcaacatcaacttcatcatcataacagagattcatgatgaatttatgaattattgaaggaaagtgacaatttttattggatccagtaatgaaacatggagctgatttgtgtgatccgatgtcaatcttagttttttctttcatataattatggtttatcattttgttttttgaataaatatatatatatatatatatatatatttagccaaattttgacgattttcggtttgtttctactcggtttcttagaagttttacgattttcggtttgttttcattcggtttcttagatctatagttttaaacatatagttttcatagccaaaataataccgatatagtatagattaatttgatatagttatcggctttcgattggattcaataatttttcatttttggctcgattcgagcttagtatcagttcttttgtagaaaaataacactattgttgtatatgtattaaagtttgattgagtttcaccactgaatctaatgttttaatctactttctaatttgcttaatgaattgctaatttagttttgttcataaacttcttgtttcaccaattctttatttgtaccgtcttggttaacaaatgttttacacaatgactatgtaactttacatttcaatagatttagtttcgtcgggaaaaaaagacgatatcaagaataaatatatgtgaatgagcttttgggcctacgggctttctttatctctgcttcaatttgattcactagtggacttgttcaagagttctcatgctacacttaaatatgttgcatgaatctttaacaaaagaaaggttgatacagcagcaaaaaggtgataaaactcttgtatgaaaattgcacatactagtgattaaatcaatttgcatccaaacttacatattttttttttttgtagtcgatccaaactcacatatattgataaaagagccacagttttacgaacttatgttaatggtgtttgtttggcaagcattcttttttttttcctaccgtgatcgtgttttgtaaatcaatttatggctcccgaaaatataatatactctcacttttattaagcccaatatctacaagcaaatgtccaatcaagtaagcccaaaaagtagcatattactcccaatcaagtaagctcaagtttcaataactatggcccgaaagattccaaggatcaaatgaatcaaaaaccataatcaaaaattcttcagtgtcaacaaaacacattggcagcgtcaacgagttactctagtgccaatgtatatatatgtactgttatcataaacatattgcatttttagtttatcccaaaaaaaacattgtttcatttaggtatgagtacaatattaattgttcttgacacggatgttaaaacctaggtgtgcaacttcggttttttgggtccgtctggtttggttagtcgaaacactttttctgtccaacttttttttttattgtctcccacgatttatgtggttctatttttccactagttttttttttctgatttgagcgttggagaaccgtaagaaaacatcttccaatcatatatttctctgctcgtgcgtgtttgttgtgatgtaggagccttgtcttcaatagacaaaccgcacgacaaaaactccccgaaacttatactaataattttgaattttagttagttgcttattaacactcaagtaaatatatatattcgttaaaagtggtatatgatttctatttaaaaagtgcttttatgatatgatataaaagattgttatttgatttctcttactattgatttatatgtatgatcctataaacattttaagcatttccaaaatttcataaggctagagtttattttcttacttaccaatttgtttctatatattttcatcgtggtaataattagggttttgttgttagttgtttttaatctatctcctccatacttaggcatggtccttaaaaaaaatggtcaatgcatatttttgccaaacgtatcattgtgtcatcatatcttcatgttccgattcacatagcctatgcttttatgtttataaaaagatacttggcgtgtacacaatgggcagctttccacaaagagtttttgaattacgtcatatctttataggattcacatctattctatcaattcatacgaactttttcacattttatttcatttgctaatctccaaaaagatttctaatcacatgatcatttaagaaatgtgttttttatttatttaatttgaatcaaaatccattttcttcttccataccctaccaaaagaatatcttgatcgaatggctaatttaatgtagagtgttattcaaggaaaattagccacgattatcgtaatctcaaaattctgttcacacatttatattatctaatatagtagtactctatataacttcatttattatatttgcttctttgattagccttttcccaatgtcttccttatagaagcaaagaacaaaggagttccttcaaacaaaatatcccaaattactaaaatatgttaggatttagtctgttctttaatttcttctattatctttctatttcttacccatctctctctttcaagattccatggaagatcttaacgcatttgcagctgattgcgttgttgtatcatgttgttgcaactgtcttgtgctccagatcgcaatcttcatcttccttggacttcctcaaaagcttgtcaagaacacaagaaagtgttacacaaaatgggggataaatcgaaggataaaaagaatggggctttgttttgaatgtcgagaaaataccgaggttgattcggaatggagaaaagagtctatgatgatgagtatggagatggaaggttttgggtgtattgaagaagttgaacaagtcttagaggagttttcaaagaatggtgagtttttgtttggaagcttctggggacaagagagggttcaaaattcttcgtcaatgtcaaattgtggtaatgacaactttgacctaagatttgtaagtcgttatgagataatcgaagaaaatttctactctttggattatatattcacaacttcacataaattatgttgaaattaatgacataaaagtttccactaggtatttgcttaaattttagaaattcatatttttttttaaacaaatgatatgcttcaagaaaatttcacataatggaaactttcatgctcttttaatatcctcttcagaaaaaattcaatatatcacaatgaattttgagtgccaaatggggttgaaaaaataaattccaaataattactgcacaacattttttataagtttaatgcggaaggtgaagaatgaatggtactttaaattcttatatagtaaataaatgattaagaaaaaccctacttcaactatttttataattgtgggagatattacaacgaaatttagtaggttaactagatttactttattgaattttcacatcaccaaacaatcataaagaattttctcaaataacagcctgtgtaaaataaaacaatacactatgaaataaaagaattggtaacggtccatttgaatattattttatcacatataagctgtgtgatgtgcttcctacccaatttccaatttaatgatttcaccgtcaatcccactttaatttgtctccacatattaatatcttatcaataattgaaacagtaccaatctataaatctatagataatgtaataaaattttgaatttactatttcaactaaaaatattatcaacttcttctccaaaaacgcggtttcttcgagtttaagaaactattcatctccaaactttcaaaaaaaaacctaaaacaaaaaaaatctctttccttcttctttctccatcaatggcgtcaacaaaaccaaccgatcaaatcaaacaactcaaagatatcttcgctcgtttcgacatggacaaggacggaagcttaacgcagctagaactcgccgctcttctgcgttctctcggaatcaaacctcgcagcgatcaaatctctcttctgttgaaccaaatcgaccgtaacggtaacggatccgtagagttcgacgagctggtcgtggcgatattgccggatataaacgaagaggttttgataaatcaagaacagttgatggaggttttccgttcgtttgatcgtgacggaaacggttcaataacggcggcggaacttgctgggtcaatggctaaaatgggacatccgttgacttaccgtgaattaacggaaatgatgacggaagctgattctaacggtgacggtgttattagttttaatgagttttctcatattatggctaaatcggctgctgattttcttggattaaccgcttcttgatctgttttgttttaattactctctttttttcttctcctgtcaatgcaacttgtgcaatttaacaatgtgctaatcttcattaatttatttatgactcgtttggtgtgacgtaaaaatttatacttggtggtaatactaaaataatttaaaatgtcatatcaagattgacttttgacgaaacacctaaattaaaattgaggagtattttgttgcatgaaacacctaaatttaattttggcaaagttaaactagtggttaagtaccttaatattttcaagagtttccactttccaccgtttggtttttgatgtgtgaaaacaaaacttaatttaagagttaagaccagaacattagtcttataaagtactactatatgagctaattcaaatatgactctgaaaattccttgtcaatatgatattacaatctatgacaactctaaaaccagtgcttaacaaagatcagtcgtcagataaaactttttaattacattaatttttgttgttgctaaattacattatatataaattttcaaatggtatatgtgctaaatcatttggatttaaaagataacagcatttaagtgcatgcacttggttgagacagttgcaaattgcaatggtgtagtattgaactatggcaatggtcgaaacagttcaataattgaaatcgttgacaaaaataatactagtaataaaagtgttgatcaaacataataatgatgggaaaatatcttaaataatcatctcatcgaaactcacaggatccttctctttatgtcttttttgtctgaagtttgaaaattccaatatattatctgttgtctcatctttttgtgtggtctaaatacgttggactggacagtggacacatgaaatttatttttctaacaatcgatcaattctaaatatattaatatatatatagaattacataacatgaatcttgcaaaaaaattatgtacaatatattttcgtgtaaataaaattaccgatgccttctctggcaaggaatctcaataaaacaagtcctaatctccacgttagagaaatacgtatatatatttacaaataaacaattctatactctttagacaccgacaagatccttatagatctgatcgtgaaacctagcggagcgccgtacactagctgctcttctcgcggtgtatccgacggtggtgggcctaatcgacctctgcctcaccatctcaacgaactcaggatcattggagtgaccctcgtaccgaatccattgaatcatttgatggtatttagggaaaaacctcatttgcactgacttgtagacgaagtaagggatcaaagcgaagatcatcacaaagagagtcgtgagccagtatgaaggagcaggagctagggcttcgaggaagaccatgtaagcatcggtagagaaacttggggtcatagcgccatagatcatgaggaagatgtaccagaaggctattgatccccagatcacaatgtgttggacccaagtgaagtaacttattgataaagccatttggagattgacaacccacacaacgcaagtgtacattgttccaccgaggatttcccggcctgcggttttgccatctgggtcaaatagctggtgtttaagagattccttgcagaggaagaaaatggcgagagcgcttatgaatccattgaacatccatccgataatccttttccagctgaagagaatgttctgcacaccttcttggtatagcaatggaaactgcaagaaacgatagcgctaagtaactctgtttttaagggaatcctacaaatttaaagaatctcaaaccctaaacctaccttgtaacagaagcgagctgagacgtcttgatcaaagactcctagggcaatgacgggaagagaggagaagaagacgttgaaaagagaaagaaaccagtcgttatatgctggttgtccagagaaggaagtatatgcttcatataagaacaccgtgactccgaaggtgatgttcttgtagaagaagtaacatatctacaaaaggcgaaaccagggtaagaaaaagattgacatgaatgatgaaataagagaattttctgactgaaaagtttcagtctttttaccatggatgcgattctgctgtaacaccaatgaccatggacaagcaataaacgttctagatatcggaattgggcaatggcaatatcactagacattactgcttgcattccttcaacaccgcttattcctacaccaatgtctgcttcttgaagcatacctacatcgtttgctccatcgccaattgctaaagttgttttcccagttccggacttaaccagtcgcgttacctagaaacccgaaaatatcatcaaaacacaagaaactggaaaaaacattaaaaaaatatcatcaagatttaaagaatgtaccaatgctttctgtttaggtgatgatctacagcatatcacagaggcacaactagtggcaagatcaagaaacattttcttgatttcgtcctcgagggcgtaggttagcgatttcccatcgatgatcaaagcaaacgcttcagagctcgcgcctgatgcagcgagtaaggcctttccttcttgtagttgcatcacaacgctttctcttgatgccaattcgatttcgtctttgcctccagatttctctagagatttgatctgaggtgtctcaagattgatgatgatctgcttcatctcttgtcttagtaaactagatgcaaatctgcaagagaagattttgatgttagtagccaaaacaacacacacaagaacaagaacattactgtttccagattcagtacccaatattgatagctgtttccattttgtctccagttagaacccaaatcttaatcccagcttgagcaagtttgtcaatacattccgggacctgaaacaccgatcaatcgacaaaccgttacttccaaaaaaccttaaactgtgaaaacacttgtagctttatatagtctttcatcaaagtcataccccattctgaagtttgtcttcaacagcagtagcaccaaggagaataagatcacgttccattttatccgtgatttcgtctattaaagcttcacgatcctcgctcacggaagccttagcttcattgaaactcttattgaactctatgtactcattctcatcaacctcacggtatgcaagtactagagtccttagacctgcatctgcatattggtttacatgttcttgggtttttgcctcgaattgacgaccgttctttgcaagtctttcgaacattacactacacagagaacaccaaactcaaagttagattttataatgaaccaaaatgtctaaaaaatgtctaaactcgcttacttatcagctcccttagacaacagcaagagcttcccgtcatcgtctcttacaataacagacattctcttcctagtgctattgaattcaagaacgtttagtaacctataaaccctgcaagaacagaggaggttttgagttccgggaatcacagagactacatctgattgaaaagaaggctaaaaacgaacctttcaactttctctcccgatacaagatccagttcacgaaaagagatcccattttgtgtccggttaaagaactcgaacccgaactctcgggctgcaacaacaaacgcagcttcatccggagactcagcttcataagagacattcccggactcttcatcggtctcaggtattgccgtgtgacacacagcaagcaatctgaaaaacttctgcaacacggcagcctcaggctgcctcacccaattcccattcataaccctttcatcctcaaagttaaaccctttaaccttaggaccagactgatccacaacaacatccaaatcttcattaaccaaaggcgaaccaccgcttctcacagccatagctctttcaacttcagttataccgcgtccataagccttacccgcgatagaacacttgataaactccattgaattgcacgttaaagtccccgttttatcggatagaatcgtatcaaccataccgagttcttcattcaaatttgaagtccgtgcctgcgcgggtttatccgtttcttcatagtacatatgaatgtctctattgatgaaaatgctctgaagaactttaacgatctcaatcgaaacgtaaagcgaaatcgggatgaagtaactatacagcattgtagcagtgaagaagtggtatattgcagccattggagctctttctggatcaaagaagatatctgcatcatctggtttcaaataccatctctctgttcttccgttcttgactttatcctctcttgtttcaactccaaagatgattgatccaacgaatgacattagaaagacaagaccaaacattaagtagatgatcttgtccattgtcctctcgatcctacttctctttgatggtggatcagttgaattctgtatcacctatttacaactcaataaaaaaaacagagtgagaacagaacaaaacagaatgagaacagaacaaaacagagtgtgtacctttgtgtcatgtccggtgaaaacgacagctccgtacacatactctgtgtttctaagcttagaatcacggagaagaatctgttgaatcgacaatggaaatctctcttcttcaagagccaaagttccaacgaacacataaagattcacatttggatcttcacatctaacaacgcctctaaaatctttaaaatcagaatcttgatttaacaatgaagaagttgcttcaagtccttgtttgactttcagattcgtctcaccgtcgagattcatcgtctctacataacaaaccgaatcttcgtagcttgatgacaatagcaaaagatccgccggaaaaaactcgtccttttcaactcttactatgtctcctactcttagattcctccattcttcttgccggaatattccatttccgtcgtgtactttcacttttctgttattcacctcaatatcctgaaaaaaagtttcccaaaatagttttaaaaaacaaattttgattctagggtttaatactttacataaatcttttttgaactaaagattttatttttatttttcaagatcggagaatatttaaagattgagtatttaagatcggacctgttgtttccggcgccaatcttcgataccttctttaaccattgtggcggagatgacgagagcaagaggcaagagagcactaacggctccataaggagagagatcagtcaacgataagattccggtgacaagaaagtaaaagttagcgacacgacggaactgctcgaagagagatttagggaagaaagaagcaacggtgtattttgttgaccggacgtaatttccggcgtagttccgacgttcagctgccggagaacccggttcgttacaataaacgacacgagagaaaccgggtcctcctatattagagtgatcttcttggaaacttgatttaccacaagtgtaggaatagatcttgcttagatgtaatcttcttcttctccgacttggaccagccatagcttttttagtttagttctttgtctgaaaattttgagaaaactcgaaagaaatatttttgggtttttaaatctataaaaatacttggagaacaaacttggttaatgaaataaagaatgttagaaaaatgttgaatcttaagatatgaattaaggaacaaaaatggaagatggagtctttttattttagcttttcaaaaatgtgtgaagctaagaagattatttttttttataaaagagacccaactttgaacaacgactttgaatcttaacacttttttgctcgtttattgactttttgatggatgtttcttttcttttttaatctaaaaatataactttgatcatgagtattgtttgtttcgaaaggtatcaaaaaaatgtacgcgggtttcttatttgccgggggaaataatgcatatggtcgagaataatcaatcgaattttccaaatgacttttacacgtagctgaaatagattgcttctagttctagaataaggtaatttagttggtgataccaaaaaaaaaaaggtaatttaattggtattattttacctatatccttagaattttgtttaattattgcctagaaaaattaaaaactaattgcatggttacatcgattaaatttaaattctaacgaatacgatattttcattctttaacttctttcattcatttctaaaatttcagaacagtaaatctgaatgtaaaagtttgtttttgttgcagtaaagttgttgattacaaaaagaaaatgttttagtcgtggaaaagaattaattcatccaaaaatataaatcatattaaaaacaccttaaccaaaaaaaaaactattaataaaatcattgtgtcaggtcttccatcggtaatgagtaaccaaaacaacgtggaaaggaattaattcattttgataaatcatataataagttaataaccaatcacgattaataaaatcattgtgccaggtctctagagtaattactaattagattttttttttgttctagtttgaaaaaaacaaaactgacgattcttaagttaaaaagaaaaaacaaacaaactgacgattattaagagctggaagaggcgtggatggtagcaatttattgatttgctgattacttatatatttcgtttttcgtttcttttatgagtcatgcatgcatgacatcgaaacttcttagatttttttttttctgtttatatccagaaatttgaactaaaatatagatttacgagaatcaaaagatcttctcattttaaaaataaataatatatactattgatgaaatcataatagaagaatttgaatcttccaattccatgagttatttgaatcttcataataaataatagtttactattgttgaaatcatcaaaaaataataaagttcaacacaaatcgtagtatatatgaagactagtcgaattcaataaatagttgtttgctaagtaacaaaaagtatgtttttaggtttagtcattagtggtttctatagattttatcgacagaagaaccttactaacttaacaaaaactcttatgaaaaataaatttataaaaaaaaattagcgatcactacaagctaataatttcgtcgtaatttaatacctcattttacaaatgggatagcaatagtatatttcgttggaccaatgtttagacccctaagtcattagaatgctaatccaataccaataagtatgaaaccagttcactaaacgttcttcatgtgatatttttcagtcacatgcattgatcacctacttgtattatcatcataatgtctggctgcgcgaccattccaaatttctaacatattcgtgtatctataaatgagttttctaatacagtataatacaaacacattattgctttgactaaaaaatgtgcggcattataattttataatagtggttagaactttttgaaatttaatcatttaatactattagctttgttgaaattaggtttcttggataatgaaaatttcactaacccattcagatgtaactactagtttaaacaatggtgataatggtgatattaagcgattcaataacttaaaattaacagtaatcctacacaccaacttagttgttaacaaaatctaaaaccaaacaattcaatgaaatcagaccatgtcactaaataaatatatattttcttctgtcgattatggcactacttaaatttttatgtatgactttagagaataggaaaaagatcatgtttcgtcgtcatggaattctagaaattaaccctttgcaatataatagggtgtatagttgactttggaagtattcttgacttccttgacacgtgactttataatcatcaatgacgtcatggattcgtagttgtcattaatatcacgataatctgcaatttattcgaataaaaaaagggatcggaatcaaagcttctagatatcataaaagaagaaagttcattcacctgacaaccattaatgaaacaaaatcagtcacacacacatatcttcttttcttccgatagcattcacataggaggtttatgttgttgtaattcagataaaaaaacaagataagctttactgaaacaattataacttttctacgtccgcaagaccataactattgtatggagaatatgtagcaaaacttttgctgcaaaagtgttaaatattgaaacatttaaattcccttttatcattgtagcaaaagctttaaatattagattggaaagcccttttaatttggataataatgtaaaacatcttagagaaataaaactggtgatggtacatcagacccaatatgaagaaaagggggctgctgctccaataattgacagacgaaagcccaataggaaaatccgaaaccataaagaattttaagaccacaacaaagccactcatgttagtaaattaatacgtaccaattcattacgatgtaatgttttgtagtttctccataattatctaaaactggaaaaagaaagacttgggactttcacgtatgaatgcatgggtccttaaatcagatacaataacgagcagtagattcaaacacaaaaattataatttgaaacaatatgggtatatatgtactgatctaatcaaaacttgtaaagtaacggttactccttttataataaatactcctttattggcctgactaatggttagttccactttgattttcaatagtaggttctttttttcaattttaagtaattgcaactatagtagaccggaaacctgcaagaaaaaatgactgatgactatatctaacacttgccttatacattagttaaataaacacacagattaaaaggtgtcacaagttccttagagctaagtaagctaaaaccctataaagaagcaacataacggcaagagccaaaacatcccacatcatattcccgattctcaaattcttaatcccttcgtaatccataacactacaatgcaaccctgacccacattcataaacctcatcccatgtgtattgaaccccaacaagaagcttatagcaataatggctaaacgaaacatacttcaaccacgcgatgaaacccggaatatgttgaatatagtatcctccggctagtaagaacactagcattaacaccgaagacaatgtcgcggctttctttgcgtccatcaagattgctcctagagctaaccctacgccttgagctactagaacattgtagagaacgatcataagggtcatgatgaatgtggttaaagatggcttaagacctcccatccaatatgtgattgtgacaaatatcgttggaagaatgagttccattggtaaatcgccgactgttcttgctatatagtaagaggagagcctgtagattcccgaggatcgctcttttataagcattggtcgttcttgagggaatgtaaaaatggcgttaaagagagggaagaatccccaaaatatcgagaagaagaacaataaacccacctgttatagtgaacaagaggaaacatttaaaccgttaacgtaaacataaaacatgagaaaaatatattttgggtggaaatgtttgtatatatatactttttattttaaaataaattttagttatatatacggtgtttttctgtgatgccaactactcaaataattatttatgtttaggataatcaaaattttaattaataccatggtttattttgttttacctgatcttgtaaatgagcaacgcgagaatgccaccacaagaggcctgaaagtaaagaaactgacatgaccataaatattctgagtcctgaaaatgattcgtgacttctctcttttaaacctcgtttcagtagaactgagaattgcatccaccaactcgttggccatcgatcttcataaatccaaaaacaacgtacgacattatgataattgagatcaacagaaaaattaagtgtcattgttaaatgttatgtaatgacacgaaaagacttacttgttattgccttttttctcaatctagcgttcgtttgatcttgtggaaacgttctagacacttcttctttcaaaggtggatacaaattctttttgtatgacgatattaacgattgtttcactgagttttgttcttcaagccgatctaatcttccattagtttcgatttgatcatattgttttgtatccgaagtaattcctgcaaacatttattcaaaaaaaattttaaaacaacaaaacttgtatgctatatagtcaaaagcaacatataaacacatgatttatcccactattaacataaaccttgtaataaatatacaaagaatgggatagaattgtcgttgtcacatatctcatgatgcacgaccaaacaaaaagaaagagtctaactttacacccgaagttagctgtttcaaaacttttttccctttcaaactaaaaacataaatgaatttcgaataggttctgtacctaccatggaccgggacatgcaacggtttgtactagtggcgtagtcgtgttataactcagtttcatttccgatagtatgcgtgtatgaattgtagacgataactaaaaaagatttaatacttaccgttagcaagatcaagcacgaaatcagccgggttaacgaaactggatccgggttgatacccaatcgaaccaaaatattccatgacccgacccgaatctccactataaataggacacccttccgataaaaccaacactttatcgaacatccgataaagcctactcgacggctgatgaatcgtcgtcaccaccgtccgaccaccacgtgctagcgatctcaaggtggcgactatacgagccgccgtggtagaatcaagccccgacgttggctcatcaagaagcaacaaactcggattcactagcatttcttgtccaatacttacccgtttcctttccccacccgaaattcctcggatcaacccgcctccgataacactgttacaacaccgggtcaacccaagatccgaaaccaccatctccacctgctctagtttctctttccgggtcaactcttttggtaaacggagcaaagccgtgtacgttagcgtctccatgaccgttaagtgtgggtagagaacatcgtcttgtgtaacgaaccccgttttccgtttaactgagcttgtaaacggctctccgttatagctaacggttcctgataacttcccttgtaaacggccggctagcgccgttactagcgttgttttgccactccctgatggaccaagcattgctagtaactcccctggtttgactataccacttacacatttgaggactaaccggttcggttttggttcttgtgaaccgaaccaatagcttcctttcccggtttgtgatttgatactgtacgtcaactcctcaaactgcattatatccacaaattaaagaaaaaaatgagaaaaattactgtacataataatttgagatatatttatagtgtattaatttaacgaccttgaggattataggacgtaaagattgacgtagaacagaagattgtcttgattggtgactcggaccgtcgtggtcgttatcgtcgtcaaggcatgggtttacatgacttggagagctaaaccggttttcttgaaccggactagtttcgtgtcggtttgcgctcggtgttttcggaaagctagattcttgctcattaggaggcatcatctagagaaggaaagagagatagaaaaagagagagacgaagagagagatttggtgtgttgttttgataagttcacatgttatgcgatgtgtatataaaggaaagaagtgggaactctctttataagatatgtcatttaacatccaaaaaaaagaattattgatatcgagaaaaaaactaataccgttttatgaaaaacaagcaaaatacacggtaaacaaaaattcagtttataatatagttacaataaccacaaataatcaatgtcttcattgccctgattacaacaataaaaaatatgtgtccttttgtatatacaaaaagaaatatatgttctccttaaacttatgaatttggagtggtcgtcgcactaccaacccctatacttaaacctgcatttcataagatgaactaaattgataagtgacaagtatttaatacattacataggttgttatgtcctatctgaatttactccccacagtaaaaatatgaatttttttttctaattaaatatttaatttaaacgttgtatacttgtatagctaactattttgtcttgtaaaaaatgtgctatatcagtttatactatccccgttggccgtttatagaacgcatgccaatttcaacatgtaacgtactaggttatatgtcgtggtcttgttacatatgttttactataactgttgttttaaaaaaaattccacatgacaaccattaatgaaaaaaataacagttatttttacagaaattttgtacaggacaagatattaaaaacaactgttagacaaagtatagacaaagtcttctttctcttgaacacgtagcatgtttatggcgtcatggcatggaaaaaacataaagtctttttttgagagtgacaaaagcaaagcgttttacgttgtttctggtccatactttacatactatgagtctttgataatttaaattttaattaacatgggcacaaatgcaccaataattattagcagcatttctacctttttaattgacgctgaatattttttatttgtgtgattcgttgaattaaatgaagaaacgtagccagaaaagagaaaaagaaattaacattattgttacaagagtggttggatttgacaccaaaagagaaagctaagaacattacagaacaaagttatatatgcttcattgcgacacatttattctacagattctattcaaagatcagcctaaccaatacagctgtatatacacaccaccatccatcccatatgagcaatttgtttttttctttctagaattaatatttttgttgcagatattaataaggggataatatgaatttactaaaaacagtgaaaattatttgaccatatatgttaacattatccttgacccctaaaaatatatattaccaagtccttattttggatggagctagcttgagagagctaggtgttgccccaaaagctattaaaacgaacttttaatctgattcagttaagtatttatatattttcgtaggaaaaaaaaaatagtattattcatccaaattggaatgaaagagatcatatgaaaactatatataatgtactaaatataaacaccatcatcaattgtcaataatcataatcaaagttcgtataggtaatgcatattctcttggaaatactaatggctccactgagctcatatgttcaattaaatactgattttctttcttgagggattttcagaacattttaattttctgaaatcgatttttgtttgtgttgtgtgtgattaataggtgctctctttcgaacgtggcacttgctagttcgatgctaccgattttgggtaagattgtgtcttctctttcttaaaaagatagtcttcgttgaatcataatgtgctccaaacatttaggtctttttccctaaaaagaatcagcttaataaaaaacattttatgagatttacaaaaaaaaataaaaaatcttttatcacgaagtctatttgtttaggtgtccgacgaataacgataaacattacaaaagaagaagaggcgattaagatattaatcgaatcgtcataatataaaatttccccaaattcttttctattttatagctttatgccgaaccaaatcctaaacactaatcatttactaagtgactttgtaattctaattcagctttaatgatgatacgtttcagttgcttttccttatctttattattatcacattgaagaaaaataaagaagagtacatgacatttaaagatattaacaagcaatagaatactattgtaataaaaaacaatgctaaatgtgagttggttgaagatattgtatatagtatttatatagttaattatcttccactttctcaatcctaatgtgtaatcgtgttgctagatataaagtatttgtcacgatggagaagttattgaattcagaaattgatatagaaagatataagtgatggttatacggggtgttaaaatgggttaaaatttatgggtcaatttaattcaattcaacccatgaattttaatgagttgaaatttttaactcaaatgagttaatgggtcaaatgagttgatgagtcaattggtttgaggagtaaaatgagttgggttgtaatggttaatggtttcaatagtttacccaattaacccatcaagtgttgtaaaattgaattaaacccgtgatttttctgtcaaaaacgtaaacccgtgattttcccgccaaaaacgtaaacccgagatttttccaccaaaaacgtaaatccataattttcccgtcaaaaacgtaaacccgtaattttcccgctaaacccgtgattttcccgctaaaaacgtaaatccgtgattttcccgcaaaaaacgtaaacccgtgattttcccgccaaaaatgtaaaccaataattttctcgccaaaaacgtaaatctgtaattttcccgccaaaaacgtaaacctataattttctgccaaaaacgtaaacccgtgattttctcgccaaaaacgtaaatccataaaaagtggaatccgatatcctaagtttgatgataatgaattaataatgataattatttattattattttatactaattattaattaaattattacttaaatgggttaacccatttaacaactcaacccatcaaattaaatgagttatgggttgatccaacctatttaacaaaatgagttgggtcaacccataactcatttaaccgtaaactcatttgattatgagttgagttgagttgggttaccaattttgacaccgctagttatacgatagaagataactaaagacactttaataatctcttaaaagagtttatcttatgaaagtcttaattatgcatcttcaacatgaagcatgtaagcttgttgctatgcctacgagaagccatttcaaactaaaagcagctactgggaaagaaggtctagattagttgatttaatgaagaatgttccttattaaattgttgtggagagtattttatacttcggaattggaacaaggctagattttgcatatcttgttatagtctaattagcattcttgagcaaacatgtttacaaaacattgtcaagcagccatgcagtcaaatgagtgggtcacattaaatacatcaagggaacaatgatgaattacatacattggggaaatattgcgagtaagatcattcaatgtctagttttcactgttagtaacataattagttggatcggtttcatatgtaaagttgtgcttctgttaactacataagcaaaatgcatggggtgttattggatggctttgtttttttttgtgcacctctgaattatatttaactcaatcaaagtttcgagcatacaatcggagagaactcttagctaaggaatccgccacaacattggtttcccttctaatagaacgacaaacaaataactcaaacgataaacataatcttgacattcaattaacatatagacttttgacacatgagttttctatggccaagtattagtttttgataaaattccaagaaaagctgatctttacgtgtcggatctttgacttacaaataattaattagttgtcaaagacaaagagcataaaatgaaaaattcgcactaagacaaattattcatcacgaaggacgaacctgtaaattaatatgccaaccattctgcttattttcttatataaatgtcaatatcaaagtcaccaaataatatcagtttcttttcttaaatcttaatataaagtgacgaactactgaatggttattaacaaaaaaaaataaaaaaaaaattagaattgctgaatttatcaaatctaaaaacatttcatgagcatatttctcttattaacagcatgtaataaacggatttatatatggatgcttacaatgccaacaaactagtataaattatggtccatttaagtggtcaattataaaaagctactcttatgtgaaataatagttgaggggaaaagaagataaatgatgctgatttttctttttaaaaagtaatttctttaatgtgcaataaattttttttattcaaattgtgaatacaaggttgaaagttttatgagcttatatttcaatcggaccagacaaaatgagcacataaagttgtaactaatagtgttgtcaaaacaatatataagttgttacctttttgcatgctctataaaagaccatgcattattaaggttaagaacttttgcatgttcctcaaagcaatgactccaaaagctcgagataggtactggatatatctgtaaagctcatcatatttattcatcaacatttaaaacaaatagaccgtatgaaaaaaaaaaaaaaaaaatcaaattcagttattactcaacttaggacttaacacattcacgaagtaatattgcagaacaataatttgtttgatagtaaaaaaaagattcaaaaagctcgcgagcctatatagtacatataacaacaaaagtatcaattgaatgctcataatcatatgcaaatgttgtagtaaagtgaagcatccacttacaaagttacaatgctatggccatcaatgttatctaaggtaaattatcagttagacccgctttgatttggtaattattggtttgaaaattttagatgcattataatggttccaaatgaagaaaacaaaaaaagtaaagcatccaactagataaacaaaataaatcacaaatagtgattttagaaaatctagatttccattcggatctatatatacatgtcatactaaatcataaatttttatatatattttgtttactttaaaatacgtacatcaagagttttagaaatagtaaacatatacataataaaactttaatttagaagttttatttattcaaaaatataaactgttaatattagatttttaaatgaatggtttttaaaatttatattatttttgtgtaagaaacacgatttatttcttcaatcgttttagcctttctattttttcattgcaagagttataaagtaacaaacatatacatagtaaaattatatttacaaatttaatttgcattactaagaaaaatatatattattaattttagagtttaaatgaagtgttaaaaaaaaagaggggttttcttcactttttttagtgtttatttttttttcatttttcaaggaaaaatcggtaaattcatatcttattcacttgttagtttaaaactgaaaacaaatttatattttaacggtatgtatattctaactttaaaactttaaaacttcacttttaaaattttcagtagatcatatattcaacggtatgtgtatttaaacaaaattatccgatatttttttttaatgaagcggactggaaaattaatcatctagtagtttttatttcttttcgttaattagttatctagtagttttggaaaaacaaattaccgataataagtttttcacttcgtgttcagttctaacttctaatgctaccacaaaataatttgcttatttatctagacactgttattttgttaataaaactccgaatgctttattttctgtcgacaactatatatatatatatatatatatatatatatatatatatatatatatatatatgtatatttacacacactgagacacacataacactagcatatacaagtgcagatcgatatattgttgacaaaagaaagtgtagatagattctagagcatcttcggtcggtatgaatgtcccaccataagtttggttcactactccaatttgcaatattatttgtcctttttctcagtttactcgtacacatacaaaaaaaaaaacgaatgatgatagttttcatactttgttcttcacgatcgtagtaattagggtccaaaatatgatgagtactgagcattattatattttcgtacatattttgtaaccaaaagaggcgacgcataagaagagtaccactcccatataatctagtcttttagatttgattttagaatcatttacaaattatgacatttaaggtttgttgattacttgattttgtcttgttttgaataatttatagattttgccattattcatgctataataaaatgattttaacatgtgttttacttgttatgtttgagtttagtcggttctatttatttttaggatttaatatttgatataatttacgtatgtttgcaaaaaaatattttgtaaatgtattttttaaaattgttaaatacgcaaaagaaaatagcaaatacgcaattcactgatgctctagcttataaaaaaaaacaattaacaaatcacttagctaaggaagcctaaatatctagttccttttttcggttctagaattaataggtactctcttttttaacaaataaatactcttatttgcctccttatttcttctgctctttaaaatcttcaacatttttgtgccccaaaataaaacatttttttgtagaaaatattatggttcaggaataaatttgtttttttctttcgagtgtaaatactttatgaaaatgaaaaaagtttaggtttacaatcatagattataatattaaagaaattacccatggcaaaaagaaaagataaaaacatggaagcataattcattaacatgatctcagtccgtctactcgacaatgacacgacacgaatggagttggacgaagtgataattaacgatattgaggttcttcccaagtggtaagctggagacgaagggcataattcataaatttgattttgtatatgaattaggtaagaacgcattgatgcgggaaatttatgaagtcgaataaaatcaaatcgtcgtacagtactaatattccattcggattagagaatttatcgactttttaggtaggcttgtttttatcgtcaacagctagaacctatgattgtcaatatagattgtcaatatagatagaaacattaacttatgtagtggttaccaatatatattcatgcaccgacttgtcacaagaagaaatcccacagtcccactctcctttgagcttatatgttacttagatatacatcatcgacatcaaagttataatgcattttaacactgtagatcttaatatcctaacctgatgaaagaaaaaaagcaaaaaacaaaacatgaaccaattatttgtcgcatacgaatgcaactttaaagacatattcatgtgttattatattccattcgacaacacaacaaacaagaaccaattattattgtttataacgtttctttgtttttttgtcgtggggcaactactctaccttagctattttaactgaagagtcgaatttctaatccagtggatacgggataccacattggtctgaatgtaatacgttagtttcaaagatatatgttaatgtgaaattatcaaaataattggttttagctagttttgccaccaatgtgcattttttcgagaagtttacttctcaaaaatattatggtgtatcaaaagtacgtagttctaaaataggtaatatatattataacgtactcctcataaaataggtaatatatgaaagattatcagagtggttttagtttgcatacctacaagttttataaattagtgaaatgattaccggacttcaattgtgaagcccataaacaagaagttatgagagtcacatatagaagcagttcaaaacaatacctaaaatagacggataaactatttttagctatatttgatgtatgtttcaatttgtgaagatgcatattctcacaacaacgaactaatgcagggagctattggatatcaggaagctgaatgagttattctcaacaaataaggaaaaagatagacttgaatatcaaggaagctaccagacaagaaaagagatatacttaaatgtcaaggaagatcccaaacaaaggaaggaataggcttgaagaccaaaaaagattccgctcattgattctcggaggacctagagattaggattctggagaatagtataaatatttttggattatgcattgagccgcttaaacactctagcatattgttatacgtgtatagccttcgaagtctaacaaaatcttagaaggtgagtgtttgtaatttttttgtctttacaagcgtgtgctaaaaacagacgaaagaattatacttagattcgttcttagtcggggttgtgtatatttggataaaataggtcaaataaaaccgagataattagaatcatttaagaaatcatattatcaataaaaacaagtattaagcgtttcatttggcccattccgaatcaaaaatatctgtgtaccctctatatccttataatttgtcccaaattttagggtatcaggagatttggatacatgttcaggtacgatagttacatatttgttttgttttgttgttgttaaatatattcatggtattgagattttaatatgtcattttattcttttaatataatgtgtttttcgtgatgaaaaataaaaaaaaaaaaaatatatatatatatatatatatatatatatatatatatatataatgtgtttttcgtccatggcaacatgtgaatttgtttttggagatgatcacaatttaattaacaggaataaagactgagggtttggatcctcatagatgagtcaaacccaattaaaacaaaaaagaaaatggtttaagataaatctcttcttacgtcgttttgcttattacaagtctcttaaaaaatacacttggtttaacatgaaacttcaataatgacaaaaaaaaaaaagaaaaaaaaagaaacttaacgcgaaaatacaaaacctaacagtgaaaacataaaacgaccaaacaaaactcgaactcaaaaatgcgagacaaaaacccaaatgtttgaatcgaaactgggcttagtactggcttgggccaacacaaaaaataaaataaaaaaataaatcagatgtattttatttcctatttctgcaatctctcacatgaagtcgtgaaccatgtgaaaggtcctcataagataagcaatccggtactggttaggtaagaattttcatgcatttggtgtctttattaaagtaactggcgtttacaatgtatgacagtttccaaatataatttcattcaaaattttcagtctagtattgataaattgttaataatatcatggaaaggttatcagtcgatacacatgctcatattaccttttagatttagttttctagtatagttacaatgaaatatttaaagtgtatctatcattgcgaaattggtattctcaaatgattggatgtatgccacttttcatgttaatgttttttacttgttatactattacatttttccatttgtgactagttttgtcatttgtaaccaaatatatatatatatatatatatatttgtcatttttgaaacatgagttaagaattatgctagtgtatattttcagaatgatgatgagctgttgtattcgagttaccaatttcgtttgaagtgtttttaacacaaccaattggaaaaaaaaaatgtggtcttttaatggttcgttttttgcaatgtacactttaacttcctaattcctattaattcatgaagtttaatgtacaaacacatttcattgataaaatgccggaagatgtgtttttaagtggcatattagtatctgatttgttagtgtgtcgcattccaacgttgccacagatttgttgactagttttatctttcctttttttgccaatgaactaacattcgatgttgtcgttaagccaaacctttgtctgttatactcaaatctaacgaacgtgcaaggatctccaatcgagttttgattcttatgttaaattttactatttttctacttggttgtctaaagatcgggatagttaacctacaaggtaacattgctttggttatcataaaagtcgtcgtatttggttagttttgtttgcactagttcaacagttagttgatttatgatgtttggtcggtcccagtttcagaattagctgtaacaagaaaaaatatttataaaattaaagttaagaaaaagcactatgtatgtaattttttccgacttatttatatatacccaagaaaataatgctgtggagttattggacggcagagcgagccgaccaactattgcacttatcatcagtgtgtaccaaaccccttactaaattatagaaaacaaaataaaattatgcttttattgaaaatcaaccatgttttaatacatttccctgatatattcaataaattgtaaaataagtcaaaatattcacttttgtttttagtgataaaacctttttgcttttattgatacacaatgaaaatagtactataaaatagaaaaccaatactagttctttacaatattcataaccaagtctacaaaaattaatgtgaactagttgaatttttgtttccatagtgtaatgtatactaaactgtaatgtatatttcaacatgggttataatatttatttcccatataaattgaattttccgaccaaaattgtagagctcttagttgtgatatgtaatattactcccttttattcataattttataggctggcgcgcatgctttctcttagttaagtcataagtagcaccaacaagaaaaatggtacaccaaattctatcatattatccccacaaagtcaaggtcttagacattaaagttttaatttttgtatccatatgatgaaaagaaaataagaaaatgaagatcaaagaaaagcatgcttgttggtgtagtcactgtagtgtaggtgtgtggaaaaaacaacacatagacaacgtttgattggttcgatgttggccgtaatatgtcccatctttttttctcttaagatgtgacaatggtgtgtttaatttaatttttctcaattacatcgttggtttttattttatttttgaaaagaaacacgaatatttggtgatcaacattaacctatactgtagaagtaagacgtctaaccacttaaagtaattaaatcacaattccaatattcgtatggatcttgaattctccacatccaaaataatgaattaaaatcatataagtatatcattataacatttgttatacataaaagacatggtttatagtttctattcttggaggacctcaaatatactataacaagaaaaattgcgtttaaactaacgaacaaaaaacattgcgtttatagtaagatttttaatatgtgttcgagtgaaaaagagtagactaaattgtcaactctgtagcccccacaacagatgagacattgactgagaatttgagatcatcgcacaccttcttcatttcttgtctccttaaaatcaatccctcttttcttttataaatgatgttttaaacttctatttttgttcttaaatagataatattttcaattttcaatgcaaaattaattatagtacttttgatagtttttatgatttttattctgcagatttttttgtattggttgattaaacaataaatgatattttaggttaaaaataaacaaaaattaaatgattttttaatctgtgtgcattttcccaaaacatcaactaaataaaaatgaagggagaagtattgctaacattaaacgaagggagaagtattgtttaaaaaataaaataaactttttcgacatagtaaaaatattataattaaactctgcaaaaagttaatacaaattgaagaaaacaatactagagtcatatttcactaattgagataggatgaacatattcttttgggttttgaatagctttgccatgaagttggtcaaaatgcttaggaacaaaagtagaagaattctggttatcaatgttcttaacccttgtgttgagggcatcaatcttgatgttcagatcattgtaggagcagtcaattcttgttgttaactcagcgagcttcttttcgatggccattgtactggatgcttgtccttgcacaatttgctgaagcaaagtcttcatgtccgaatcttgtgcaggaggagcttgttgtggctgagtaaaaccttgattgtatggaacaaaaggtttaggttgagcttgttggttctgttgaatgtaaacttgatcttgtatatatatacatattgggaaatttgtacaattattaatttataatactaataacaccatacaattacataagattttcaaaaatgttattactttattaatttatcgattatatcaatttatacactggtcccaaagaagaatttattaatttatagagggcttactgtacaaatttaaaacattcttgtttaatttggatttagattaagtaaactaaattaagcaatgactttttagaatattttaaatttttaggtttggtttagacacaaaataattatcagaaatactatgagtgcacacaaaacaaatactaggtattttagtgaaaattgtgtacccctagttggcttgttattgttatataccttgctcaatcctatttacttgcaaatttgcccctttgctcaatcctatttctaagagtgtcattttttcttgctgttacagtttaaaactttaaatctttagggtgcaatcgattggcgaacatctacacaatgattcagagaaggaatgaggggaaagaaaagggttgataaatagattaaaagttagatgttatttgtacttataagttgagtggatacaaaattcctattttttttacctctttcatatttctttttactgactttattttaacaggattcactgatgagattttgtatccaccatgtttttactccaaccgacacaactaatcagatatttttatttttagctaaagaatatacacatgtagatgtgtgtatgaaagacaaaaatgtaaatgttgatttggtgtatgatatgtcttattcataagtcccaatgaagacagtccttaatctacggttaggtggtggctgctcaccttcctctattccttttttttgtttctatcttctttcacatccatttaactatttcgacagaccaatagttctaagtctagtttatgataatcttaaaaaattagtagagtccaagatcagaccaattatctttagtttggttactatctaattggatgattcataaactagtgacgtgccatatccttacattctttagattgttagaatttatacataaacattaaataatgaatattaatttcacatactatcgttttcatatcaagtgtttaacatatcagaattcatacgtgtgaaatatataactatgatggaaaaatatattaacataataatacgtgactttagtggagatactaaagtaagacaaaggaaaaacagtagaaatatcaaagcggcaaataaaatcatacaacaagtcaaatatataaaaaaatagaaatttaatttaaactaatttacttaatttagtaaataagggcttatacgtgatatataatttcaaaacaataatcttataaaaaaacaataatcttacgtgaaatcagtaaataaagtgctatgcaattctaacaaaaaaaaaaaaaaaaaaaaaagtgcactgtgcggttactctccattaataacaaattattaaaaaaacagtagaaaagacagagagattaaaacaaaaggtcaaatataatttcaataaaaataataatttaaaagtgatcaaatttgtatttaattttagttaaatcaaatcagcccccacaaaaacattaaaaaaaactccattaaagaccaatataagagagaacatgagagtccaaacttcattcaattcaagtctcagttccaagaataaaaacaaagattttgtattttcatttaaagagatgaaatcaatcttagccaacacttctctcgactcttcattctctctttctaaacgttacttcaattggaagaagaagaaagttcaagaagacgacgacgaagaagaggaagaagaagaagacgattacaaccacaacgagaaaaaagtcttgacccgtttcaatttctcctctgacccgacccgaccggatcagttcaatgcccaacagataatgaagaaaaaaaagaaaaagactctcgaaaagatccgttacgctctcgggttctctaactcgggtctgggtttccgggtcgtgggtacgttattcggtaaccgtcgtggacacgtgtacttcgccgtacaagatgacccgactcgtttacctgcggtgttgatccagttaccgactccaacgagcgttcttgtccgtgaaatggcttcagggctagtgagaatcgcgctcgaaacggctgcgtataagacagattcaaagaagaagcttttagaagagtccacgtggagaacgtattgtaacggtaaaaaatgtggttacgcggcgaggaaagagtgtggagaagcggagtggaaggtgttgaaggcggttgggcctataacaatgggtgctggagttttaccggcgactacgacgacggtggatgaagaagggaatggagcggttgggtccgaaaaaggtgaactcatgtatatgagagcccggttcgagcgggttgtcgggtcgagagactcggaggcgttttacatgatgaaccctgatgtgtcaagtggtggacctgagcttagtgtgtattttctaagggtttaatgcgaaaaaaagataagattagtatatgattaagaaggtattatatgaccattttagtttttaagaatgtgttttggtttttggcttttgtttagatgatgttcaacgtataatattggaagtatcttaatgatgttccaaaagattagtgattaaaaagtgaatgctttatctggaagcaatgtactatgatgaatccatatttctttaactttttctttgtgataaatcggagttattggcttaatgctattatgcaaatgtggtttacattttttaactgttactcttctttgatgtttgcattttagaggatggcttgaattctcatgcctaatgataaaatcgttaaatattttttttggaaattagaaaagccaataggcgaaagtgtaattactgtatatccttaaactcattaattggatcaacgaaaatgtagataagcacaacctttcattaatgactcccacaaaaaagtttttagtttgttccaacagtatagaggtaggcctcatctaagtcagcatgaaacaccaaacttactctccaccatcaagctccgagtaaataacagtacaagatactatgactttagtcgtaattaacaacctaaaacaaaaagtttcttgtttatgttgctgatttggattatttgttcagctccgttagagtagaaagggaaacaaacaatcaagtgtcgttagctcaattggtaaagatctaggcgaagtttaaaggtcgccggttcgaatgacgcttgagacgaaactaatattacatgttgtggtttcgggcctgggaggattacgggtttcggcccagagcctcttaatatttaaaaaaaaagaaagaaaaaaaagaaaaaagaagggaaacaaacatctcttgacaaatagtaaggcaaagcaatatttagtcttcaaacgaaaattttgtttgctcttcatgttatagagtgtgaggtatttatgtgcttagttcttgagatgatctgatggattttaaaaacttaaaaagacagaaatttcgagttctggcgggatccatctggcaaaacttgactatcaagcaaaagctcttctagagatttggagtggcaaagaagaataaaggaggaacattaacaacggaaaaacattggtcaattatagaaaattaacaacgaaattaaagagaccaaaagtcaatatcacacttgagaaaacggaaacaaatcattcatcaaatcatatgaaaaaggaaaaagaaaaaagaaacaacacagcgaaacacaaagctagggttttaaaaaaaactagggctttggatcttcgtgttttgtgtcagcctcaaaagcccaagcgttctccttgcgaatcgcttcttcttcttcttcatgtgtgaaatcattctcgatattaaagagttctcgaacttcctctggcgtcttatctttgatgtaatctgcaacagtctggcaagtgagaccaagaagaccttcgacgttgagatagttagcagcgagaatgagcttgaagattgtttccatatcaatatttttcatgaactctgcgtcccaagcatcgagattctgcttcgcctcctcagatgcatcatctccttcttcagttgattcaggaaccggcccgccacatcatcgggcttcttcttcttcggctcctcagatgcatcatcatcgaccacatcgtcgacgtgtttcttgcaatactcgagaacgatggagagaatatttcctgtaacgttttgaagagggatttcgttaataacacagtcgtcttcgagcaggtgctttacgatctgcagttttcgtgccaccacttcctcaacttggaaagactcgccatcggaactagtcaacacaatcttgttagaagacattttgtttgctttgtgtgttaaacgaaaaaataagtttttgcttttattttttgtgcagagaaatttgatgagagattgttgaatgaaaaataaaagagtcgatgaatgtgtttatctatagaaatcctaagagtcggtcaatttgtgttttccttttccaattagaattaggtttcatgttgtttcctttttctcaaggaaataaggaaaataacgcaaattctaacttaactagtttgttgggattaaccccttttattggatccgcaaaagagaaagatatttatttgtaaaattttatatttatatatctatataaaatatcaaatttatatcttggaaacttataaagtatttatttgtataaaaatatttttatgtttaaatataagatcaatccataatactcatataagttctatgcaatgacgattgtaacaagctaaaaattataaatcacaagatatgtaccatccattttgatccaaaagagtcaatgtactaattcatgctttgtttcttccctgtaaagctatttgtagcagactccaacatgattacgtatatgttttggtcctcatgtgttgttcattgctttggttctcatgtgttgttcattgctttggttgataaagattacataaatgttttggtgtttcagatccctgaaatcatcagaaggtttgatgagaagcgtttcactttgaagggtaactgattccaaacttgcttctagtgatttgattatttgattttgagtcaactgatgagtgaggatgtagagtacatgcatgaagatgatgagtgttgagcgagatttggctgagaagctcactacgaggagctgtctggtgaattctttgaatttttattattattaggccaaacttaaagaagcccatctcatacgaatagacgcaggccgcaaatgggctcatgcagttcacttatgcaatcccaatggatctatattactgctgagagatttctacaattcgcaaattccatagcttgtgaatagaaattgtcttgttcattatcaatttgaatttttgttcccataacaaataatgaaagatatagtctatatacatacgtataacgttccaaccgagatattacaaatgtgaatgaactcattaaatacaactttaagaatcttttcgaaatacaatttcatgtaattgtcaaaaaatttttgaagcaaatcctaagagattgaaattaaaccaaaagaaaaaaaaaacagttagtgtttgagattattcaccacagaattatgtctcatggaaggtcccgaaggtggtacaagtacccttttagaaaatgaatggaacacacgacctttgaatgtaaaacccccaatgatctcttgtcttgatcttgtttgaactatttccgtttcagaaagcttaatcggtccgatccttgccgtggcgttgtatgaaccaaaaatcaagaggaaaacaatataaagagtcataaacatggttttatgagaaagattcatataatgttcggagaaagaagaagaataaggaggaggagacactaatttagctattagctagggttttataaattttggattttaagaaggcggtttaagttttgagatgtatatatgagcgtgtatatatatgatatatcatgtatgaaagtatgcacattcttgtatgattggtcaaacaagaaaagcaaaagaaaaataaagaagtgaagcgcaagtaatggaatgttagtattttgtgataatattaaaaggtcaacgatactacgatagtgaataaaagacttgaaatgccgcgttggacgatggtgtacgtacgtgtgattacctctagttgtctgtcaaaatttaattatcaaacattattggtattatattgtgtaaaatataatttcatcatcaattatgtgtgtaaaatttaaatttttgtaagagaatcacgttgttgtagactttgtatattatatacacattatgtgtgaacaaaagaacaatgcgtacgtgattgtttagtccaaagttaggtgccaatgactatcaaatcatttggtcttcgattttgaaagaaaagtaaattctattttcctttttcttgtagctttttaacatgatctcttgagaaggacttgcgtaaatagtttgaagctaaccaccatgtatagtccataggccaaataaacaagttttgtttaaagaaattatttccgttattaggggttaccaaacaattaatttatcatatttaatagttaattattcacctgcaaattatttgtggcacctaatatttaaattatttatcagcacataattttgttctgttataacaactaacataacatttcgtccaacaaaaatctcttttcataggttaatgtgtttatatattcatgtgacaactttcacggagtagacgtaaatgtcaaaccatgcacacgcatgatccgttggattttgatcgtccactggagacagatattcgtctggaccactagatttctgagattttaatatgtttgcataattataggtaataacatatgatttcttcagaattattctagaaattttaaagtagtctatacttatactctagcaccagagtttcattttataaaatgccaataatctatttgaaacgtgtaatgcttttgaccatttattaagatttgtgttggtactagtggacaaattttaagtttacttactcaagatttataacaaaatatacaaatttaaatattgtgttaatcaatcatgatacaaccataattaataataatcatgtgcatgaatgcaatggcaaggacttcttttcagttgatacaattttttagtttatttactcaagatttataacaaaatatacatatttaaaaattgtgttaatcaatcatgatactcaacaataatcaagtgcatgaatgcaatggcaagggccaaggaccaataaatcaaaaacgaataaaagaaaaaaaccatccccatttaggagtaccaaataagagcatagagaccaagaagaagaagaagaaagaatacgtatgtggcccatggggtgtatctacatttatattataaaagaattgaagtacaattacaattgataaatccgttgcttaaaccaagcatgaaatgtaaacgcaaaaagagccttggtggttacatggttaggctacattggctaacaatggaggaacaaagctcgatcctttaagagtctgctcaaatatgtgacccactttcagcaatttctcctaaaaccaatcaacaaatcatcatgtgaatcttaatctaatcttttagagtaagcaaagagacagagtttataacaaacctcatcaaacgctgctccgatcatttgaagaccaacaggaagacccgagggaccaccttcgactaatccacaaggtaataccattgcaggaagtccggcaagattcacattgacctgcaacaaacctcatatgatacaaactatgtttcgtgtaacaacgattaaatagagaaagaaactacgaaagatttttaccgtcataatgtctccagcatacattgccagtggatcatctttcttttcaccaatcttgtatgcagcagatggagctgccggagaaataaggatatcgttctgttctaacgctgctttgaagtcttttcgaattagtgtcctcacctgtattaacaaccaaacaaaaagagcatacatttatctatcaaaacaggttctatttctattgactgcatttgaagatgcggcttacctgttgagctcgcttgtagtaagcatcgtagtaacccgcagaaagtgcatatgtccccattaaaattctcattttcaccttgaaatcaaaattgtcattgattataatcaagcatttgttgattaaatcagatggagtaaattctgaaatcatacctctcctccaaatccttctccacgggaacattcatacagcttattgagttcttcagccataacttgattaccatatcttcatttccaatacaagaaacaatatcattttctatatccatgatgcactcatattgtgagtcaagtcataataccgagattacctgacaccatcataacgtgataaattcgaagatgactccgatgaggcaataacgtagtaagctggtagtccaagagagaatgaaggaagggagacctgtaaattttggcaacaaatctcagaatttttacacaaaaacgaaaaagaaaaactgagacaaagggaaaagtgaaaataacctctgtcaatatacaacccaatgcttctaagtgagacgcagcttcctgagtagcagatctcactccagaatcaacaccgtcttcaagtgtctcgcgaattataccaactttcactccattcaatggtttagactcaaaatgatccacagatagaaactgagactggaactcaggcacatcctgaacaaagagaaatatgtttctgttttcaaagaaaacatctttcgttcattacaatgcaggaaaccaactacaacaagagaccttacttgtttgctactcgtggagtcaaacctatcataccccgaaatagcatgaagaagcatcccagcatcagcaaccgtagacccaaaacacccaatcacatccaacgaagacgcataagccataagcccaaacctagaaacacgcccataagtcggcttaagacctacaacaccacaaaacgaagctggctgtctcacacttccaccagtatcactaccaagtgacaccatacactgccttgctgcaacagctgctgctgatcctcccgatgaacctcccggtacacgactcaaatcccacggattcgcagttacctttaaaccaaaaccaaaccccaagattcaatccctataccatcacaagctccccaataagaccataaataaaggctccaactttattaacattgctgaatcattcaatcctaaaccatcatcacaagtctccctaacaaaaccatattcatctatctaaacatgctccaaatttattaacaatcatcacaagattcataagacaaacctgaaaagcagaagcttcagtggtacttcccattccaaactcatccatattagtcttaccaacaacaatcccacccaactctttaatcttcttaaccgccgtcgcatcgaacggtggacgataatgctctaagattctcgaagcagcagtagaaggcataccttgagtacatatattatccttaacgccgatcaaaactccggcgagaggacccaattcctcacctttagcgattcgttgatcaatctcttgagcatctttgagaacattctccgatacgtgaaggaagcatttgagctgaggttcagtgagacggatacgagaaaggtaagattttgcgatttcgacagctgtggtttcgccggagaggagtgaacgacgagtggtgagaatttgagattgtggtggagagataacggaagtgtcgatggtcttcgaagaagctgcggagacgatggttttagatatttggaaccggcgtagagggaggagtgatagagaacgcggcggttgcaatgtcgataacattgcttgaagtttcgaatttgaatcactgaatcatcaaattgggaagatagtgagtttaaactgaaattgggtagtagagtaataagacaaagaaggatgaattctccggtgtaacgccggcgaaaatgtttcggcgactgttcgaggaaggagagaaatcatcaggataagacttttttcagtgttcaaaacatggagagaagatttattagtgggccgaaattaaatgggtaataaagcccaatacaattttttcttatcgttaaagcccaataaaagttaaggcggcgatggtgtagactgtagaacgagttatgaatagttacgacttacgattatctattatgttatatgtatgttcccaaaattgtatttaacgtaacgataattatatatattttatgttaagcttaaaacagttgacaatgagaaggtctttagaaattaggtaacattggtaaaaatatacattcaagtatttccgctgtaaaatctttaccatgcttttgagttttaatcgaactagccaatcaatgttattcgtatgacgtaaaaattgaaaaatatgacgaacttatgtcattggttatttgtgctttcccttgttgacatgtattagtcattcattatacatgttttaaggatatgacactaaacaaaagagctcgatataatttgtaagtaaatagagtaaagtatttactccatccaacaaaatcaatcaaatcaagacgataaaagtgtcaaaaacttgtacggaaattaataattacattaactgtatataaattactttacggtaaaaaagtgaaaaaagagccaggaaataaggactgcaggaacattcaactcttggccagagggttgagttaataaattgttcaagaaaaccaaactcattactaactttactatttaatccgtacggctcattgaaacttgcaagaatcatttattaaatatcatcattgttttcaattccaagaacatctcattggatttaactgattaaaaggaaaatataaatttctttttaattttgattcacaaatcacaagcttgtggataagatagtaagaaaagatgaaatggaaaaaaagatcgtaagaacgtatttaacaatgaaaatactttattctccattgaaatttttaagaatgatacgatagacataaattgtaattttcaataattatataaataatcaaaagtttgaaaaaatgttagaaatattatgttattcctattgaaacatagaggaaaaagagtgttttgggaaatagactttctcagtatttaactcaacaagtccgtaaaatattactaatgggaataaaaaacttgttaaacataattcagacacgaattcgacatctttttcgtctaattcaatatctaatgtcgctaaaatcttttacataaaaccaaaacttgttgcagccgagttataaaacaagaaaaacaattatttttgcttttgtcttagtaaatactgagaaaaagtacagaagccgtcacctatgaacaactaataatgacttgtggagttatggagacagagcctatgaaagcaacaaaagaaagagagaaaaaaatagctataaatgatcgtaaaaagctaactgcaaactaagaaaaaacaaagtaaatagtaaaagaagattttttcagtctatactaaaaacccctaactgtctcatctttaattgaacatcaatatctacttttaaaattcaccaaaaaaaatattgaaaaaataaaagagtcattaaattctgtatatgaagtcagaaaattccaggcagtacaaggctttgtttggtttggtttgtattgtctgtttgaaaccaatgacagagcctgagacaccaaagttagctatctttggatatatgcttaaatgctttgcatgtttatttaaagcatttcacatttatagtcaaaaccaaatgtttgaacctaaacctatactattgtctatagagtttagtttatacattatacgattaaaatgtcaatttaggatcgtcaaaacatttagcacaatttgtcgtggtttttacaaaacatattctcattttttcaatacaaaaaaaaatacgccaatgccaaaaacatcataggtatcaaaatatttttgttgtccaaaatgttcaaaattaaaaatgaaaaatatacactaaacagtaaacacaaatttgaaaatatctaaaaccaaaactcaaagtaagaatatcaaacaaattaacatgaaaaataattggagtttcccaaattcgtttgtttctctcgatccgaaatatgttaagtttagttataagaggaaattacattacaaacatatacaaatttttagattaagacagatggagaagaaaccagacttgttacatccaaaaggatttgatttttcttctctttaagcaaacaccgacatcaaaatctatcaaccaacacatcaatactatttaaccatcaaacaaaaagttaacaaactaacaaattcaataataatataagagaaagctccaaaagcaaatcccacatgaacccatttgacaacaacacatgtctagtaaccatcacacccattgatgaacttgactcatcctccttcttaaggttgctccaagtttgtttaattaccaaactatcctctgccttctccatcatgcaagacttcaatccaacaacatattgccgagattctgacacaacatcctgacaaagatttggattctttgaagccttaaaccttgttcccatcttctcatagaactttcttgagaatcttagctctcctgatagattgtttccattgatgtatagagcaccaagacaaggcaatgtctcgagctcttttgatgggacagtgccggtcaagttgttgtcgttgagaccaagaaacctcaatcttctcaaacttgttaaacctaaaggaacctcacctcttaaacccatctttgacagatccaaaatgaccaaattgcccatattctcccactttattcccatcatgtcatcactgcccattgggttccctgataaaacaagatccgttagagatggaatcttttcgatgttttcgaacaaccctccagagattctgttgttccttagatccaaaagtgtcagattcttcaaaaacccgatttcttgaggcaacctcccttctaattggttattgcttaggtcaagcttaagcaatgaaaccatctctccaacagacaaaggcaatatccctgagaatgagttccgactcatatccaagatcagtagatccttaaacccgttgaaacaatccggaatcgtcccagtgaacaagtttcccgccagaaccaaccgctttaacctagttaaattgcagattctcgtcggtaacttcccgttaaacccgttttcaagaaccaccaaagacttcagctttgtgagacttccaattgtttcaggaagttcaccaatcaaaccaggattggatctaaactcgagtgattctaagttacttgccaagtttatccaatcctctttaggtattcttatcggcgacgtgaagcagttgaagaacgtgagtgatttcaagtgcttgagcttgaataactgtggctttatctccaaacttgtggcgcaagaaagtgagttttcatgaacaagacctagggttagatccgtgacataccacaagtcaccataaagatcacaagaaacaccctgaaaatccaaaaaaaaagtttcaaattgttgaaacaataatactaaaaaggaattttgttagttgtgggccaattgttgttacatatataattgaagccaaaaacatttatagtaacaaaaatgagatcttatatgtaaataggtatacactttgatgcgttgaagcttaaaagtttcacttactggttatggaaatttcaaaggggacagaatcattcagacaactacagaacaaattctctccaaaattctttaacagaaactaaaatgtgttcaagaaatcacaagtaactagaaaagaataaatcatagattttgtaagaaagtaaaacaaaaaacctgaataggagtccaaccacaaggatcaggataaagatcagaaccattccaagaatcaccaacaaacccttgaatagctgagtaaagagcttcttgttctgttttctccatcggagctccatcatcagtgccttccggtgataattctccagtaacgcaacacaggagagttagacaaaggaataaaaccaaatgaatccaagacattgttggacaaaacagaggaagtgagatagataaaacaaagttagtggattttttggtatgaggttatctctgggtgttctttatctattggtgttaataatatttattgaagagagagcgagaggtcgttgggggagtcaatggatttctcattattatagatagctcaaaaacgttagagcaactccaaccttgtatcttagctaattcttagctataaaactgattaaattcaatgaaaccaacaagccttagctaagataaacatcttagttaagatgttttcttaaaactaagaagagtatatgtgttgtgttttgagtgggtatacattgttttgaaatagtttgaattgttgttttttaggaatccaatagttcttaaccattggaataaaaattaattcagcttctttctaacttttcttaacttagtaaaaataatattttaatttaaaataatgttaaaattgaaaattaagaaccaattggggttgctcttacaagaatgggaaaattaaatagaaaaaaaatgaaatcgagggactgtaacgagaaagacatttggttatatgttgttgtctctgtcacataaaaaagtaaatgtggcatttgttcccatatcccatacatgttaatatacacgtatttacttcttcaactttttagtttttctcttttgaagtagagtatgtgaaaagaagagggctaatgtggaaaataggatcacaacttcacaaggatcaaggatgctattgcacttctttaatgtctattgattattgataaagatttttttctttacttctttaattttttttttcttatagctcttccagatgtcccgttgacatttatttgtagttaattattggcatagctttattcaaaataaagggataaatgtgttttattattctttgtagcttccataggtaagagcatctccaatggaaaagctttttctatggttctcttcattttttaaaattaaatttttaaaaaaacttacaagagagcttttggattttctttttagtttttcattctccaataatagtttctcttacacaaattctctaaagaaaggaaattattttactattattttattaataataattattgcaaatcataaaatattaaaaatacattattttgaaatattttaaaatagatattccaaaaaggaaaattgaaataacgatcagttgttctgttgattgatgatacgatgatgcatctattgagattgataacgttagaaacgagatccaacagagtaatatccataacagaacacaagaataaaaaaagaataaaaggcaaaaaaaaaattgttaaaaattttaaacagattaattatagcttgccacgtagcaggctcctcaagttaaaaaaaaagctcttctctccatattaatgtattttcatttatttttattacaattaaattagagaacccgtgatttttgagcagagaacctcctattggaagtgctctaagttcgtcgtagacaaagttaatcaccgtcctggtattaaccacacgacctcaaatagacatagattttttttttcttttacctttttaaatagagagttatagttataacctttctatatatctttgtttttatggaacttcgttcttattaatttacaacgtttctatgttttacttataaactatttatctatctctatttacttatcagttgatcgattttgattcttaatttgtaacatgtgtttttatggattttgcttaaatctttttatttatctgaagccgaaaaatcttatatgttgtttgatgtagaggggttgaagtctcctatcatttatgtttttttgcttaaatggttcttttgtgacattaattattaagttgctctattttatgcgtatgtgtgttttaccatcgaagcagtagtagctgactatactggacgaatccctaaccttttttttttcgtccggaatccctaacctacgtttaaaatttgaggcagactttagtgttgctaataatagtttagggttaatatcattggtttgtaaaaaaaaagaagaaatcattgacttatgtaagtttttattattgtgtgtcgtttgatatgtcaatgttgacttcatgtgtctaaagatgattcattatcttctttggccaaacaaaaactatttgtctgcatatccgaataaaaattatttactttgcactgattttggtggagaattaaactttgaaaatgttccctaccaaaaaagaaaactttgaaaatgtttattttattgcaagcatgcgttaatattttttttccaagatttcatatccactcatctacaacttgatagattttgttctttcacattacaaaatatgcatttgtaagaaattaatacaatactagaatcttctcatggaaaatacccacgatgaaagatatgttcatgtcatgagctcaatgtttgagcttcctttcaatttcagttttagaattttagcatataaaagtttctaaatttttaatgtaatcactaatttgattgagaaccaacttttatcattgcacaaaagaatacaaaataaaaaatattttaccttgtgttatgtaccttcaaaaaccaagtaagtactatatgatgttttactattttctgaatttcgtatttgaaatcaaatttctgtcaatagtaattatttttttttgaaaaattacagcaattataaagtcttttatatattagatacttattattaccaacatcaatatatatatatataattaatattctgacaactattattaatcatactctctatgttttttattaatgtatattaaaggattttccacatattatgatatgattatagatgcaatatttttgtgatttataattttgaattttttataactcgaaatcatctgtatttaattattattttttgaagtttataattcattaaaaataactaataaatattgcattgagaacttaaaatatctttttttttgaaataaaacaattcctaaacatagagtaacaaaaataaaaagagagtatatatatttcaccaaaatataagataactgattaaaaaactattagtatatagtacatttcaccaaaatatataaaacaatctactactttaaaaataataattaagctctctcgaacttaaaaattgcatagcacaaaccgagactaattgattcaaccgagactaaaccggagaataagcctaaaccagaaccctcggaatcatttagaaggatagtcttgttgtatcacagcgagacagcttctcttccccatcttctctcgctgcttcttcgatcattgaagcatccacccagaaaaaccctaattctcctgacaaaatgagctctttctcagttaaaaagtccccaaattcttccttcctcttcccaaaaatcacacctttacttatacgacatcgtctcactctcccattactagttcctcctcacaaaccaccaagattccgcatcgttgcttctctctccggtacttcatgggtctctcaagcttctcaagacaaatatggtggttgggctcttgctgaagatgaaactccttctcctcattcgataactaaaaaaagttagtaccttcgaagaatgttagtgggaaattgaagaaatttcataactttgtgttgcaattgatttgattatttgttttttgtgagtttagagtggaggaatgttgtaatcactggtgttggatcgtcacttgctgttgtattagctactattgcttacttctcaatctccagaaaaggtccaacaacaattcttaactcgtttggtctgtttctgaattttgtaggatggtttaatctgagattctgtggtttgttgtttctttgacaggttttaggtttagctttagtaatctattgcaatatcaaaatgtggaattggatcagaatgataatgaagagagtgaaactctgttcaatgatgagaacaattctccttctgaggctaactctgaaagcgttgactatgtttcagataatgttgactcaagtaagttctcatcttggttaatttgtgagtttgaaagaatctgtaaactgttgttaccatttgctctaacaagtctttactttagcatcaaccggaaaaactcaccgtgtcgctactccggttgctgtggatgctgctcaacaggaagcaatagcagttttaaagaaactaaaggtttgtttcgagaaacttgctcttgaattgagccttagttgtccagctctgatcatgaacatgttacttgtaattaagttgttcagatatatgaagatgatatagtggcagacgagttgtgtactaaacgagagtatgctagatggctagttcgttctaattcgttattagagaggtaatgatacttggagcacatttttccaataagtcataagtctcttagcgtttgtggtggattgacacaatgtgtttctcttgcctttagaaatccaatgcacatgattgtgccagcagtagctttagctggctcttctattcctgcatttgacgatataaatacctcagaccctgacttcgagtacattcaaggtaaaaatcgataagagatatttctactttggtttaatagtttattagaacttctgtaaatgatatatatttttgggtttttattcagccttggcagaggcaggcattacttccagcaagctcagcggagaagattctcgaaatgacttgggaaacagtaattttaatcctgaaaggtataataaggattagcttttttcatctgctatgtatttgtctcattgttcactgatttctaattgtttgtaattttaactaaaatggtggctgcagttttgtctcccgactcgatttggttaactggaaagctcagttggagtgtggtttccatccagaaattatggaagaggtatgatgaagttttaacatttgaggataaatggcaatgtttatcaaatacttttatctcttaaactgcctgacttgtttacagtccagatatcaaggacaaaggtcgactatatagacacgaagaatatcaatcccgatatggctctcggattcttcttggacttcttgatgggtgacaagagtacgatcagaaacgtttttggtattcttctatctctaattctgaccttctccttcttcattgtattgttgatgtgtgtatgtaattgagttttcataacttacaggtaggatcaagcggtttcagccaaatagacctgttacgaaagcacaagcagctgtagcattaacaagcggtaaaatggtgaaagctatcacagcagagctatcaaggttagaagcagagtccctctcgcagaaagctgagacagaagaaatcagatcggaattgctagaaaaaggcgagataaggcaattttgggatgagaagattcaggcagagagatcccgaggatttgagatggaagagctgtatctctctagagttaatgaagtagaagaagaaaaaaccactcaggagaagtggtctgcggagcgtttgaaagagaaagcagccatagactgtcagaaacagttgcttaatagcttgactgaggagattgatgagatgtctcagaggctaatatctgataaatctgtttatctgactgaacacagcaagttacaagagatgctaagtgacttacaatcaaaacttgaatcgcttatcgacaaaagatctatcctcgaagctgaagtcgaagctcttcggatactaaggtaaatggatatttattattgtagcaaagttttgatattttggaaaagttttaactaattatgagtgaatgaaagaaaatgcagatcttggatagaggatgaaggtaaggcaagccaagccagagctaaggttctcgaagaagcgggacgaagatggaaatggaacgataatgcttgaatctttcttcagattgtacaaaaatttgttgagtgatcattgtttgttatattaagcaaatccacaaatttggttttgttggttttttatttggggaaagacaattgactattaacccttaatccaatcttggtttcaaattaaagagagaataaatgttgaagaacctaatcattggcttcgaacttattctcacactttctttctttagcaatgaaatttcaaattttgaagagcgatttacaaaaaccgttgattaaaaatgaaaccttcacgccattgttcaatactatcaaagttcagtgctttctctataaccaacaatcgacattggaagaagaaaactctaatcttcgctagttgaagtctggtatgcttcttctcccttttcacgaactgggtttgcttaaaaatcgcttcttcttcttcttcctttagacatttagtttttagggtttcgtagttaacagttacagtgtaccagtcaaaccaaaactgggtcataatttaagagttacgtcttttgttttagaaaagaaactttctcaattcttagtgtatctttgatgaattccaatgtttttcctcagacaagaaacaattaaacccgttcttgtctttttgctttgcaagtgtatgttctctctgacttgttcacaccagaaaattcctctgccatacaataatacagtagatagataagttcgtttaggctccacttgtatctgaatcttttaactgttttgtgcagattggtaaaaaagaatcagaatccagtgaagggtctaaatatgagtttccacaccatatcatgtaagattcttacatctctttacaagaacctgttctcttttgttatctcttcttattcacacacttgtttcttagataaggctaaaaaggcaaacatgtgaaatctatggctgataaaaaagggttttgataagataatgaaaaggccattcttggttttcatgtttggttgatttgattttcctttaccattttaactaaaattgaattagaaaaaaaattcaatctttctgttttcttgtatatggttgttgctatgtagcgtggcaacacacctctacttgtacctggtcccccaaacatctcaacataatctaaatctcacatttttcttatgcaaatggaccaaacttatttcttgaatgacctttaccaaattttgagatcactaatctttatattgactagatttgtctttgataaatgtcttatctttaactaacttatgtgtttagttcaccgtctagtttggtaaattgctataacacaagagacagaattcttaatctttagctttgaacttttaattgagttttttttcacagctgcttcttggtcatggcttaagaccccatctattacgatacatgtctatttcctcatctgtcttgagctaaaaacagcgactattattggttgttttttcattttatttaatgctgagatttttggactctgatgcatgcgacttgagaggtccataaagctgataagatcgaattttgtgatgataagtgtcttttttttttccttcttttctttggtggacatagttctgtaaagttttgtcagtacctggaagtttctcttacagaagcaagtgtgtttatccatttgtcataaggttgatgaacaagatttggactagagattgtttgaaggaacgatgggttaagttagtatcagtagagtgataattttaaggagactttccggttctgtagatgagacggggaagggaattgattcccatttcaagattttaatatatgtttgtccggatagggtttgttgttgctgcttccattgcagcagttactgttaagcggctcaacgttaaaccctccaaaccaagcaaaccatcaggtactactgttttttcttatacaagcaccaactgtatttaacaccatacatagcatctgactttgttttgttttctgcatttcgctcttaagataatggcgaaggaggcgacaaagaacagtctgtggatcccgactacaatctcaatgacaagaatgtaagtgtactttggaaagttttgttctttcagagacatgtttttgacaacttggataatattttcagctgcaagaggaggaagaggaagaagaagaagaggtgaaactaatcaacagtgtaatcaatcagactcgtggaagtttctcggactacttagatgatgatatattacccgagtttgaagatcttttatctggtgagattgagtatccattgcctgatgatgataataacttggagaaagctgagaaagagaggaaatatgaagtcgagatggcttataacgatggtgagctcgaacggttaaagcaattagttaaggagctagaagaaagagaagtgaaacttgaaggtgaattactcgagtattatggacttaaagagcaagaatcagatatcgttgagttacaaagacagctcaagatcaagactgttgagattgatatgttaaacatcactattaattctctgcaagctgagagaaaaaagcttcaagaagagctctcacaaaacggtattgtaagaaaggagcttgaagtggcgagaaacaagatcaaggagttgcagaggcaaatccaactcgatgctaaccagacgaaaggacagttactgttgcttaagcagcatgtatcaagtcttcaaatgaaagaagaagaagctatgaataaagatactgaagttgagaggaagcttaaagctgtacaggatttggaagtgcaagttatggaactcaagagaaaaaatagagagcttcaacatgagaagagagagttatccattaaactcgattcagcggaagcaagaattgcaactctttcaaacatgactgaggtatgtgtaatgattccttcataatcagttttattcttcctttcttggattgtaatgttctgtcttttttcgtagagcgataaagtggcgaaagttagagaagaggttaacaatttgaagcataacaatgaggatttgttaaagcaagtggaagggcttcaaatgaataggtttagtgaagttgaggaattggtttatctacgttgggtcaatgcatgtttacggtatgagttaagaaactaccagacaccagctggtaaaatctcagctcgtgacttaagcaagaacctaagccccaagtcccaagcaaaagcaaaacggttaatgttagagtatgctggttcagagcgtggccaaggagataccgacttagaaagcaactattctcaaccttcatctccgggaagcgatgatttcgataatgcttcaatggatagttccacaagtaggtttagtagttttagcaagaagccaggattgattcagaaacttaagaaatggggcaaaagcaaggatgattcaagcgttcaatcatcgccttcaagatcattttacggaggatcaccgggaagacttagctcgagtatgaataaacagagaggtcctttagaatctttgatgattagaaacgctggtgaatccgtagccataacaacatttggtcaagtggatcaagaatctcctggtacccctgaaacaccgaatcttccaagaatcagaacacaacaacaagcttcttctccgggtgagggtttgaattccgttgcagcatcgttccacgtgatgtctaaatcggttgacaatgttttggatgagaagtatcctgcgtacaaagacaggcataagttggcagttgaaagagagaagcacattaagcataaagcagatcaagcaagagcagagagatttggcggtaatgtggctttgcctcctaaacttgctcaactaaaggagaaaagggttgttgttccctctgtgatcacagccacaggtgatcagtctaacgagtcaaatgaatctaacgaaggtaaagccagcgaaaacgctgcaaccgtaaccaaaatgaagcttgtagacattgagaaacgacctcctagagtacctcgcccgcctccaagatcagctggaggtggtaaaagtactaacttgccttcagcaagacctcctttacctggtggtggtccaccaccacctcctccaccacctggcggtggaccgcctcctccacctggcggtggaccacctccaccaccacctcctcctggagcacttggaagaggagcgggaggcgggaacaaagttcaccgagctcctgagcttgttgagttttatcaatcattgatgaaacgtgaatcgaagaaagaaggtgcaccttctttgatctcttcaggaactggtaattcttcagcagctaggaacaatatgattggggaaatcgagaaccgatcaacattcctcttagcagtaagttcacactttcaatataatgttaaatgcaattggatttgaaacaaagaatcaattgtttaaacttgattacaggtaaaagcggatgtggagacacaaggggactttgtacagtcgttagcaactgaagtccgagcttcttctttcaccgacatagaagatctcttggcgttcgttagctggctagatgaagagctctccttcttggtcattaactcctcttttcaacattactttctaaccgctatttcggttttttttttaaaactcacggatcaatctctatcgttttgtgtaggttgatgaaagggcagttcttaaacactttgactggccagaaggtaaagctgatgcgctacgagaagcagcttttgaatatcaagatcttatgaaactggagaagcaagttacgtcctttgttgatgatcctaatctctcttgtgaacctgctttgaagaagatgtacaagttgctagagaagtaagtaaaatgtcaatccgaaaaacacacactaaatctttccttactaatgttccatttctgtttctttcacagggttgaacaaagtgtatacgcgcttttacgtacgagagacatggcgatttcacgatataaagaattcgggattccagttgattggttatctgatactggcgtcgtaggaaaggtaaaacacatttgttctttctgatccccttccatttatctttttatctggaaaacaatcttgaaaatgctctgtttggtttttgtttcattttcatcacaacacagatcaagctttcgtcagtccagctcgcgaagaagtacatgaaacgagtagcttatgagctagattcagtgagcggatccgataaagatccgaacagagagttcttgcttctccaaggtgttcgtttcgcgtttagagtccatcaggtaaaataaaaacaagaaacataagaaacctaaaatgaccaaaatttctcagttgtttgaatatataactgaatatgtttgttttgttatgtatagtttgctggagggtttgatgcagagagcatgaaagcatttgaggaacttagaagcagagccaaaactgaaagtggagacaataataataataataataataatagcaatgaagaagaatctgtaaactgagttttattacttctctctgtatcatttgtatcacatacttcatttatagtacagtgaaatttatagattcttgtaaaaagaaatacaacatttttctttgacaaaaaaaaaagaaatacaatttttttgtgtgtaggtttgcaatgatctttatttactatatagtagtattagataatgaattggcaataaatttgtaatctcccaaactactgaagaaaagataaaataattgtggtttgtcttaaaagtcacatgtttcatatcatgtgcagccatgcaaagtatctcccgaatcttcttcactctttaatgttttacagtattttgtttataaactttaaatcagtttcattgaatttatcacaatattttaggttatttttttccatgttttagtaaagtgcaaaataaaaataataatggttcactagatttacagcatataacaacaaaaggactagctctattttttcttttgtaattttatgcaatcgtataaaagaaataatattcatgttttttaagttttggaaattaagtatttctgccaccacctaacaaacagggtccatttcttgggtatagtacttttcacgtccaaacaagatctacatttattataattattgtattcgtataacattatcatcataataatgatttatatcatccgaccctcttataataaatgaaataaattcacggatctaagactaagattacaatcactaatagtctaatataacatttttcgattactccaacatcaaaatcaactcttttttttaatattatcatactcctctatcaagaacaaaaactaaaaaaaaaagtataacacaaaccgtaaacacgattactaatatttaatgtttaaaattatcaatcgaatcaatgattaaaaaatcaaataaagttaaaagtaaaaagaacaaagaaacaaaacaaaaacacatttagacagctagagttttattacaaaagccaaagctttatttttgataccccccaaaaacagatatctttcagtcttcacgttgcaatatactcacatttcgaccacatactgacaaaaactccgtatatatatacgtataaaaatacggtcttcttcttcttcttcatctcttacaaacacagacacaaaaatcacaaaacccttctcactctctctcaatgtttcctctcatcttcttcctctgttctttcctctctcttttcctcctcccgccgtcaaatatcgccgccgtgagtaaccacaacaaatacctaaagcttccactactacgcaaatctccgtttccttctccaacacaagctctagctttagacactcgccgtctccattttctctctctccgtagaaaaccaatcccattcgtcaaatctccggtggtctccggcgcagcttccgggtcgggtcaatactttgtggatcttcgtatcggacaaccgcctcaatcgttacttctgatcgccgacacaggaagcgatctcgtttgggttaaatgttcagcttgccggaactgttctcatcattctccggccaccgtcttcttccctcgccactcctcaacattctctcccgcccattgctacgacccggtttgtcgtttagtacctaaaccggatcgagctccgatatgtaaccatacccggatccattccacgtgtcattacgagtatggttacgctgacggttcattaacttccggtttattcgctagagaaacgacgtcgttgaaaacaagctctggtaaagaagcgaggttaaaaagcgttgcttttggatgcgggtttcggatctcgggtcaatccgtatcaggtacgagtttcaatggagccaatggagtaatgggcttgggccgtgggcctatttcttttgcttctcagttgggccgtcgttttggtaacaagttttcttattgcttaatggattacacactctctccgccgccgacgagttatctcatcatcggtaacggcggcgacggcatttcaaagcttttcttcactccgttgctcacgaatccgttatcgccaactttttactacgttaaattaaaatctgttttcgttaacggtgcgaaattacgaatcgatccttcaatttgggaaatcgatgattcaggtaacggcggaaccgtcgtggattccggcacaaccttagcgtttttagctgaaccggcgtatcgatcggttatcgccgccgtgagacgacgggtaaagctccctatcgctgatgcgctgactccggggtttgatttatgcgttaacgtctccggcgtcacgaaaccggaaaagatattaccgaggttgaaatttgaattctccggtggtgctgtgtttgttccgccgccgaggaattactttattgagacggaggagcagattcagtgtctggcgattcaatcggtggatccgaaagttggattttcagtgattgggaatttgatgcaacaaggtttcttgtttgaattcgatagagatagatcacggttaggtttttctcgtcgtggttgtgctctgccgtgaaggattttacactggaatattccttttcgattcgcataaagattctttttttttttggaagtacgaaacgtaggtgacggttcactgttaccgaaaatagaaataaaataatctttttggagtttgtataatttcgattaaaaaaatagaaatacatatataatacattatatagattttattctaatttttatgtgatgtttttgttaaatgcttagatattacttatttttataaggataaaatttgtaatatgaattgaaattaatactgaaagtgcaatgtataaataataataaaaaaaataaaaaggactttttattaaaaattagaaggataatatttcattgttacaagattgtttttctttttccatgtaaaactcaatactaatatctctctagtgataagctatatagatcaatactatgagtatgtattaaactatagtttaggtgtcgattaatttgatcacgacttcacgagtgtcattgtgtcaactttaaatctgagtttatattatataggtttttgtttacatctctgtgactcaatggatctctttacaattcttgaaaatgtaaacaatctagtgaaagttagtaaacagtacacatattggtgagccgaatatgatataagcctaaaatgactacgtagcccaaaataacttagtagcccaaaatgcctataatcacttttatctattacaaatccacaaggaacgtcaagtccaactaaaagccttattaaacatgttcaacttaattctctcaacttctaattggtttaaagttgcaagagtgtgttatgatcctatataattagaaatattaaataaccaaacgaaaataataattaagcaacctaatctttccaaaagaaatctattacacaaccttaagcaaaataattaagtaactaatcccttttccataaaaaacattataaaaaaaaaatatatgattacttgataaaacataaaagatataaatttgatttttaaaaacatagaaagatatatcgccataaatggtaatattttgtcaatactttctccatcacgttgaagtttcattttatgttaaaatattcatgaataaaacgtattcttataatagaaatttttttattacatgtttatgttttacacaaaccgattttggatcgtagatccataataattttatttaaatcactttatcctgcacaaaatacaggttgttattgtagttattcttgtattcaagatatcttgcctctgtataatattaaactaattaaataacggttactcaaatgattttgtgccgatattagagcattactatccattgtttaaggttgatatagagtgatacacgcgtagatgaatacaagttattcgaaagctaaatgttacagataaattatctatgttgttgtgatatatgtagctcaagtaacatgtctatataaaattatttttatttgtgaaaaacactatgttaatcatatatatgaaagttggtcaactctctcccacaacttgacacatcagcacatgagagtttgtcacctaaactttttaaaataagtaatacataattaataattaattcaacatatgaacctatcataagtcagaacttcaatcatcattctttctaagtttcttaattcaatatatcctcttttattttttaggcatttaggtagagaatatgatgagtacattttccggatgtaatcctttctttaatggatttctgagaaatgtttatatatgagactcagaaatttttttagcttgtatgtttcattagttacgttagattaagtgattatcttaaaacgtattacactacgtgaaacacatgtgaaacgtgttttatctacaaacaaatgtttaagtttatctttatgatataacttaaacacatcatctagagagttggaaccggttttaaaattaacaccaataatgttttaggcgatgaactatcataaagcttctaaacaaataactttatgttcttttttttttttcatgtttgtcctctcttgctgttgcaaggaattttcaattaaaataaaatccaatttttatattacctatcattgcatatagtatttttgatatattgttaaaactgctaaccatccataagaaaatatatatatgaaaaaagaaataaaaatatgaaaaaaataaatagcaaacatttgaaaaacaatagttattattaaatacaattatacaaaataacaaaagaggagaacaaaacgaatgttagaaacaaaatcaaatttataaaaatatgcaagagtaagctaaaatgatgttctcctattattttttacaactctcaattaaaaaaagctactggaaaagcagattttattacatccattatattattaaaaaagaacaaaatgatattttttgccaaaacatttgtgaaaataacaaacaattataaaaaaatacatataaaaaattgggaaaaaaatggaaaaaaattatgaaactagatttatatctaatcaaaaattcgttaaagttaaacaattaggattacaacaaaagtaaaacaaaaatttgatatagaaatgagaatttttattcgacaatattaacccatatgacagacataagacacgaatgaaaaaaaaaaaatcacaaaaataaatactcaatatatatgtacacttaacaataccaaacaaaaagtatatataatacacctacaaattagattcggaataaagccaagtggttcaactatggattaagtgtggagcggttcaaatactaacgaaaatatatacatattcatatatatgtaatttcttttgttactatttaaacagtaccaaagcatggggtttcatcaccacctaaattaccaaccatttaaaaagttagagttttctaaacaataataataaataatcattatatgttagacatcattacaatttaatcctcaaaatataaagaatgagaaccaacatccaacatactca

SEQ ID NO: 1309 - DNA, 29176 bp, Arabidopsis thaliana
tgaaacgaccatcccttgtcacacttatagcaatgtcccttgctattgaattcgcctttgaggatgaaaccttgaaaatgactcgaaaaaacctgggaatgagtgaattaagtaaaacaaaaggactaaatcatagaaattctaatgtcatatatctaacatcttctaagatgcctctcttttctatacgaactggccgcaatgggatcaacatcacactgatatcatcaaacgagcctcgtgaagccgagagatcaacaagcttcttacaagctgctaacaacaatggcttctcggttcgtaagcagaagggacgagcaatgtctactgcttcttggttactcaccttatcccataaaccatgtgatgccaagattaagaactcatggtcatgctcaactctcgagatctttgtctctggttcagctataacccatttcttaagttgagcatctccgattcctcttggcacaactaaggatccctggattctccacaacgtgaaacatatcaacatatcctcccgtggtttcaattcttttccgttcatcatctctagacggacaatgatcagaaaataaaactttagctacacctcctacactcataacagcacgacagtcaccggcgtttgacacaacaaggctcccttcgctaaccaaagccgtgacacaggatgaaccacccttaaaaccttcctccttaagaaacgttgtgtctgtagtcaagtaactacgtttccaccgcttcagctatctccaactcgtgtcttttaccaactacttcttctacaatgttcttatctaagttcttagctggacactcagccgctttaactcctccatgaccaacatagactccaaatattgcctgcaaattatcacaaagcaaaacaacgtttagaatacacaatacataaagattcatcaataactacacaattgtatcaaatgattctgtaaaacttctaattctattcataatttcaattttccccaaacaacatcatgaagaatcctaattttagatagcttattaatccaatcaatgtagatctcacatgataaaccctaatttgagctgtaattgctaatcaattgaatcaaaatctccaattcgattcaattctaaacctaaattgaaaaatgaatttgaaatttgaaattacctgtttacgatctccatgaagattggtgatagtggagaaccgatcctccataagaatttgattttagagatgaagagcgacactatatattatttattttaaaaaaatatccatttatttgctgtaattgtgagattactccctttctcatgtcgagatctcaaccggcacgaaatagaaagaacatgtattacacgtgtgttttattagataacacagcaaaaccaatcgaactggttaagcaatttatggtttaattttgaaaggatataattgtccttttatcttctagaaataaggaaaagtgtctgaaccttagaaagtgcctcaaacgtaaaaagattttctaaaagtgcctaatagtgtaacattcccttttacatattaattacttcttttaaataaattaatgtataaaaatctattttaaatcactcattttttcttaaaatttggattagttatcttataatttaattcacattatcaccaaattttagcaaaaatcaaaatacagttttatgttattataaaataaaatatatctattatctgacagaagactctccatatatattggattacatatacttaatttttcttaattattctttttatcttaatatctagaatctatttttttattccattaacaccactatcaagaagctaaactttctcaatatttgaatatataattcaaatttttgggtatatatagtgatttattttgccaattcattgtaaaaatatgttttgtaacaacgatgccgacttgctttgttgcatccaatcttaagcctcacattacagtctaatagaaacaacaccatcgcacattagtagtagaagtatgttgcataacaaaactgcaaatacatgagaatattacacaacgaataatagtgtaaaatgctgcatcttcacgaagagttttggttttagataaatatcacattttcccctttattcgagtcacttatcatctcatttgagctatattttctaaaattaaaatccattaagcttttgaggtagttttagattttgtagattctgttttttagcctctcaagaatttggaaattagtttccctaaaaattcggaaattagttttctaaaaatttaacccatttaaaaaaaacattttatttgatccatttaaaaaatctaaattctctagcaaaaagaaaccaaactaaaactaaggatgtttttgttttctcaagttcatatatgatttttttaaatcactaaggatttctaaagcaataaattaactaaaatttttgaactaataactaccaagttttcgatatataaacaattctaattgaattgaaacaagctcattcgatttagacagattgtttcgaattattcagatataacaacctttcttatttttaacacaatcttgcaaaagcttaagatatatcacaaaatgagcaatcactagcgttcaccaaaaactcaagatagactctgaatcagaagataacccacaatagcaccgttctattcaatcacacacacacaaaaccacagcttcgcaaagtttttgcccttacgcaatcattacacaacagtttaggataaaatgattgaacctaacgccacagcaacgtttagactcctcccaatacagcttgttcgcaggatttgcggatggacggctcgtgtaaaccgacattgtctcggccctagacggaccggctgatgctccaatcacaagcaacttatctccaagtgacttaaacgcaacgccccatcctccattagacttagccctcacgggcacatctccaagcttcttccaagagtttgcatttgcatcataaacgcggagctcgttcgccgaggtttccaatgagtaaagatcatccccaaccactgcgatgagcggtggagattggacagaagagaaagacatgtctttgagaatgtccggtatgagttcccatgtgttcgtcttctcgtcgtaactttctccgcaagttaggttttgaccattctcatcccggcctccgagaacataaaacttgccacgcaagtaacacccagagcagaatttccgccgcttatgcattccgcgtagaagcgtccacgttttggtcttagagtcatacttctcaacgctgtccacaacttccatggtcccgtttccttcaattttcaacccaccagctacaaacacaacagtcccacaagtagcagaagcaaacaagattcgcggtgtgatcatcgcgggacctttgaaccatttgctcgtctccaactcgtaccgccatagcgcaatgctcttctcctctttcccagtgacaatcaaatgagttccagcgcaaagcgattctttatctccatggaggaagcatatgtcagaaggaagttccggaagcttctggcagttcccaaagcccttgtcaaacatcgtccaacacgtatcaccactcgacaacataaagacagacggttcaactacaccgcgctcgcgcctcaccttgaaaatctcatcactctttagcaaacgcgaaaaccccttattaagtaactttagtttccaatactcgaaacgcggcacgcgtgcgagtatctcgacctctaactcgtatacgagctgaggaacatttagtaaacaataatctgcatccttaggtttcaaacatgtactgctcagagccttagtggcctcccctgtttcttccccatcccaatccaaactaggttctacgtttagatcaggaatctcgtagcgatgaacccgaagcttcttcgacctagaccagctagagcttgccccaattctaccgatttgatcttctcctagcgtcaacatctctatgtaaaatcctggcctagtgcacttttgacattccctctctgtaaatttttagcccaaaactaaatcagaatcaaacagtaacaatcatttattgaaacagtgaactaaagattaaaaattgcaaactaaatcagaatcaaataaagcatattcagatttctatttcagtaattttttctttcgtactgaaacaacaaagatcgtaacctttttttagatggaatcatggaacagaaagaaaaaaagattcaatagtgaactaattaagtctaacaaatttgatttgtaagtaattgaaatccttaacagaatatttttaatcgaatccaattcaataagattactgccttactggttatgtttataaacaatttcacttccctggaaaaaaaataaagacaatttattgtcgctaatccgagttgattagaatgatttgactaaattaaaacagtcaactagggattatagattgcaaaccctaaaatcaacggtcaacgagtgaaaacacataaatatgtttgactaaattactgaagaacaaatagattacaaaacaattttattgaaccctaaaaactggtcaaaagtcaaagagaaacttacacgggaagagaagtcaataaaaaccctagaaattctgattttgaagctttttttctctcttatctttcttttgaagctttcttctttcttctttcttcttcttcttcttcatctgtaaataagaaatcatatcagaaaaaaatacaaaaagagatgacgagagattaattaaatattaaatgccataaagagaaactaacctttttttaataaaacaattaagagagcttttaacgaatgagagaaaggtatccaccctcagttacaggggagattcaagcatagtttagaattctccataaataaaaaaacttactttatagtgtattggaataataaaggcatttgatttgtgagtaacgacaaaaccatgttcgattcatcttcaagaatcaccggtaaaaaaactcgaaaaggcaaaaaagctaagatttatgattaaaaaatgtaatttatatatttattttttatctgactgtacgtgagactatgcgtggaagaaaaggaattttcaaatcgaagaagaagagacaaattctttttataaagttgattcttgaaaattaaaaagaaagaaatggtggtcacaattttctaattttaaatagcttttaatattattgtgaaaagtgaaaacatattaaattagttagcatatactgtagagtgtagactggaatattctacactgccgaaaataataataaaaaggcattttgagtctactttttatatacacgaagcatttaattaaaaatttattttttaatgaaattcgtctcagatttaaatttaaaatgtttagtaatgcgaatcttatagttattaaattttaaatttttttatttatgtgcattattttttcaaaatagttaaaaatttctcatttcactataattgtttctgttatattttataattcattcgtcatctttcgccatctactctcttttcaccttatattggctcagatataatatattcaactataaattagtttttaagttatatagtatatactttctcctttctatctttcaatactccattcttatttataacttgcatgattttcttattaaagtgaacatcaaagaatttggagaagtgtttatcataaggtttctttgacgatttttgggtgcatgttaaattgttttatagatgacaaatctcatatatagctcattcctattcacaaacttcggatttcattgttaaattttatattttatctaccgtttaaaaaatacaaaattctcttttaatatatatgatttgacattatattattctagatattatttttaatgttggttttcttcaaatgtgtaacttaggaaatcataattctaattttaatatatatatatatatatatatatagatatatataaaaaatccttcttaattataattaagaaatcttctatctagcattactattctaattcccaatcagcattcacaactattattattacaaagttttattattcgatttgattatatatttttctgatgttcaggcaagtttttgttttatttcaaatcacctttatttttttccaatatatatgttagttttctaaacactgactaatatttagcttttcatgcataaatatttagctttttttatgttttttgtttaattttaaaccaccttaattgttttcaatatatgttaatttcttaacattgatcaatatttaataaacaaaataagttttactggcttttcttaaactataaaaaacaaaaaaaaataaaattaaggtggtttaatataaaacaaaatcatttctactcgaataacaatattttataacggcaattacacctcaaaatcttcaaaacatggtgtatgtcggaatcctaggtttgagggttcctagcatggcagtgggagtaaccatcaccattttagaaaaccttgttaaacaaaaattgattactgtatttttttttttttgcgaagaactacatacgttagaataacaattaacaaggccgagtaaagattatagaaatattaaaatgtttacaattttcattgataaaaaaccaactaaattagacactaacatatcttttatcagactctgggatgatggatattattaaaattctatcgataaaaaattaaaatataaaaaatatatgtagtttaattgtcatgaattcttattattaaaacgtgtgttttgtgtttatgatatttaggctgctatcaaaaagattagtatatcaatccacagtgctagacataacgtttaggattggtaaataaaaaaacacctttcccagcattaatttttcacttgagagaagttgaatttagttttctatattatatatttaaactactccagacaataaaatatgcttatacttttgggaagatatacttaagacaaaaaaaatgaaatttttatttatagccgatcatttacttaagacaaaaaaaaatgaaacttaattataaccaccaagttaactactatattaacctaccgaagcaaagcttaactatatgctatacgtggcttgtacagaaaaagaactcacaaacatttttccttctttaactcttaacattaaatacccttacttaatcaatagattaattcatatgtcacgtcttatgtgttgtctttccactctttaagtggaaagggttttgcttaatccttttcaaacctatctcatgttatcattttcgtatacaacataatatttagagaaaacaacaaataatagttatacctttttggttcaaaaaaacaaaaattaaatggtaagtttaaaactataaaacttgtagttgacgaaaaagtagaaaaaatagtagaaaagacatcgtagaagttgcacacaaaaaaaaaaagacatcatagaagaaaaatgaagcgtgatattgattgattacataagtattatatagaccagttattcaaaacttgtatgaataactaggttatgattattattacctcatatgttcctaagttttaagtttttcacatatagtaagaaaataaattaaaatttaactataaatgcacatttttgttatttacgattttctgtaacgctaaaccaattaattaatagtaaattagttttcttgaattttacaattcttcatcattttgttttgaaattgtttttaaaacatcttttaaaatttggaataattagggaccaagggagattcctaacctagtttttgtccgaaataatactctgttagttccaaactaatccaagtttttctttaagaaaaaattatatcacaggccagtcatgcctaatatattttctttatattttggaatcaaagtgttccacgtgaatttttgtaatttggaattaaagtgtttttgttgtccaatcaaagcgacaatgcctaatctattgtctttcataactgttcgcctgtcatttatgtccaaactatattgtttacgattttcatcaccaaaactctttaattatactaattatcggtttttaaatatcgaaaacactcagttaacgtattgcattcacattttaagaacccataatattttagtaaacattaatttttgcatcataagcgctaacacatatgtatatataactctattaattgacaaaaaaaaactctattaatttgttcactgccaaaaaatataactattcgtttctcaactattttatttatattttatctttgttaatgactttgtaaataatgttagaaacctaaaacatttatatacaatgaaagaagaatagttaagatctaaagttaactagtgtggcatgatggcaactttagatctaaagttagatctagacttcaaaaaaatcactttccattatattcaagttcgatatcggcttgcgtccttttttttaactcgactctcaaaatggtatgggtaaggtaacattacctttccccaattgagtggttagttctatatacgctttcgacagcatatacgattgagtgtgttgtttgtaccttctggaatcatgttttgaggtaggcaaccaaatgtgtgaggtaggcttttacgtctaaatttcttcccttgctttaatttttgaaagattcaacgggcctgttttctcctaagctcgaagctagtcaatccaaatcaatatcaggaaaattgtggaccatatatatgtaaccttaatcaagaaaagaatggcaataagcagttagctagtttaatagtctagtttagtggaagaattttagccgttaatatatttgaaagagttagttcatctatatgtttacagaattggattactcatacaaaaagtaaatgtctttgttcaattaatatttctaagacaacctaatttttaagattagaaagatatcgaagtttgtggtcctatatcaaatcatgaacgataaacggaggacgtacgtactatgaagtattttatataaacatgattttctgaatcattatacatacaaaatttaacatgaaaattggataatgacaataagaagtcgacatcatcatataactaattctgaaacttaatcgcactagagaaattaattgttagaaaataggtaatataaccaacctcaatgccacaagtcgtattcggtgcaggtaggcaaccaaatgtgttaagttaatgctaaataacatttgatgttggtatgaagagaaaagttaaatcactaatttttggtttggtgactcgctctcaatagcaatctttgtgcttaacaaatcatcactactgatgtcaataaaaaaaagagcatcattactattttatatagaaacaataaaaaaacaaaaccttaattagtttcattcctccaaatgacaaatttaagatatttactagtattagatgataaattattcattcacatataaaactgcataaacataatctatgtttttaatgactgatataggctgaaaagaaaaaaaagagactgatataggctttatatgaaaatactgcatttgaaaaaatttcattccttacatgttttttttttgtcaaccatgcataccttacatgttattttataaaatttaagacacaatttcagattatcaaaaaaatccaggaatttttttttttgtccatatttagatcaaatacatgaaatttataaataaaaaatttaccctctattctagttaaaatacgttttgatgtagattaaaaatagttaaatatgattccaagacacataatttatttttgattatatttagagaactaacgaaaatggtggcttcctgcaatgttgaacaaaactttttaaaaacctatatacttagaagttagaaagtacattgatttacgaatttccaaatttagaatttatatcatagattagttaagaaaaaatattgataattttatctaagactcatgggagatcgacaactactcatattggccaatcttaagatttcgtttgttgcatcaaatctatatttgtttaatcacgaacttattatatctataaagtagaagtaactttatttctccttaatatattttgaaaaaatgcaattcctaatgatttagtatagaggaagttcacgtagacagtcaccattatcgcttcccataggaaatattttattcaaaatacagcagacattgatttttttatttatttttttctgtgataacatctcaaattttaggtagttatgaaatagataatattgaagcgttttcatttataatgggccttataaaaccaatctagcccatatcactaccaacccatttattacatccgaatctaaattaatcaaacccgtatattaaaccgggtttaaaattctgacccgtaattgatccactgacctagaaattggggggaattgaatcttatccataattcaatctcttccaatttctcttcttcttcttcttcttcctcgcgacgcgttaatggcggcttcgttctcactcacgagcttcatctccttcatctcaccattcaaatctcaaactaaacctacaccaccaccaaatctcactcttccttctccaacaatctcccaaaggcgaagaaatgatctcgctatcgaatcaatggcggtcgaagaaacttcctcaaccgcttcttcactttcctctgagcttgcttccgtgatttgtccctcgcttgcttactccaacacactcttcttcagttctggatacaatgtgcaagtgtttgttgaagataatgagtcagaggagaggcttgtgaatcgatttaggagagaagtgatgagaactggtgttatacaggaatgtaagaggagaagatactttgagaataaacaagatgagaagaaacgtaggactcgtgatgctgctaagcgtaataagaaaaggtaatatatctgtgttgaaaccgagattgggtattgatgattgaactgtgaagattttatgcttagttcgtgaaaattatcactgcctcttaggtttagagggttgaatggtctcaaattttgagtgtggttcatgttacttcaatttggtgattgttttgttctggttgatacatatattgaaacagagattgggtattgatgattaaactgtgaagatttgatgcttagttcttgaaaaatatcactgtctcttaggtttagagagtaaagattttgagtgtggttcatgtttcttcaatttggtgattgttttgttatatctgcttgtgcagtgattgattcatttgttgaaacaaagattggttattgatgatggagttcaatgatagcttgtgatggtcttgatacgtagttattgaacacctattctgtctcttagctttagaggattgaaatagagacgttttagtcacaaatttgtatgatatgtttgttctgtgagaattcttatgctatatctgttttccagtgattgattcatatgttgaaacagattaggtattgatgattaacttccaatgatagtccttttggtaacttggttattgaaaaccttcactgtctttattggattcatctgtgaagattttgatacttggttattgaaaaccttcactgtctttattggatttagaggatggaaatagtgaatagatgagtctcagatttgtatgtggtttcatgtttcttggttgggttttattttcaggcgtcctcaagcaaggtttactcaagaaacaagagaagaagcagcagcagcaactaagagtaagaaaaaagatgaggaagaagacaactgggagatgcctggtggagatgtaccttcttgaaacacgattttagtatataaaatctccggtcttttgattaaatttcgtattatcccgtttttattacttggtacattgtgagttggaaatgtgtttactgcatattataacttgcttctagtattgagttctcttaagggcatcttcatttgttttataatgtctaaaatcagttgcatttgttggggctctccatggatgctattgttaatctgattcagtgctatttctctaaaaacagaagtcttgtgattttggtccaactgacagatttcccatacaaatatgatttttgttttttagagaggatcgaactcgagtttacaagtttcacccttcaacaaagctttacgtaccactagaccacatatgtttgttgtttggaagactatcttggcttcacgatcaagtgcatgttgaggcttaatcacgttttcagttcgacaattctaatctttatgttcctttgcttcgttgattttcgttaaactttgtattgcttctattagacgacaaatagaaaaaaaaaaatccaaaaataagatacgaggtatcaactttaaccactgcaagttaattattagttgttaacaatcacaaaggattgtgtaatacatatcagcaaaaatacattttaaaagttgataaaactaatcggaacaactgaacaagtgttcgtgattaggtacatttgattgaatcatcatgattgaatcttacaatagattacaacattctccatgttttcaactttttacgacgaatcaaacacggaggaacgtaaagtaatgaatacgtaatctttcactaattaatattaaatctcatattaatttaaaatttcaacttgcagaaaaagtatgtgactatagctagctagtcggtggagttaaccaatcacttgtaattaaaacgaaatattataatttcatacataatgatattcactaattaatcttttcattaggtaagaagcaaccaattatatatgcgttcacccatcagcaatcttacatcattatcattatgattgttttgaatgaaaaacaagcacaaatgcaacccatatttttgacgaaatattacacacacataaaagttttcctttatgattctttcgtttcatgcttgataagttatcttaattatattaggtacaaatttcacatagttgtaggtttaatatttattaatcggaaaatataacaatcatagttgcaaacacaaaattcaaactcacggaaacatacaatcttttgtgtagcaaaggtaagacaattatgataccaaaatagcaaaaataaagtctaaatatacttaatatggtttaatagattgacatcacagaaaataacataaggtttctttattccaaagcatttgtaaaatattattgatgtatctatcaaaaagacacaaaacattgttgatattggaccttttgtttctttatgctcaaaaattggattccgtgtgaaatttgaagtgaccgttgtggaatctttttatacaactagattaacaagttgtcaactcttttcattgaattattgagtgtttttcaaattttgcatgaatattatagtttagtggtcctgaccttaatgatatattgataatatataaagtttgattattgctaattatttttagttcgcgtttatatgtatctggatgagaatcgtgttctctctaaggaaaattagggtaatgagcctttataacaataataaactatttaaaagagaaattgaaatttatgtgttctgatgaaatttagaacttaaaagagttcaaccgctattgattttcatactattttttcaatgaataactttgtaggtattttgaatttttggtaagtgcgtctaaacggttcagccgctagagcgaacatgacttgactccattcagtatttttggagcgggggcaaacatatacgggagatgagtgcggttgaggaaattggtcctcacggaaagttttgtgttagacattaaaaaatgttgcctctagcctaatgcacaagcatctattttttagtgaggtgtgttgtgtttactcttacagatgatagaatgtgtctacatgtgtagaatgattcatatatgcattaatgatcatccatagtttatactgctgaggatccatttcattaaaaaaaacaatgaaaaagtatatataggaaactatcaaatcttggtatcgttaccgagtttgtgtgtggtctgtcagatcaatttagtttataggattctaggagactaattgtttgcacacaaaaaaaggattcttaaatgattataagagactttggttccaaactcgagcttttaaaaattgtcgaagaagaagatatgtggtcagtgtttgcaacggaaatagattcttttacgtaatcattttagatgttttgcgatatcactatacctagaaagttgaatatccgagctgacacccttgcaaaagggtttattttcgagatgtcattttttctatataaattctcgggttccgaagtgattggctcttgatgcctaccttttcgaacctgtttaataatatatagaatattttgtcgtaaaaaagaaaaaaatcccgatttcccgctgcggtatattgttttctgaaaggcgattctaactaagtgttgtttatatgttgtcatttggattgaaaaacgaaaaatcatctctaacatacatacatatcgtaaaatgaacataaattcatggaacctagaaaatcgatttgctatagttgtcgtgtctaatcacagtaacgaattaacacgacaatcatttaacaacatttgatctcattcgctgattgatacgatactcaaaggagcattatttagtcacggtcgtcgactgccatagaaatctatatataacaattaatattattatgccacctacatctcgtaaatacttcctcacatttcttgtgtactgttgttacaacgaatgagtgccaaccaatgattaaactaaacttactaaatatttgtacacatatattattataattcctccatatttataagaattaaacttcgtaaattcattgtcaattttttcaagaaaatacaaagcgtgaaagttgtctacttgtctggtcggccagaagcgcagagtcgacttcgtattcattgtttatcatcgtattactctcccacatattaataatcttattcttatccaaattatttgcttttgcgtacacatttcacgaaagtttctaaaattgtttttcttgtaaaataccatataaataaagcgtacgtaaatacgaaacacatcgtgatagtgagctatatatataatttagatgttaatttgatgatatatacatatatctccattttcttccctattgatgtgttatttgttattatttactcctccaatgtaatttattagaaataaagcgtatgtaaatacgaaacacaaattagtcagttttccgtcgtccaaaatacaatgtcaattaaaaaaaaattatagaaaaaaagtaaagacactttaataatagttttatatattaacagaatgtttcaggtttactgcaaaataataaaaataggccacatagcgctcttgtttgttttcacagtttctagttctaccatttggtaaatctctaatataaaattttcaatattaattgttttaaaatcatatgaaccacgaggggacacgtgtcggatacaaagacaaccaattggatcagatctggtcttcgataggacaagtattcctgggaccagagagagagagagagagggacaagatcgccgttcaatagactctttcttcctattaatcacgtggtgaggtacttaccacgtgtttatattattggcttcttacgtgaaccaatctcatggtcctagttttcacatacatcgttttcctttgtgttgttgtttttctatatgacaataactttgtatctcttttatggtttatataatgtatatgcatgcaatgattaagttctcaatattacgattactctcttggaaacaaaaattctcgtataaactaaagatttgcaaacttcaaaagattatagaagaacaagttgtataaaagtgtttgtttgatcacttcaagagttggagtttttgtgattgtgaccattagagcatccacattggtgattctctagaaatgtctttacaataattattataaaaattaatattattctaattttgagtcatttattagttctgtatgatgtctttaaagatacaaaaatgtctctatagagatatgaaagacacaggtctcccactgtaccattttcttttttttttttctttttcttttaaaaatttaaagacactgttatttttttatgcaatagggatggtctcccactgtaccatttttttttttttttttaaaaaaaaaattaaagacactgttatttttatacaatggggatggtcttagatctccagaagatacggcgtattgaaaagtactgctgatctgtccaatgtaagggctgagttggaactaaccttcaatccactgagcgacatttgtcaatttcaaccaaaacaacaccaactggatgattatattgttttcttgttatttgattttcttgatgatatgtacaaaactataagtcttttttggtatcaatttagaccattagctaggacgcaacaatatgaaaccgtatcgctataagacattttaaacctagattttaatagttctactttcaaacaaatccgatagtttactcggcctcctatatcaaacaaatgaatcactatacaaggccacatagaaaaatcttatccctacgttatacaaatacaaattcacaatttttatttataataaaaaattcgcaatttgattagaacctttggttgttatttattgtacacataatattaaaatggtcaatcattgtctcgtcttgtagtttagcatatgtatggattacatagttttctgtctgttaccctctcacaagcataagcgtcgtctcgccaaaattagacactattcatatacacaaatatagatacgtatataaatatgtagacatttacaacttataaaagaaaattaaataaaaaacaaaagtcggcaaaccaatttgcatgaaataattataataattttttaaagaaataaccaaccaccaagaagtgctttgttaacagagaaagctctgtaagaaccttaaaaaggttctgttgcagaggttccgaccaaaagccagagtttcatctttatgtgaacaaagacagagagatggtggaagaagatttaaaccagattggtggtaatagtaattacaatggagaaggaggcgacccagagagcaacacacttaaccaacctctagttaaggctaatcgaacactttcttcaactccacttgctttggttggtgccaaagtttcccatatcgaaagcttggactatgagtatgttcttcttcttcttcttctctgcataattttgaattcaggggtcttcttttaatctttaatctaaatattgacagaataaacgagaacgatctgtttaagcatgattggagaaaaagatcaaaggcacaagtacttcaatacgtgttcttgaaatggacgttagcttgtcttgttggtcttttcactggtttaatcgctactctcatcaacttagctgttgaaaacatcgccggctataagcttttagccgttggtcacttcctcactcaagaaaggtaaatcatcactatcaaaaatattcaagatcaaaaagtttttgttaccttttatttttagtgtatgatgattgatggatgagagtgtcttgtggtggaaacagatatgttacaggtctgatggtgcttgttggggcgaatttgggactgacgttggtggcgtctgtgctttgtgtgtgctttgctcctacggcggctggacctggaatccctgagatcaaagcttatcttaatggtgtagatactcccaacatgtttggtgctactactatgatcgttaaggtttgtttctgaatttggagatttgtaatgattagtatgtatgaatttgaattttgactcacggtttagcggggtttgatagattgttggaagcattggagcggttgcagctggacttgatctaggtaaagagggtcctctagttcacattggaagctgcatagcttctttgcttggacaaggtggaacagacaaccaccgtatcaagtggcggtggcttcgttacttcaacaacgatagagaccgcagggatctgattacatgtggctcagctgcaggagtgtgtgcagccttcaggtcacctgttggaggtgtacttttcgccctcgaggaagttgctacttggtggagaagtgccttattgtggcggactttcttcagcacagcggttgttgtggttgttctaagagagttcatagagatctgcaattcagggaagtgtgggttgtttggaaaaggagggctaatcatgtttgatgtgagtcatgtaacttatacttaccatgtaactgatataatccctgtcatgttgattggtgtaatcggtggaattcttgggagcctgtacaatcatcttctgcataaagttctcaggctttacaatctcatcaatgagtaagtgttagctattcaatgagtcaaaacccgttaagctagttacttactttgtttggtcattttgcaggaagggtaagatccataaggtgcttctcagtcttacagtatcactctttacatctgtttgcctttatggccttcctttcttagcgaaatgcaagccttgtgacccctcgatagatgagatatgcccgacgaatggaagatcgggtaacttcaaacagttccattgccctaaaggttactacaatgatctagctactctgcttctcaccaccaacgatgatgctgtcagaaaccttttctcttccaacactcccaatgagtttggtatgggttccctttggatattctttgtgctatactgcatcttggggcttttcacatttggtattgcaacaccgtctggtctcttcctccccatcatcctcatgggtgctgcatatggccgaatgcttggcgctgcaatgggatcatacacaagtattgaccaagggctttatgctgtccttggtgcagctgcactcatggctggatcgatgagaatgactgtgtcactctgtgttatattccttgaactcaccaacaaccttcttttgcttcctataacgatgatcgtgcttctgatagccaaaactgtgggagacagctttaacccgagtatatatgacatcatcttgcatctaaagggcttacctttcttagaagcaaatccagagccgtggatgaggaacctcaccgttggtgagcttggtgatgctaagcccccggttgtaaccctgcaaggtgttgaaaaggtttcaaatatagttgatgtgctaaagaacacgacgcataatgcattccctgttttagatgaagcagaagtacctcaagtgggtctagcaactggggctacagaactccacgggttgatcttgagagcgcacctcgttaaagttctgaaaaagagatggttcttgacagagaaaagaagaacagaggagtgggaggtcagagaaaagtttccatgggatgaattggctgaaagagaagacaactttgacgacgtggccatcacaagcgctgaaatggaaatgtatgtcgatcttcatcctctcaccaacacaacaccttacacagtcatggagaacatgtcagtggccaaggctttagtacttttccggcaagtgggactccggcatttgcttattgttcccaagattcaagcctcaggagtgagtttatatgccttaactctcttttactcccattcttgctaaagcctctaaacaacactaacttccttccaatgcgaatcaatttttttgcagatgtgtcctgtggtagggatcttaaccagacaggacctaagggcatacaacattctacaagcctttcctctcttggaaaaatccaaaggtggaaagacacattgaaagagctacttgcttgttgtaagaaatcgcttgcagccttgtgtttttcttctcattcttaaagatgtatctgtccagttttgcactttttcttcatatccaacagaagttgataagataaatattgcaatgacacaaaaagagagactcatatctccttatcaacaggaacagagcaaaactgtttccatctattagatggtctcctaaacctctgaagttcaagtgttacagacattaactaataagagtcctgtgacttagcacgcactttcttaattcccactttttttattcccgatttcttctttttcttgctcgcaacccttcttttgaatacggccaaaacttcaatgctgaaaaccaaattgtaaaataagcatgaataatatttgtgcagtataaaatggaagtaaatgtttctataatacctgtcggttccgggaaagaagttgaagccatgggctttttccaactcccacgctctgctagataataacgacttgcagtcctaagccattgtttcaaagttagaatgaacgaaagcggcagcattgtttgataccagtgtttgtctctagtacctctttaaagctttcccaaccacagcttatatatatgagtctttgcggtagtgtattgttctcctcagaggtctgcttgttgccagcttgaattgaaagttcctttgctcttaaaatccacggcctcttctcctcttttgcgttcaagcttgaactgaaagaagagaaaagtaacatatccataaagaactggcttttgagttttaatgatagggtatcgctgattgtattgaaatccaaaacttattgtgaagaagtttatcaacctctgtgatgacgacctcattcttttctcaatggagggaacagactccagcatctgacggagagaagcatccagacctctcctaggaggatccacaacgactacatctgatcctattatccacgaaagagggttctgcagaattttgaatacaaggtaaaacacattattataatcttttgaaaaattggaaatatttttgcgaatagcaaacactacttacaactgaagcatctgcatggtgccaactgatgctgcaattcaatgagttcggcaaccgctggattgttttctcaaaagacagccttgcttctttgttaacctcaatgcatttgacagaactgaaatcagatttaagtataaagtattgggtcaatcttttcatcaatatgaacatatacagtctttttagattaaggacagatgtgaacaatctctgttcttgcctgcatttcctcgatgtagctaacgataatccaatcactccggctcctgcatatagatcagcaacagatgatccaccaggaacatacttatgcagtttccaaagcaagctatcaaaagcctgacacaaacatttgacatattagtaatcatagagtattgactagagcaaatatgaaaatttactcaaaaataacaaatcaaatgtgctgatctactccccgctcataaaagcttaactcaatatctgcatgctcacccgagtatttgcctggccaaaactggaaggatccaaggatatgtcaattcctcctacatgttcccagaaatctctctcacctaaaagatgcctccatctgtttccaaagattatctaagacaaagggaataattaaagccggatgttaagcaaccgaacaaacgaaatcggaacacttttagacagaaatttctctgaatatttagccgtagcataagaaaatctggttctctgactcacattgttggttgatgtctgaaagttagcccagacagaatgtatcaggtgaaacttgctgtttggtccaccctttctccacaagtactgcaaatgagagatatataagtgataaaaatgaatgaaacaagctaaaggaatcacgacgtccaaaagactcacggtggacaatgcttgcaacttatctgcattatgagatctctcatttctcgagttccaaaccaaggacacctgcacttttcctgaaaccaatattcaaactcagaaaccactctaattgcaatgcagcgatatcactgtgaaaagaaactaaaaccatagaaaaatatgttcaaccatttttatatctctctggagcacgaagatttgtactatgcgtcgtaacagccatctatagaaagaaaaaaaaaactcatcaccacactgcaccagattaaatagcagaacagccaaaaaaaactcaaacataaatcacctgaacatatcgtaagtccccagtaccctgatcctcatcaaatggcacaacatcaaacaccttaataccttaacatatagccaaaaacccatcaaatggcaaatacacataatcaatggcaaaacacatataagaactactatctaccttctctcaataactcaatggcagcattaatattaggatgatgagctgcaaaaaagtaagaactcaacctaaatcaaaactatcttgaaaaccacaaaatcaatgtaaagaaattatcaccagcgcaatcaaaattacatttgcattcaggaatatcaacaacagtgtgagttccttcttggtacaatccaattaatgcgttatctgaagagccacgaacagccaattttgctcggcatctccatccccactggccacaagaagcagcatcagatccaaatattcatcaccaaaaaccaaaaacgatgagaaatcagaagaagtgagaaaattagcaccagtctacaactgtcgaaagtgaaatcatcgacgccgtaacgcttgaagaagtctgaagcttcgtcgacaacagctggacgatggagattgaactcttgcgtacatcctgagcacctgtgaaaattccagagaagagagacgaaatcgaatcgatttatcacagaaacttaagagattgagatttatcagagagagagacagagagagacagagagagagaagcgtacgattggaaatgaggacattggagagagcaagctagtgagtcggaggaggttgacggcgggagaggaacggaagcgacgaagggagccgaagcaggagctgacacgcggcagttgatgattggaaaacgaccgccgaacgagaaaaggctcgacgaattcatcattgctcgccggcgaaagatttactccgtggcgggaatggataaacccaataaatattctctgcccggtttgtatcacacattgatccgacccgatccataacccggttgagatttatattatcgtttcctattcgcttatacgtttgtcatatactaagaggggttgtttcttaggttaatccttatgatttttttttgtcattgattactaagaacatcttattttaatttttaaaaataaaaaacaaaatgataaaatgtctcttatataagaattaaaatgagatatttttatcctaaaaactaatataagagacaaccaataatgatgctctaaagtgtctaataaaaaatcgattaatagaacaacacattcgttaatgcataattattctcctagtgacactgtaatttgtttttgtctatttttgtatgtcaaactcaaaatatattaatgcatcaatattgataaaaaaaatgtgatcaaaatatattaatgcatcaatattgataaaaaaaaaaaaaaaaaaaattgcatatatagtctctcttgttccttctcaaactgtgaatcaaaagagaaaggtaaaatagttacaagatacaaaagttgcaacaaaattttcatatctatgcttgccaaaaaagaattgttgattaaatacctcacaatttgaaatggcttaacgtgatcatctacgtccggtcaagaaccattgaggggtttgtgtaattacaatgtgtccaattgtcaatccaaagatgagtccagctgctaacgctatggcagctgcaatccaacttattacttatttatttaaagtattgttgtggaaaattggagttgaaatatttgctttgtactagatataagttattttgaaattggattaagattggtgtcgtgaaaagtagacagaaacgagcattatcatttacttatttgatcctgtatagtgtttgtgcgaaaacatctctcattgtgttacttggtcttggagtcagctttatctaccatgtaatcacaatcattactttcttttcgtttgaagtgggaagattgtgaatgtagaggtggtggatggaggactgagttgctcaagcggcgttctagttagagctgtcaattgggcaggccgcccatgggcttgcccagtccaaatgcatatggatgggttatattccggaccataaaacaaatagtccaattgggcatatgatcagttttgtccgcagataatatgggcttgaccatatggacaatgggttacccatgggcatgaattgagtcaataaacatattttcattttaatcatatttttataattttaattacaattacaactaaataattttcaagttctatattttacatttataagtttctattttttttaatattttaaattttaataaattatttcttattaaattatttactgttttgaaggaaagatagtatttcacaacacaatttttcaattttacggttttgacgggaaaaatacaattctccgattttacgattttgacggaaaaacgtaattccgcaaactttcctctaaaatcgcaattttattatattggcgagaacacaattttatggttttgacgggaaaacgcaattctccgattttacggttttggcgggaaaacgcaattttctgccaaaatcgtaatgttattatattggcgaaaacacaattttacagttttggtgagaaaacacaattctccgttttggcgggaaaaaacaattttacgattttacccttttggcggaaaaaaacaatttcatatttttccgccaaaatcgtgattttattgtattagtaaaaaaaacacaattttaccgttttgtcggaaaaaatcaaaatgcaaaaacacaattctttaaaatcatgatttttgatttatcaataataaaatgggttgatcatggacttacccacatggacatggtctttactgggcatagacatttttcggaccattgtccattatggaccgtccaacttggcccataaaaaaaactgtccgtacggatacgcccaaagatccctggacggaccatttgacagctctagttctagttgaagaaatggctgatactaatgaagattgctacatagtgaatgctgcggcctacgttggttactaagtctctctattcttgtgtggtcgactccgagtttaacaatgtcatcgtcgtcgataggagagaaaaaacgagaaaaattgcagtcacgtttagttgtatatctttatttcagaaccaatttggtttgtaggaatcaataccacaatttcagttaaaacgtaggtttgattcacactccatatttcagttagagactcatcaaatagttgcagcgtttggtacggtatagaaataatcgtgttcaaaagctcagattgtggtgatcaaggatgtagagtgagaagcgcagacatggcgatggtgatattaccatattacgaaaaaattgaacatgaataattcatatctctgatgacgagaaaaaatgatgattcaactctttattttcattgatatgtaaatgaaatatcttaattacaatttctaaaaaaactttacaaaccaaaaaataatatgtagacgtaaaaacaatgtaaaaattgatcacacgatattttacccaaaaatatattaggaaaagaatattgaaacaagaattgagttaaaattagtgcaaaaaagccattctcataagaatctaaattgaaaatgtgtttgagaggaagcaaacttaggcatgatcaaaaaaaaaaaaaaacttaggcatgaccacggtgacggtttattaaccaacggttacggttatataaaaaaaattattgtaatcttaaccactatatatacggttaaaacgattacggttcaatataattacggttaattgatcattacaatacgagtaatattagaggtaaaattttaaaaatatccgaccttttatactgtttttaataacatgaaaaaaattatcgttcatcaattttcctttatttcgagcaatatgatattacaacatagttgtttgagacattatttttctttaacatagattttttcatatgccgtatatcagaacattcgatccttgtctttgcattacacttacaatttatttgtaaggttttaattaaccacagttagtgtactttttaaccatggctaatatatattatggtcaactgttaaggtttttaaccgcttgatacagttatagatcagttatgatttagggacagttcggttacggtttaaaatacagttacggttagaatttttgctcatgcctaagcaaagttaatgtgatcgtgaagttgtaaagtgtaattttgcatttttcttgtactttgtatttccttttgcgtgtgtttttttattaacgtctttttgtttatatagtttacgtgatcgtgaatttgtggagtttctgttatcgtgattttgtggaacttccgtgatcataaagttgtgggggtttatttttgtatttttattgtatttttttttttttttgtttatgattaatttatgtgatcgtgaatctgtggagtttattttagcattttattgtatttttgctaaattaatgttttttgtttatgattaatttacttgttcgtgaatttgtcgaatttatgttatcataatttgttcaatttacgaagttctggaatttatttttgcatttttattgtatttttatgagagagagagcaagagagagttaccgtcactcagttacatcatccaagagtcacttgttctcaggtagaccatgattttttgctgctcctaaaagttagaacattttgttatttactttgagcatggtgaaacgtattaaaaaggataatcacaagataaaatttatacaacaaaattatagccgagaaataattaatgaaacttactatactcagctgaggttgcttctcattcatacttttaacctggacaaaagtaatgcaacgtaaatgaatttcacatccgttgaaaatcatgaaactaaatatactacagaaacaagttaccttaacatgaaatgcttggctctctcatattcacaagacttttaatttttcactgacgtctttaagtgttgttacctaatataatttagcgaataatgttatacggatattaaacaatagaaaacacagtcgttataatctttgcccaacattctaagaactgcccaacattctaagaaactactttaccaaacaaaagcttactttcttcgagtctttttaccaactccttaatagatacatcagcaggctcacactaagttatattcctgcagtacacatcaataatgaacaatgtctacatcaaacggacaaaaccacacaacttaatttgagaaaacatgcaataaaacacttaacattctttaatcttgaggcagaaccggtgggagctatcctctgaaaatagaagattataactacacctctgaatacttggaatatatattaaactcacattggttctgttagagaagagtataaaatgatgggaaaatgttgaacatgattactttatcattcatgagtacattgaaacacatctaagacatttgctctttctcatgaaaccatttaccaagaaataagttaaaagaagctattctaaggcaatagatttaaaaagagtaagaaatgaggaacaatcacaaagcaagttcttgacatcaaatattattatccacacttttggttaaagaatttttgtaaaagtttgttttctgttttggaagttgtttggatgttctgtgctatgttttgttttagtgtgtttgaatttcgttgtgtcttagtgagtttaaaatgtttttgttttgatgtttttttgtgtgcatttcagcgtgtgtttttgtgttttgattttttttgtgcatttgagcgtgtgttttcgtgaatttatgttttgtttttgagacagtgcaagagatgtgataagtgagagagagagaaagagtgagctacttcatcaatcaccatacctttgaatggtcttcagatcttctttgcagctaaacacttcttcatcttgaaaccctttgtcaagagttctttgcagcttgaaatatctcttgacaccaaagaacccttgttaaaataaaaagaatatttaacaggaagaaacatgctaccgttaaatcaaattaccttagcaggatgcactaaaagaatgattggtctcccatattcacgagattttggcaatattatcactgcggctcaagattgggggatttcgttacagtcatccacaactagagcctttttatgtgcgtattatgctgattcccctgatcagaaagtaattacccaatagaaccgaaaatacaatgaaaagacagaaaccataactcttaaaaagctttaaacattattgagataaccagaatgcgatataaaaacaggtacctggtcacaaaatttgtagcaccctagggaaccagaacaagatcttttctactactttgacctggacagacacataggcttttattttccagaaacttatccatatccgcaagcatcagaggccgtactcaaacaccaccttcaagcactattcaccatcacaaacaaacacatcataatctgatccataaaaagtaccataaaagatggcaccatcataaacaaacaaatcataatctgatccataaaagtaccacaggagatggcaaaaatggattatcgaagcagctaagaaaaccattaatatgttcgaggcactttgagcttttctggcatttctttagttagctacctttacctggtaattgtttagcgactacataccttcagagatatacggagtttcagctgcaaggcaaaatattatttttagcagcaatatctcaattgagaattcaaaattaaagtttgtgatagtggaggaaggtgcaaacctttgtctcaggatccttgagcttggtgacagtctcgcgccaagcctcgcagtttcctaggtggaattctgaagtaagggccgtcacttcttgacataggtt

SEQ ID NO: 1310 - DNA, 30648 bp, Arabidopsis thaliana
cgagaggattcggaaatagcgtttggatcggattgggtaaagagaaattggagaggatcgtgaagaagagagattgaagaaggagaggtgagaagaaggaggagagtgaaggaagagagtggaagaaaggagaagcgaacaactcgtcgtcgtcgccatttagtttcttcttcttcttctggtcatgggacaatgggattgtggtctctgttttatttcatttttttttgtaattaaaaatattaatttttgaaaataatggtttttctatgcgaagctatggttttgtatacgtaaccgaatcgaaccgaaattgaattgaaatttgtttagtaaaccactattttatgatcttatgaatctggaataaacaaaaccgggtcttttttttgttaccgaatcaaattgaatcgaaaactttttgtactttgaaaataaatttaaacagtaacctttattatggtaaatattataaagaatgttgttacttatatccataacccgtagtacaccaataatcgattttttaaaatttttaaatttaagttgtatttctttatattatttgttttgtttttgtttgatatttgttcacccgtaatatatcatcccatataaatatcgttccaaaccgaatgaaaagtccaaaaacaaatcaggatttcgcttcatttaagaacttcgaaaaatcaaaagcccaaaaagaccaaacttaagagtttaaaccagataatccactcctaattttgaacactaaacacttgtactccataagagtaaaaatggttattcctaagtaattcttctttcgtcgaacttattaaatacttgacttggttgatatctaaatctactagataaaagtgcaaaaagattaatggtgtagtttagagaatcttctgggacggtctaagttcttttggcagctcactaaaattctctgcgtccacatcggcttgatacattggtctcttccccattttccacacaatcccttcagctaaatgttctttgttcggtgtcagcattacaaagtttggatcagctctttggtaactgcaatttcacaaaataaaacaatgtgaagaagatcatgaagctaaagagggttgatttaattttaaacttgtcacaaatggactgacctggcttctcttaagttatcaacacgtagaccgaacccacattggacatttccagtcctatgattagttgttgctgcataaaaaatgagtccaaacatgttcaaataccaagaacctatgttcatcttgatttcgctgcattcaggttatttatcaacgcatacctgaaatattgaatgcgaaagacggtttccaccacgacttgaatgctaatgacaatgttgagctatgagctccgactttaccctgcaaaagttgaaaatgttacatactgagcaaaatttgagataaatggtttctttttgagtaactcgataaggtaaatatttttttataccttcagcaaaaagttcttgttggcctgccaagacgcagccacctgcaataaagaatctggggcattgggtggcgtcttggaatcatcaacccttcaatattaagacgaaatataaagttctgtttctgtatagacaaacagtagctacaatgttttttttttttttacttagagatgttcactacctcgattgtagctcaaaaccaaaatcaatgtagtttgtgattccaactacttggttttcttcgaaaggattttgcacctgttccaagtccattaaatcgatttcatattgagccaaagatgtgctaaactttatatatggaagactagtataagatgcagcacagaaaaaggacttgtttgaaagagttgtacccgtctttggaccactacgtgttggtagaacgaagcaataaactgcatttacaagaaagataacataatcagcaagactaaaaatgctacaaaatggatgatatgccattagataaataatgtggtcgtttgtcaagttccatgagatactgaaaaattgtttggggttaagacttgtgcatacagacagcaaaacaacatgttttcatctacacggattttaaaagaatcacctgagagcttcttgctagttcaatgccaatgttaaaagaaggagtcaaggggctttgtgaccctactccatagccagcagcacaactccagtttcttgggtctgtgtactttgccaaatctttgcttccatctaaaacaaaatccaataacaattgttgatgctcactttctttcaatcacataatttatagatactagtttccacatgtgatgcgtaaaatctgttcaacagaaataaaacaatgtaaactaactcacgtagcggctcatattgtactcctactgtaagacttcccatcttgcttacaagccatgcatgctttggcaattcgttattcgctgaattgaagaatcaaagggtcagcattgtgtccaaaagaaaacaacgtgaattcacagagcaactttatgcgcttaccactaaaaggagtgacagtagctccgacagacaaattcgttgagccatatctcaaccccatgattctatattcttcagatgattttccactacagagacaacatatattcaccctcacaatattacatctaatctaaatataacaacagggtacacacctagatacgacttacgtaatttttgaaatcaaagggtagaccgcaaatgccccgattccatatttaggatagtaagcagaagacctcattagaagaacccttaatgatgatgacaaacaaaacaaacaatttcaaaacattaaactactgtaatgaacataacctccaagaatatatcaaaagtagcacaaagtttacggattcgaggttgacacagagagatcaacaaaagtatgaggatcatcaacatcactgcatatttatcaaaaacaaactaatcagtattccaattctccaacaactacttgtaatctttcagattaaaaactaaagaatctatacctttgccagcgaaactccgcattcccaacaaaatctccttccactctaccatctacagcacccgaaacctttagactattaaggaaaattctgattttctacatatccctaatacatccatttagagaaaattctcgaatcatcactatatagaaactaaataacacaaaagagatttcaaaattggatacagatgcaaccaaatccacatgaggatcatcagtaggcttcaacaaaaacttgcccgtgaatcgattagcttcttcaaagtaatcctcaaatagacatctcaatgcaagcttcccaaacaacaaattatatgatgattccaacatcctgcatcaacaacaacaacaatttctcacaatcgcacaattacaatttaacctataaatcagaatcgatctatttgattagattaggttatacaaaaactacttcgaaatcacgcgattctaacaaattgaaagtatgaggatcagatcggagaagaagaggagatggtagacctagtgcgggcggagagaggagggtaatcaaagagcggaggaacgagtaccaccggaggcggtggttcttttttgacaagagcattccccattgttctagaacggagaagaagagattctgcgacaacgagagagcttcttcgatgaattcaatagttagtgagagctctcggcgatagtctcgcttctgcttttgcttcacgtttgaatatttcaacattcttctatattaagactttatatagtaataaacctaagcggcgctttaaattaaccgactaatccaaaaaaaaatctttagaaactagacattatctttgtaaaatttaaatattaaattattcgtataatatttttttcccaattttttggatattatttattgttgtatacaatttgtcaaggttatggagaatgtgtttatgacagttttggtaattgcaagatattgtgatgcatatgtgaatgttttgaaaccatattttaagataacattttattaaatttcaaaattttggttctctacactgctacacaactgaaaagttgtttttgttttgagatatttttttcttggcaattcgtggtgacgatgatgttgatttggagttattgcagcttctagtggtggcttttcaagcctccaaatcatcagttattggcattggtggtatttctttagctcactgatatgttttggttttgccttgatgttgatgttgttgtgagttgaggtattagcgttgcaatgcgtttgctgcctagtgttgtgtttttactatgcactagtggaggtagtaagactagagctgtcaattggtcaaaaggaccatgggctcagccaaacaaatactattacgaacatttaaaatttggccaaactaaaacatggttttagtggactcagcccaaatagatctgcagttagaggtgggtttgaccatttggtcaatggataagtccaccaattaattatttttgcaatcatctgtcttcttctcttcttcttctttcgttttttctgaaatcgaattggagaaaaacacaattgagaatcgcttctaaattcaaagctctagattgtcttcttcctttgaggatcgtcttcttccttcgaggatcgtcttcttcttttgagtatcgtctacaatgggtgatttctttgatgaggtacggtctcttatttttagatctgggttttggttcagtcattctgtttcctttaaatgtgacttagctattcatgaaaattattttgcaagataaaaagttagtatttgtttgttgttactataagtttatgtattgagagatagtttttaaacatcattatcacaatgttttataatatgagtcaatgttttgttttgtttaattgtttgagataatggataatgctattattaacctgaatgatgaaaacaataccaataaagatttggaagaagatatggatcatgaaggcactcttcctgagaaaatgaaaggtacattcaagccaattcgccctacccgtagagtttctaagtgttgaaataaattcacaataattggagagaagttacctactagtgaacatgatattagatgcaacaaatgtaaaacacactatatattgaatctatatagaaatggaatgacaacgttgctttgtcatattagaacgtgcaatggaagtacacagactgttcaaaagctagatatttttttcgtatactgattgcaatggccattattgagcatgatttaccatactcgtttgttgagtataggaggattagaatggcttttggttatgctattctacaattcggttatagagtagaaacacaacattttagattagtattatgatgttaaactttttaaaactattttatgatgactaattacaatgtttgtcatggtcattttagattagtattatgatgttaaactttttttttatctccatggacatatccaattggtcttggtcactcttgaacttggtcactctttggcttggtcatttttgtcaacagaaaaaaaaatgtccaactggacaagaccatttggtcatggtcaagcccaattgacagctctaagtaagactaatggtgtttggtgtagctctgagttacaaaatatagctttgtactagttgcctttggcattgaacttggtagagagaacttacaccgtttatatatatattttttttgtgaaattccattctgaagtcgcttatggaaatgttcgacgagcagctctcgtgtatgagagctgtgggtgcttcgccgttgacaacttagtcttggactttcgttgaaaggtttctagtgttttttatcttggtacttcggctcttataacttgaaattaacatttgtctcaaacaacaattttaatgccaacactagaatcatcatcacttcgtataactctattagtttgtgtttctgttgagtagatggactgaaaaccatgtctctgatttattcttacgtatttttaatttctttgccatacgaccattttataggtaggtgtacaatcttttgattgtaaacttaaattgtttttatttttataataaaacatttacatatttagcaacaacaaaagattacgcatttttcatatctttaacccataatgaagaggcttgttggtggtctatgcgttaagttaacaagtactatgctgctgcgttagttttatgttacacacttgtgcaagctcacaatgttaaacgatttcggataaagaataataacactaaagcattttgataattttgtggtgtgggggagggggatgcaacaaggtacgtcaaagtattagaggtggtgttgctctttttttggggaaaaagctccatctttctaatttcaaatgactttttatttgctaattgcttcaatttcaattttaagataatatttaaacaatgagagtaaaatttaaaattcagaaaatcgggatctaattttacaataaaacataatttgtagggaacaaattttgagggccctagtcccaagtttcgatatgctacacatcgcgccggctttagggtattgtaataaaatagcgagttaatcattttccgattatttttatgtttttattagacttgcttattgaataattcctcttatgtagttgttttctttcaaaatattaaaacaaaaacgaagtcgtttttcaatatacaaatataatcaaagtcgttttgatttaatgaaaagaaaaaccctagttttctctctatatatatcaatgcatccgcctcatctttcttccactatattccaagttctgaaaaagtctccacataatctccttcgttggtaagtgtgattaatcatatatttttgtttcatatttttgtatagaaaacataaatctaaatatatagtgtttattagataattttaggaggctatatgagttgtgtttatctgaaaggatttctatcaaaatatatgagatatactagatctaaaatatttcgatatacaaagcactaaaattccaaaaaaataatttctacttcttatttgtgtataattatattatttaagaaattaaaattgtattgtaattgcaaactttgatgtcttatgtaatttgtatatcatttttctgttttgcagttatttcgagaaaaaataggcaaaacaaaatgaatgcaaacccatgcgaagtttgcaggttccaaaataaacaatgcgtcaacaactgcatgtttgctctgctatttccttcaagtgatctagagaaatttgatgtcgtcaatcgcatctttggactcgaaactttgacattctacctcaaagacctttcacctatggaacgcatagatactacccgcacactctattacgaggcaaaaccatgctttctgaacccacccaagaacccctcaaaattcctcgaagctcttctaaattatccttaccaaaaagctgaagaggtgtccaaaacaaagaagttgctcgcatcttactcgagaccatgtgtagtattggctcttcctgcaccaaaatatactcagtcgaaatctaaaccatctgttttgcgcaaaagaaaaagaaagactaaatcatcggatgaatcggccattcgtgtggttgaagattcctagatggtcattgttgaagatttttttttctttctaaaagtgaatctttggaaccaaatatgcttttaatttaatttcaaataaaataaaatatgcttttatttctatgtattttgatttctttttcttgatgacttatctttcttttgaattatttatggattttatcaaagtatatattatccattacatatacttaattagcgtaattgtagactttttttttagaaaatatttttaacacatccagatgtttgcacatatcctttcatgtttgattaccaaattttccttttttatggtcaacataagaaaaaaacttactattcatgtgttaaatatacttacattattgtaaatataaataaataaaatgtaaaaattcatgaaattctatcttaaactttattagcattggctagcgtgtcaaagactttttcatattagactaggtatttaattattagatttcataccttttctgtttaattattaattttccccttttaatggtcaacagaaaagaaaagaaaaaaacttactattcgtgtgttaaatctacatacattatggtaattgtaaatcaataaataaaatgtgagaattcatgaaattctatattaaaactttataatattgactcttttaacaaaaaaaactttattacattgaccagagttgttcaggactttgtttttatattaggctaggtatccaattattagattgcatacccttttctgtttaattactatttgttttccttttttatggtcaacagaaaaaaacttactattcatgtgttaaataaacaatacattattgtaattatatataaataaataaaatgtgaaaatatatgaaattctatcttaaaccttattacattgatttttttaagagtttaaatgggtgcttgaacttgctttgagatatagatattgtgttggaaatgaaaaggtacttggaaatgcttagaacatgaacttaagtggagatttggtgattgcctaaaaaaaatatgggagatttggtgatatgagtttagtctagggaagcatttgtcttgagttttttttataaggaaaaatatatagcggagtttatgtaggtttctaatttatgttgttttagtatacatgaatttaaaagaaatctaacttctttcaaatttaactgcttttagttcaattcttttgaatttgtttaacaacggttgcacaaattgtaaaaacattatttttttttccaatttaatttaacattacattattttatatatatatatatatatatatatatatatatatatttagaaacgttgtaagtattttcacgtttggtctcgtacccaatttaacattttaccgtcactttaagcatatgtgtttagcttcgacaaaacgttgacattgagctagttagccatttgatctacaaaatcataaaatttgactgcaaatagtcaagcaaagtgtcccacgtgattacatcaacaacttgctatacaaactttgatagatctatttattttataatctctacttgttgatcatataatttcctataccctcttaccttaatataatccattaggaaagcttaacatgccatatacatcgtgaaccaacgacttcaataaataccagactagtttcttattgtcaagctcatcgcatccacttacttgacatggctatttctaaaataacccttgcaatcatcgttttacttctagggttcactgagaaattatctgccttgtcgagtagttgtaattttccggcagtttttaactttggagattcaaattctgacaccggagctatctctgcggccattggagaggttcctccacctaatggagttgcattttttggaagatccgccggaagacactccgatggccgtctcattatagatttcattagtaagtatctttgattttcaattttacccttttgtaaattctactaactatattcattagcaacttaattctacattgattttagagtataagataagagaaatttttgtgttgccaatttgttaacacttatatatagagttgcagaaatctctattttagaatcaattatagagtagggttagagaaatgttttgcatttttacttagagtagggttggagatgcccttagtatatttgaaacacacatttgcttctagttattgaatcgattttgacgatatatttgttatgattttgggcagccgaaaatcttactttgccgtatttaacaccatacttggattcggttggagctaattaccggcatggtgctaattttgcgacgggcggttcttgcatccgccccacacttgcttgttttagcccattccatcttgggactcaagtgtcccaattcattcactttaagactcgtaccttgtctctctacaaccaaaccaacggtaagttcaaccggttaagtcatacaaattaccaaaccagaatttaaaactaaaactaagtcttctacatgttttgttttaatgaaaactttgttgatatttgttgttttggccttaggaaaaactccattctgcaaagaagtctttgcacggcccaaagatttctcaaaagctctttatacattggatatcggccaaaacgatctcgcgattgggttccaaaacatgacagaggaacaactcaaagcaactatacccttaatcattgaaaacttcaccattgccttaaaagtaagtatcttaaaattatcggagactttggtataaaacaatctctaacaatgatttattttattagttgttatacaaagaaggagcaagattcttctcaattcataacaccggaccgacaggctgtttaccgtatcttctgaaagcttttcccgctataccgcgagatccctacggttgtttgaagcctctgaacaatgtggcaattgagttcaacaaacaactcaagaacaaaatcactcaactaaagaaagagttaccttcttctttctttacttatgttgatgtctactcggccaaatacaacttgatcaccaaagcaaaggctctaggtatgcactaaaccaattaaacggtttatatttttggattttattggttacggttagacttaagacttctcattcatttccggttttatcaaatctataatgcaggttttattgatccttttgactattgttgcgttggggcgatcggacgtggaatgggatgtgggaagacaatatttctaaatgggacagaactctatagttcttcctgccaaaaccgtaaaaatttcataagttgggatggcatacattacaccgaaaccgcgaatatgctagtcgcaaaccgaatcctcgatggttcgatatcggatccacctctccctacccaaaaagcatgtaaactcacgaaaaaataagttgccatgatataaactaataaatgtctagcatatttctggtgctttcaagtaactagccaaaatttctattcacatctctctttttgtttttgaatcaatgtaaaattttcttcaaaaagtcattggttacaatatatgcagctttaagcagaatgtttctattcacatcttatcatattagttattatataaaagactatatcaaataatcagtaacttgtttggtaagaaattttaaaccgcttagttcagattatcttttgcttagtgacaacttttcttttgttgctttgctaagtgacaacttcttgattcggtgggtcgtctctttatgttctcatgctacatatgtatgtgtatattcggttattgttttttgttgacattcatgaacattacatgacaagaccagacaagatgttttagtaaccaaacacttgttgtttactcaagatcagtgctcaaagttagagaaactgccatcaaggagatttttaaactccaaaatttcaatgtaaatcacattacaaaacgaccaaatcaattgcgttttactctttacattttatttataaagaaaacaaatgcaagatttttttttttttccttcactttttataaaactagaaaacataaagcctcttcatttttttccttctccctcgaccgtgtaagtaccgtattcgaacttgtattttgtatatatatacattttagaccggacaataatccggttaatcaataaaccggtctctgtccatttgcaatttcagggttgttgtccaaaagggtaagaagtgctctgtttcttttactccttcctcttccagcttctttcaacaacgcagcaagcctctgcttctcgtcctcaacctcgggatttgccgtcccgagcttctcttctcttgtcccaacaacatactccaatatctctatagcatcatctaacctgtaaagcaagtaacacattgcttgtaccgcagggaaataccaaaaaacataacctagcaagaaaattgttttaagttccaaatttaccttcccattgcgtcgtacgttccagcaaggttactgtaaaccgctaatgtatcgggatggtacggtccacactctttctcaagaatagttttcgcttcttcaaacaaatctgcagcttcattgatcgcgtaacgctgaacgcaagctagtcccatctgattcaaagcaatcccgaaaagagcggtttttttctctccgctattgcggaactttgatatcgcgctcttgaatatgtcgtaggactcggagtaatttcccatcatataagtaaccacacccatttgagcttcaatacctgcaatcgtgttctgttgacctggagcgtttgcatatatcttcaacgcccgtctcaacaacttaagagcttgatcaagttcattcattgactgatatatcgcagaaatctctataaaaccagtcgcaacctcttccataggagttcctggagtcggttttaggtaaatcttgagagcgttttcgcagtacgatttggaatcgcgtgttttcccaatcttgttgtacaagtcagcaagcctaacgtaaaccaaagcaacagaggaatgagtctcaccttttccttgcttaaacacagctaaagccttctggtatgcgaatatcgcttcatcaaacctagctagcgacatgtaagcatcaccaatactgcaatctacagcagcaacatcttctctatggttctgagatgacattgccatgctcgctaaaacataatgctcaagcgcaacttcataatcacctttcgcatcgcagataagtcccatcagttttctatccgcagcttcttcaatagaagctgtagcggcagcaccgttttctttgtgaatgtccaatgccatttgacaaagccttgaggcttcttcaaactgcattgcttgaacatgagcttccgctaagtacctacaagtttcgccaactcgtgcatccgattctccaagaacttgtctttgaatctccaaacccgcggtgtatagcataatcgaattttcaacttgacccatcaaaccatacatgtcaccaagctgcatacaccctgcaaatttcgccaacgcgtgatcctcaccatcttcaatcatcggtatctcgatagaacgttcaagaacaggcacagcgtcattgtatctccctaaccctgcatatatcgctgccaagatatgcaaagacatcaccaaattcaacccaagttgtttctctccttccccacatttctcaaacactttcaccgctctcaacgctaaatcaagagccttgtttaaattctcacctgaagaaaccaactctctggcttgcttcaacaacaccacaccaagctcaggactctcctcatcaacagaaaccttccccaaatccggtgatttcctcgaagagatcctcgaacccggcatcttcggattattaggactcgttttcgcaaccttcttaccattcgaaagaggtttcttctgactcaagctaccttctccattactttcttccttcttctccaagataatctctttcttgctctctccttcttctcctacatctccaaccaaatgcctcaactccaaatcaatcctagattcagctccatacgaaataaaactcgccctggacggagactgatcatcagaactctccatttcacaaacgttatgatacaactgctcaatagaagcattcatagctccatcaattgcaagatctatagaactcagaggactcctcggtgaagcttgaagggcagaatcgtcttttaccctctcattgctctctcctacgtccatggcctccaaaactcacaactcaattataaatctgaatcaatggagaccaagattttagattcaaatccgttaaaacaacaagataacatcaaaagactcgaaattgagaaccataagtccctaactagaattatctaaagctgacatagattcagttactaacagagaacaaaacccagaatcaaattcaacgaaattgaaaagaaaaacgaaaactttgaagattttaagagataaaaatcgaacctttatgtgtctttgactctgaagaaatctgcaagaaggcaaaaaaagaacagattctgttttttggtaacttagtgtggttgtgtaagagatgaaaatgaaggatttggtgtcttgtacttttcacttttaggtgtttgttttatatcttcactttcataatctcatagctaatgttatgagaaagatgaagcaacaacatttatgcacaaaccctttcactgtccttatatgttttgaaacaaaagcagacttttttttttgggtctacattgcttactttaatttaccttttaaattgaattattgattgattatattaagataatgaagatgataattgactctttttgatgtgattatatgattattttttcaagaaagagatgcataaccagaaatttttttgaagatcattaggtttgaagatgattgactcttgaagcaataaaaagaagatgacttcttccctacttgcactctctctttaaataatttatcttttttcctcaattttataaataaatttatctctttgaaaaataataatgaatgtctcatccattttttttatcatctaaaatttgattaaaaatttgctgtgaaaccaaagaaaattacaaattttcaaagaaggaaaagtaaaaccgacagataaaaaataattccccaaaaattacagcagaaaaaaacgagattctttctggaaactaaacactatgaaatgaatgtttcatccatttcaagattaccttttttttaattaaaacttttaaaaaatattgtttccttcacatgcaattttttcatgaatttgtttttttaaagttaaagtttgagttttgcccgttaagaattaattatttttcttatttatcctaaaagaaatattgtttccttgaaatgcaattttttagggatttaatgagttaaattagaacaaaaaaaaattgagttttgcaggttaattagccagctaattaaatgctggggaaagatcacaattcacaagtctacgtcaaaccctacaaattcacagctgtataataagtaccgttgagattccgccacgtgtcatacttaatcatcaattatctctaatgatcatcccatgatctctaatctatatacgtaatattaaaaacgtgaacagttaaaaatttagccttttgattgatataatgatgcagtgttttttttttagtatagtctttaactctttatggaaagaaaaattggaccactggatttaaaggattgaatcactaatttagtaagaatttttcttaatgacgaaatgatatgacacgtggactacagctgcataccagttagacagcctggttttatggtccagatgtggtccacctttaagcccattacggctttatgggcccttatagtcatcagtgtagggcctacccaaaatgtaatttttatagaactctcgttcccatatttcatgagtcaattttattgtgaaaaaacgataatgcgcttaaggcaattttttcactagccaaccaacaaaatatcgaaatgactattatttttatttattttttttttcttgtcacaacgaaatgactatttatatatgtttttgttaagagcccataacattatattatttggttggtcggtcatattatatatgcaaattatgtatgacttggtttcttacaagagacagagacaacccacacgtttgttcataattctaagacctaacaacgtctcttccttcggatttttatttttgtatattgcataaagacaactctgtaaccacaaatactttattatttcctattcacaaagttataagcaattcttttttatcgtcagttcataagcaattcattggattaatttatgaactgaaaacaaattgtaatcattgacgactgttgggcggtgctgttttctttaactctttcgccgctcgaatcccatatcaaatcttatctgttcacaaattatttggttttctaaattcctacgcgttttatattaccaacacgtttttgttttcttcgaaaattttaggtcagaacgtatataattttgacaaatttgtcaaatactatctctgacaaaagtttgataaattttgacaaatttgccacaacatcagtcattgaattgtacaataactgtctaacaaataaaaattttctacttagcgtaaaatacattcgttcgtgaatcgtgatgaaacaagaatacttgcgaaacaagcaaagtaaacctaatcaaatgcatgatttaagcatataccgcaggattcgtttcagaataccaaaatctgcaactattggagcatgcattcgttgacaaacaaaattgactacatactggatatacggccgagtgatggtgagttattgcaattttccagctaggcttcgaaaataagttgcatccgaggataattcaaagttgaggttgtcgattttatgtggtaaaagagtcggcatcagattacattcagacatagcagcctattgtagaatgtcagatgcataagctgtttggtgaagaaaaagaccgtgtgaatcagttttgatttcatcaccaacaaagtcatctacatagagtagaagcacaagttttttcccatttttgtgatatgtgaagagagaaggatcaaatttgctgcaagtaaacccaaaatctaggagataattaccgaaggtgttgaaccaagctcgtggtgcctgcttgtaggaaccggttctcatgattcaaccaccgagttttgttgaatcatgaaaaccggttcctattattttactcaatacaaaaaatgattggattggatgacactcatcgattatttcagcttttaaaagtaagaaaacataaccaaaacatattataattaagcataatatttgaccatttcttttcgattgttaaaaaatgacttttacaaacaaaatataagtagacgatttttaataattacatacaagtgcatcaactatttttacgaacaaattaagattcctttaaattacgttcttaacttcaatcaatggagtgtttcaaacctcttccgtcgatttgacaaaacattcgttagatttgtttcgatttgttattaaattcaattcgatttgaaaattttagatatccataaattaacgaagcaaaacttaaaagagatattcgtcaaaaacagagaaaatcaaaaatactataatttaaataggtgaatatctgctcttcttcaaaattaattgcatacataaattctaattttattattcttatatgtgttttataatcttgtaatcatcgaactaactgtttgaattacaacattgataaaatattactatttttgacaaatataatttactattttttgataaaaaattactattattagattaatttttatattgttttattttatagaaaaatatttgacagactagatatccaacaaatagtttggattttaatggatataagaagaggatattcggacactaacaaaacaaaaaaaattgaatagctaagtattcagataaagcaaatcagatttcaaataccacctaattttctgatatccgctttatgcccaacactaatctgatgacttctgtcttcaaaacgtttctaccaaacatcagatagagcctaatactggttttggctaagaaccaaaattgaattatcactagtatcacataaacatactattcatccagtcatgtagcatctattgattggagcagcgaatagtcctcacgagacacaccttgataatggtgcaactgtaatgtctggaagctcagatatcgtcttcgaggagttacacgaaggatcctgatgacaaataaaacataagtttcttttttattataaaaaaaacaaaagggaaaaacaaaaaatcaagaaatattgagttctttaagtaagtttttctttttgtgagtctaatacaaaagtatagaaacgaatacttacattctgtgggtttacacactagacgtaaaatgaaatttcattaattaactataataacaacgtcaataacataagtaaacaacttgtagttgaacttttatttttcttactaaactttctaattgaagggtatatttttgttaattttgttaacgtatctttaatcgaaggtattttaggtattaaatgtagataaatttttttgttttaatttagaaatccaaaacaaattcaatgtatattagagcttaatagtacaataggatttttatatgtaattggatttcttttgtgagtctatatatgaatagatgcagtcatgaaacatgacaaaagagcatccgaactttggggaatatgctaactttttcttactaaaaatatgaatatggatgtgcatggacacatcttaactgtagaatgtgctgtaattgagaagaaaaatattgtggtgattaattcatttcaaagcctacatttctattatgcatattagaaactatttatcaaaaattcattaaaaaagaggtttcgaatcaaattatagatgaacgtgttgaaggaatattttcaacaaggaaaaagctttgaaagtttaaatgaataaattggattttgttagtcaagaaaagagataggtgtatatgcatggtctgataccaaaggaccatctttgcttttgttctttaacacaattatatgcatgaataatacccttttttttattatcaaatttggaatcttttaggatcaaacactataaactagaatcttagacttggcccatatttcctcggtcaaaagatagtaagcttctaaaaaaacttcaaacctttcaagcaaaatatttttttaagtcaaaattaagaatctaaaacatatgtaccattttgcagtctgatttatactgcaaaatttggtcactcaaaattcgagacaatattttgtttgcgtttaaattgaatactgatatttattgttaagaagatatcatggttccttttcgaattaattcacacacattcatacacaaaatagagaacatgaagctctgaatccatgtgaagttaaattagcatatccaaagaagattgaaatgcgtgacgtcgtaagtttaagctacatttttgtaaactaagagtaaacttgcagaaaaatattacttatattttcttagaaagccctacatattatttatcaaccgctaatgtgaactatggacacaaacgcaacataccgacatgcatacgcaagagcatgatattgcaacagttaaaagaaaagcctttatgaaaaaagtaaaccttatcttcagcgcgtaaataagataagataaagatgatctttgagtcaattaataaatttattttttctttttgaatttctgtcacagaatttttttgttctttattattttgataaaacaaataattttttacagtagtgtgctataagacaatcgttaattgaagtagagagatactgactagtaagaatttgatggaacatgaattcttaaataatatatatatatatctttaagtttataagacaattttcgaaactactttatctttctaattttctttatatgtaatataaatatttgaataaatgatacaaaataattattttattttaacatcaaacgaactttgattaatttgaagagtgatccttgtggaagatttgtacaaaaaaactaggaagaaataaatggtgtataaaattcacattgtttggtattaagttctttgtcaatcaatcagccgcttcgttgttgttccttgaaacccatgtgaaggtagaatttgtgaacttttctgccaggttatagactttaaaattcttcatttctctattgataatatgtggtatttgcttgttatctccttcaaaagtgacattccaaatcctcgtatccaagtgtgttgcagttccgcctcaatgacgatattacaggctttgcctctactttgtgttgcttcaacaaataatcctctatcatctcgtataatctagccagctttttcatttttcccagtccgtaggagactacaatcataattacattttaaaaaactacttgatgtggtttacgccattgttggtattcttgtgtatataaaatgatttttttttcttagtacatgtacatacaaacttcattttttcaacaaaaaaacaaattttagtgtattgaaggctttttaaaaattcgaaaatgaagtgaatgatgtaagaacattttctaatattttagagattattcataaaccttttattggtatttttgaaagttatataaacaatcgtaattgcttgatggtttgtatttttgatcctttgtatttttatgtgagcctttgtatatttgtttttcttccctacacctacttagtgttggctagctagttatctgtgtgagattttcttgtttataaacttgatcgacatcacattttcacacacacacgtgcatacaataatagcatcttcgttatcgtccaaaacaaatgacaactaaaaattatgattccttttaccatgaaaagcgaccccatcgcattaaggcatctacttcaatttctgttcgtctctaacggtcatatatgagaatggtcagctttgcttttcttcatcctgcttttatgaatattcatctataaataccttctcacaccttctccattcttcacatactcacacactcagctatcaagaagagaacaaactctctcaactctttcgttctcaagtatttgcttgcaagtgtctgatacgtacaatggattaccgatcatcaatggagtcttcggaaactctaaggtaactattttcatggcctacgcctataataccaaaccataattccatcaaaaactccaagagaagactaatggagctagtggcatgcaatatcatatccaaattcttgattcaagtgatgaaaaaccaaaactaagttttattgatttgaatgtatatacatgtcaatgtacaggaacaagtgtgccgcctgttacaggcaattcaacaaactggaacatttggtggagcacatgaagatctcttatcattcgggtcatgaacctacttgtggcgtttgcaagaaacattgcaggtcttttgagtccctccgagaacatctcataggtaaataatagcctctataaacttttcatatatatagatatatagcatttcatatacacactttgtatatgaaagcttttataaattttgttatctctatatagggccattgccaaaacaagaatgcaagaacattttcagccttcgtggatgcagattttgcatgacgatactcgaaagcccgaattctcgtagaatccatcaagagagatgccaattctcgagcgtcaactctgtaatcctctttttcatatttatataattaaacttttaacctatatgaatcgaacgcaagaatatatacttattcaaatcatatgattttctcattttcagggattgacgactcgaatggcagctttaggcttaagagataaggccatgatcgactacacgtcatcacggtctccaagagtggttgcactctcttgcaagatggtaggaggaggaagtgacgggtcgttggatctatgcgcgagggtttgcataacggatgagagtgacaacgttatctttcacacgtatgtgaaaccttcgatggccgtgactagctataggtacgagacgacagggatacgcccggaaaatctaagggacgcaatgccattaaaacaagtacaaagaaagattcaagagtttctttgtaatggagaacccatgtggaagattcgtccaagaggtggaaaagcgaggattctcgtggggcatggcctcgatcacgatcttgaccgccttcaacttgaatatccttcttccatgataaggttgacatttatatttaagaaaataaataaagaaaatacatataacaagattctttagtgttacttctctttcgatataacatatgattttatgtgagtttatatgttaatggtgaagtttaatgtttgtatgtagggatactgcgaaatacccaccgttgatgaaaacaagcaagctgagcaactctctcaagtacttaacccaagcctatctcgggtaataatattattttttggtattataatatattgaatcaaataaactaatttggaaattgtgtatatatgcatgcactcgtatgttgatacaatatatgtgtataaatgattactttttgatgatgagggtattgatgcttgtatgggtttaaagttataaggaagagtttcaaaacgtgaaaagattcactgtttaataatacattaatctctatatatatctacacacatatacatatatggattgtatatgactagcaccaaaatcgttaagacatttttattttacatgagatgcttattatattcaagattatatgttaataaatgatgtgtttatataggtatgatgttcattttgggatacaagacccttatgaagattgtgtagcgacgatgaggctttacacgagaatgagatatcagaaacacaagattgaagcttaccctttagccgccgatgcgcagaaccgtagcaaccaggtggcttggaggcagagtgaggccgagaggatgtctcctgatgaaatgctctcaatctctcgttccgactattactgctggtgcttagactcactagcttaatttctaaacttatggggttatttaagtggtctcttaaaattagtaattcttcaaacttttccagagatttttaatttagtagtgtaatgtcgaataacattggttatgattttgtagtagtatctaaattttcgagtgtgtgttgtgtgagatgcctagattgttattgaactttgtaataatgcattaatctcaattattgattaattgactgctttttttccaatcacacattacttaaaatatgattccattacttgatatttaaattttagaagaatatacatttctgttaaatatattaaacacttttattttttaaaaggtatgagttaaaaaaatcaactttaatactagataaaaaaaacgaaaattgaaagaaagcaaaatattagaaaaactagcacaaaacatactgatatcttattgtataaattttattttcaaagttagtccagtcattaataagatcaccacacatgactcataacttaaacaatatgtaacaaacttttcatcttgtgtggcttttccttcatatcatataaaagatttggacagtcaatcatatacataataaaaaataaccttattttttgtagtaattacataggtatgccattagaaataaaaatttaaagagtaaattaattcatctttttaaaggttaataatgtttaagacaataaattttgtgatatggcatataatattttgaataactttaacactaactaattgaatattttcaataaataatcatactcgcactcattagtcataacatcatcaatttaattctttttttatgggattattatatgtacttgatgactaaaactttgagaatattttcatgaataatatgaatttcttcaattgattacaatatttatcaaaaacagcagttaccaaaaataatagtttcatattaaattttacacgttggtcatatagggaatccttgcgtactgcattctgcatggcatgtcagcacagtgaatcagcatgtgatataattttactataagtagagcattcatcagtcgtgaattttcggaatatatattgatgataacgtcggttgttaaatgacacaaaaataatgacgtcgttttgagaaccgttgtaacatcgtcgtaacaacaatatagaaaagacacaagcataaaaaagaagcctacgcaacaattactacaacatcaatctccatattgaattgtcttctgatatacaataccattccatgccaagcagactgagactttataagtatgtgaagcatctcacgagagttctcagtcaaatgcaactcaacaaagaaatcataagaaagcattgagaagcaaattagttcatgaaccacatcacatcagcatcctggagaccaaaaaaggaagacagtgaatcactcaatagaagaactgataagttcttgctttcagtgccaagagtgtaagaaacataccgcaaaaacagactactaaacccttttcaagaacaatccgaaggaaattgattcttctccacatcatttagcatccaaagcaatgaccaccatctttagttacagctctacgcagcacatctaaagctttcttgttcttttaccaattctaaaaatctcaaagaagagatcgattccagatacaagagctgcataagattcattcaaagttgtcaaaattacagtaccatttttttacggaggaatgacaagttatgagagtgtatcttttcgggtaaacattgtaacgtagtgaaagttgagagtgaattgcgtaacaaccgatagaatgaaccaaaaagaaaaaaagaacatcttttctatcgcccaaaaataaatctaagggttttctatttattaggtgtatattgtcttttctagtactaaaacaataatggctaagtctcatcctcacaagagattaaggttgagaatatattgtattgttgttagcataaacaaaaatagatgaaaccaatttctaccaaattcatttttttttaagccatttagagtacattgggtaacaagtatttcaactaaattactctaagacaattctttctatcttttatgagctgaaatatggaccacttttcttttctgttctttgtggataataaaaccaaacttcactgaattatatcttcaattcacattgcactaaatttttagattgatctcaaaataaagtttttttcctaaatattgtcgtttatcgaatacaattaattaaaggataaattgattaagttgctttgctttgtatataagaccaccatcgctccctcctctttcatcagttaagataatataaattcagtaattaagagagaagaaataaatacaaaaatgttggttaaagttttctcttttttcatccttatgataataatggtaattggcgttagcaaagaatattgtgatgacaaacagtcatgtcaaaaccttttgttggagcttaaggcgggttcatcgtcactctcggagattagacgtcgtgacttattgatcatcgttttgaagaattccgtacggaggatcgacatggctatgattggtgtgatggatgatacaaaacaacatgaagagatggagaatgatatgcttggtgtgaaggaggacacaaatctatttgaggagatgatggagtcggtaaaagataggatgatccattcagtggaggaactcttaggaggagaattcccacacttggcttagtagcgttcttactagctacatcacatgtatcgacgaaattggtgaaggtgcctataaacgccgggtcgagccaaagcttgaaaacctcatttctagggcaagagtagttttggctctttttatctccatttcactgagagacaacaccgaacttatctcggtgattcccaatggcccttcttggttattccatgttgacaagaaagatctatatctcaatgctgaggtaataaaacagaacctttatattttgaagttataatttgataatcgtgaaaacccatattaaggatttacttgatactcaagtaacaaatatttaggatttttatatttaccttttattgtaattacttttaggtagataattccttttccttagagatcagcccttgtataaaaatagaccttaaggtcacgtaatgaagaacacaattcgatcgatatgtttgaccctcttaacaaaccttttatccttttttttctttctttctactgcttatagaatttcttctgtttcttataaagcaggctctaaagaagattgctgatgttgtggtcgcgaaggatgggaccggaaagtacagcacagtgaatgcggccattgcagcggcacctcaacacagccaaaagagattcgtcatctatataaagacaggcatttatgatgaaatcgtcgtcattgagaatacgaaacccaatttaactcttataggtgatggtcaagatttaaccatcatcacaggcaatttaagcgctagcaatgttagaagaacgtacaacaccgcaactgttggtaagaatttgtattctcttcttgaatagtttatagttttctcttctttataccaaactataacattcttaaagacattactaattattctaaaaatatgtttgaagcttctaatggtaatggattcatcggagtagacatgtgctttcgaaacacggccggaccggcaaaaggaccagctgttgccctccgtgtgagtggtgatatgtccgtcatttatagatgtcgtgtcgagggatatcaggatgccttgtatcctcatagtgaccgccagttttatagggagtgctttattaccggcactgtagattttatatgtggaaacgcggtggcggtctttcaattctgccagattgtagcaagacagcctaagatggggcagagcaatgtcataaccgctcaatcacgcgcgactaaggacgtcaaatcgggcttctcaattcaaaactgcaacatcacaacaagttcggatctagatacagcaaccgtaaaaacgtatcttggaagaccttggaggagattttcaacagtcgcggttctgcaatctttcatcggtgatttagttgatcccgcaggctggactccttggaaaggagaaactggtctatcaactctccactaccgcgaatatcaaaataggggtccgggagctgtgactagcagaagggtgaagtggtcaggatttaaagttatgaaagatcctaaaaaggctacagaattcactgtagccaagctcttagatggagaaacttggctgaaagaaagtcgaattccatatgaaagtggattgtaataatgttgttccatgcttcacatgtataacgtataaaataaaagatattattcttctataattttttccatgattttctacaaagatggtaagaaagtgatatctgggaaatatcacgaagggctttactatcttgaaggcatggttgttaaggctgaaaagagtgtaccacatgctgaaaatggtggaaaaagtgttgtcaaggctgtagttggagtgaggaagaagaagtcaaggaaggtgactttcagcgtgaatttaattcaaaggacctactccatatggctttggaatcatcagttcaaggtggagatgaatcctcaacagaagaatcagattgtttagaggaggttaaatctgagaaaagtgaaggaccttctgatgacagccactgttgagagatcaaaacaaggagtggatgttgtgtgatagtaaaatgaaggatgaaaggattacgatgccagaaagtatcattaagaaaggggacacgttaaagttgaaatgaaagagttggaaaaagcttcaaggattcagggaatggaggttaacagagataaagctaagggagttctagctctgttacaagaaagtcaggaaaaggaagctaagactttcaaaatgtatgaagctacagtagttggtaccaacaacatctcatttcagattaacgagcttaactacagaagggaaggaatcgggaaccaaacttatggacacaaggttttcagatcatcacagatttggtatctaaaggagaggctgtcctaaacaagatactaaaaacaattgatccaacagatgttatgactcaagtaatacctggaaaggactttcatgcctgttatgatctcctcaacatcgtccaggtaactccactatcgatattgtacgttggaaggaagaagaacagagaaacaagtcagctttgggaaaaattgttatgtcgatatgaagacttcataagggtaaatggagttacctgtaggcgcctggaaatacggtgaggagacttatattccaggtggagctgtagggaaaattaaagaaaagtcaggttagttcttggatttgaaagtattgagtcaagagtgggtgatgtaagaaaagagaagctgcttacatgtggagaatcagttgacctgagctgcagattctgattccatgtggagtttatgtgatgaagattcaagaaatccgagttaggagctgctgtgagagtaaacatgaaattcaaagttagaaatgttatgtagtctatgaaaatcgaaagagacctaatgaaggaagatgattcaggttaagaagagttaccggagttcatcttaacagatgaaaggcttcgttgttcattggagaaacagtcctagtgtttgtgacttgatcttgcaggatagatttgaaaaaagtactgggaagaagctacctcggaatattttggagccgtgttagaaagtgataggttccaggtggagtagctcatgaaagtttcagcgagaaacaaaaaaaaaaggagggattaagggttctcgtgcaaaacccagaaattgagatggagcagctacagcctaaaggcaatagaaattggggaataaaagtgctagaagtgacagtggaagatggagatcgtcggaagaaacctaccgtggtatcaaaattgaagtttgtcaactttcaaaaattttgaattctcagaagatcttaatctctaagtgtgaagaagagacaagagagagattagatgtacctgagatttgcagatgatcaatggccggattcgccggaaaagcctcatcggagaagaggtggagctcaccaatggagactgaaattgaatttgaagtgtctcacaatttcagaagagatactctctaatcatcacaacaacgagaaaatgagagattggagagtaccatgagttgagcggtgatggtggtggtccgattcggcggagttaaacgcagccggagttaattgatggtgaagatgactgtgatgttgtgatgtgtcacggacaagaggcatggatgagagacgaagagaagtctcttgtttcaccagaacggggagcaaccaagaaaaggtgaaggtttgcagttgctttcgccggaggtagccatcaaagtagtcggaatctgagtttgattttgtcatcgaaaggcaagctccatcttctccatgtcgagaacaagagagcgcggtgcagaaaggaggagacgatggctgacgggaacaaagtcgtatgttcgccggaggaggttggaatccggcagtggtgtttatttcacgagatgagaaagagatgacgttggttgtcggagatggagatgtcgaagtcttcgaggaagtgtgttgttgtcaagaggtggagattgttattgggtttgaccaaaacacaatattgggcttttattggcccagccggagttaacataaagaaaagaagaacaaaagtggcccatgacatatatatctctacgtgggatatgatagagtgatagtggtggtacacagagagagttacagagagaaagaaaagaaacgagagactaatataaattatttaatatgaatatgaattattaaatgttttttaataaataaatttatatgcattttgctttaagatatggcatattttcttatatttatacaattttctaatataaaaatcataaattttaaaaatattattcaataaaatagttcttgtgattaaatggctattgtaattaaatatgaagtactaataaatttagaaagactaatatttatttattttagtttataaatttaataaaataaaaatttacatgttgataatttttatattatttggttataaaatatttagaaatctttcaatattttcaaatcttttcttattttcttattttgttttttttttcattttacaaaaatttaataaaaaatagaaaataagaatagttttataaaatttaattagcgagatgacttataaagatttgttgtttaaaattctatgtggacgtattaagaagaaaataattttgacttttctgtagtatagattagttgttttaatttatttaattactcctacacccattaaaaaagatgttcttagatctcagtcaaatagtaacaaaatatttttcaaatttaaggaaggaaaattattttatgtgttgtcatattgctgttaaatcaaatcaaatcaaaatcaaatatttttcgtacctaaataaatggtcaaattatcaaaaaaaaaacattgaacaatttgatatattgctaataaattaaattactttattatggtaaataatttgtaagcatttattttgaaaacaaattcagcctatataaatctcatgtaaatttcaaaacacacgaaataagaaaaatggtggcatacgtcgataaaaacttttcatttgcttgttttttggttttacttctttttgttgactcatcgtatgcaaggtttaatacgttggttacaaaagatct

SEQ ID NO: 1311 - DNA, 13029 bp, Arabidopsis thaliana
ttagattattcctaagtgagacatttctctttgatattggtgacataattttatctaggcttcaatatatatatatatatggtcaaattcattcaatatatttctttcaatgaaagttgtcgtttctatgtttataaatttattttatgtatatatgattattctttacttatagtttatttacgttcaacttactcttttatatttgtgtcgttatttatgtatattcaagtaaacaaagaattatacaaaaggttgtctttttgacacattttaactcatagcaaaatatatttcaaaagtagaaacatatgttcatgttcaatctccacggatcgaatatgggtaaagtcggaaatcggcatagtacgtgtaagactgtagagtcgaaaaaaaaacagagaaagtgagacttttcatgtcatataacatgtaaatgattttttttataaaacccatccatatcgtatatgctggattaccgaatcgccacgtaaaattaaattaatcaaacaaaaatgaaaaatccatgagactttgtggagattgcttcactgtcttctccgcgtggatgagagatcaataacacatacaaaaaaagagtttaggctgcatgtgaactacgtaatgtccgtcaatttctctgtttcgccaatttttgctattaacttaatttatttacaccaataattgaactaaacacatgcattatcatttatgtaatatccctatatgcacacatagcaaattctgtttttagtaacttcctttcctaaaccaatacggcaataccgcttattagttttgcctttacccaaacatatgaatgttttctttacctcaatcaaatttcacctaaatctctatatagaatgttgtactaggtttttagtttataaataataggcattttgatgatcttacatttctgataaataattacactggcctctctcttttgtttttgaagtaaaaaatattttggaaaattaccatttgatcttcaaattagtaattagcgaacgcattttcgccaaataactatacactattttataaaatcatacaatttaacgtttgtcatcaaagttatttacttaaatatgaccaaaattttgttatctaactaactacatcttataaataatggaaatttctgctaaaccgaattaaaaataatctaaattttggattagtttttcattttctggttatccaactatttttgtaaaatttcttaaatataacccattacaagacacttttctttctggtttggctcgaaatttcaccgattcaaatctaaatctttagtacgtaaaccggtctacattaaataaaccaatccatatactgtaattaaagttacacaagtaaaccggatccaacctaagaccatctctattgggggtatctcataagagtttctcataattaaaaaaataaaaataatgaaaatgaaggaaagagagtgtagaaagtttctcacttgaaaaactctgagatactctttacaacccattgtgacaattctcatcttactattggtttaattttttaacaaaaataatttttttaatcaaataatcaaattataatataatattaaattttttttgttcgaaaaattttgtgggtttatcatggatggaaatgccctatgctttgaccttacacacatccccgtgattggtgtggaccgtacatcggcgcgtgaactccactgtccctcccacttacttcatctccttccatataatcccaaacccccctctctctctctctctcttctcaacaatggcttcactcaaatctctcttcctcctcttcctcttcttcttcacagctcaatctcgcttaaccacaaacttctactcaaaaacatgcccaagattcctcgacatcatccgtgacacaatcacaaacaaacaaatcactaatcccaccaccgcagccgccgttatccgtctcttcttccacgactgtttccctaacggctgcgacgcctccgtcctcatctcctccaccgccttcaacaccgcagaacgtgactcttccatcaacctctcactccccggagacggtttcgacgtcattgtccgagccaaaacagctctcgaactcgcttgtcccaacacagtttcttgctcagacatcatctccgtcgcaacacgtgatcttctaatcaccgtcggtggtccttactacgacgttttcctcggccgtcgtgattcaagaacgtcgaaatcttctcttttaaccgatcttcttcctcttccttccacaccaatctctaaaatcattcaacagtttgaatcaaaaggtttcactgttcaagaaatggttgctcttagtggagcacattctatagggttttcacattgtaaagagtttgtgggtcgggtgggtcggaataataccgggtataacccgagattcgcagtggctttgaagaaagcttgtgctaattaccctaaagatccgactatctctgtgtttaatgatattatgactcctaataagtttgataatatgtattatcagaatcttaaaaagggtcttgggttacttgaatcggatcatggattatattctgaccctagaaccagatattttgttgatctttatgctaagaatcaagatctgtttttcaaagattttgctaaagctatgcagaagttgagtctttttggtatacagactggtagaagaggagagatccgaagaaggtgcgatgctattaattgagtttatgtttttaatttatttaatttttgggttatattggattgtgaatcttctgagttattacactcatatgtttttgtgtaatgtaaaagatatatggttgattgttctaattaagagattggttttggtacaaagattgttaacctttgtgcagagattgaatttgatgattatgtaaaggaaatgttctgcatttcagctctaaaatttgagtccggttcagtgagagtaaaccaaactgaagtagttgtagtttgagtttggtaatcattcattagtggctgattgataattaatatgttggttgagataagagatgtgatttaatggatacggagttggtagctcaacgagtgaacttttggaatctggagcatctagggggtttagagtttgagcaccaccaacaataaagagagatttacattacaatggaaaccttctttcttcgatctaattaactatatttgtggtttcttgttggaaaagattatagtttttggcccatatacaaaaattaggccttggtttctggtaaagttgtaaatttctagtgttttatttatatcttgtgacagaatgtggtatgctatttgtgtgcatttgaaaaatggatcagttacaagtagtcacacaatcaagcccaaacctagttattagtcctccttcatctcggctcagacacaagtccagttttgtcggttcttagaaagagtcttaagagcaccctcaatggtagttgtttaatagaaagaaactctagaagctcttagagcaccattattgataattgcttaggttaattcttagaaaactttggttatgaatttaatgtttttaatcatatatttgttaagagagtctcttatataagagacaaattgaagttttcttagtttttgtttcagaaattttaaaattaattcataaaaagttctaagaactaagttaagagtaatctaagacactagcaataatgatgctcttagcacaatatcacaaaagctcttagcacatggcctagcacgatatcgaatagagcctgttgcgtagaaatctatggatacaataacttcttcattgttactattgcgggcgagctagtgaacattttcgtgcaagctaatgggatagcggaacattttcagacacctcgatgatcttataaaagaacgagtcggttctcgggtcaagatgggttaattgttttttatattggactaaagtaataatatagcccacgagtttctgaaacagaagaaacataaagataaaagtctgaatttattcataacaaataggcctaaatgggcctagaaacatctaaaaccgcgttacgtgtaaaaaggaaaaaatccaaataaagaaaacttaaaaatgacaaccaaaagaaaaatccaacttggacgctggcttcgtctctaagtcagccccaacctctatatatatatagaatcaagaacacaagaaatatagaacaacaacaacaacaacaagaagaacacacgaataagaagaaaaagaagaagaagaagaagaagagaagcttatggcaggaggaggaacagaagcgtttcctgatcttggagagcattgccaagaccctgattgcaaattactcgattttctcccttttacttgcgacggctgcaaattggtaagagctttttctcagaaactttcaatttttttctacaactgaatgtttcttgattgagaagttttgtgtgtgaaggtgttttgtttggagcatagatcatacaagtcacataactgtccgaaatccgatcatgggagcagaacggtttccatctgtgaaacatgttcaatagcgattgaaacaactggttttgatgaaaaaggaatcaaatctttgcttgagaaacacgaaagatccggagattgtgatccaaacaagaaaaagaaaccaacgtgtcctgtaaaacgttgcaaagagattctgacttttgcgaataaccttacttgcaaatattgtggagtcaagttctgtttgaaacaccggtttccgacagatcatgtctgtaacaagaagatcattaataccgcgggaacaagctcgaggtggaacgagaggtttatggaagctttgagtttaagaaaccagaaagggtgtggaagagggagctctgtttcatcaaaatcttcaccatcagttagatcgttttagtttcttctcttgtaacaatagtttgcatcaaccaattccttctttatgttctcatgtattttccattgtttgcaagaaagaagattaatattttcatgagtaatatttcgtaagagaaggaagaagaatgtttttattaatattaacttcattgggaagtttcttctaaatttttagattcggttttgggtccaattttttgggtcggttccaatactcagtaagaagactacttagaaaatgtaaatgtggtgcagtgtctgtaatctagattgcatatacattgaagaacccaaagattgaattgttgttcgtatggcttaaatgaggtaatgctgaaatcgatttgtgaacaaaagagaatatgtgattaatatcattaacataatactcaattttgctgtacgctaatcgacatttgtttcaaatggaccgatatagctatggttgaagagatggaagaggttgagagtgttgtttacaagacacaagtagatgtgtgatccttagagaaaggtttatatgatgtgggagctgagatggagagtctagcaggtgagacacgcacatgtgtgaccatatcaagtagctatggaaatgagattgaagtcatcaaagcatttttaaaaggatgtgagaaggagattggagagctcaaagccatgaacttttgtagtaagaaagagattcaatctcgacgttacttcaaaaattttatcgggtgtagtttagttatggtttgtagtctatgttttcatcttttaagtatgaaaagttagtatgagtttgttgagttaagagttctgattgtattttattggattgagtttgagtttcaattgaaagttgttgtttgggttttacataacacaaacattgggccttaatgggccaacgaaattggcaaggtgaagaagaacaaaatgtgggcaaaagtttgttgctcatttaagtcacctatatatgcattacaacgtacgacgtatagtggaggtaggtgagaaaagaatctaaaaagagttctagagaagagagataaaagagcttcctaaacaagctttcttcttcctctttgttgttcttgaatctttgttcttcttgagtgcaaatctgtaaaaccaaaagacatcatcacaagttagtgaagcttgggagcaagagatctcccccgagaccccgagacgtagcggttgaggccgtgaactcggttaccaatttctgtgtctgtttattttcttaccaagcaatctctatcactcttttctccacaaaagtaatgaataaataacataataatgttgtatataacataccaaacccgaggcaattacaagacaaaaaccattatcctacaaattaaaaattcaagacaaatagccaaaaaccataatctatatcttgaagccgagatcatagtcaaaaccatcatcccatcatgttacacataaatccgataatccaaattaaaaccatcatcctgaacatcataagtttcccaaaccaaaagcttttacacaattaatcactaagtgaaatttgtgatacttgattcggaccttgataagaatgaaagtgtaatcctttgtatttcttatctatcaatccaattacaaagaatcaaaaccctaatcgataagcttgaagttacagttctccaatcttatctcctaagaacagagcacatgcataagccctaattctactcacaacatcaatatgatcacgaaggatgcttttctctctactctctcttagactcttactatttataagtttcttcacacgtgactccgatctctcacttcagttctcacacgtgccaacttctcatgaacgtatcagaccttcaccaagttgttttgtggccgacttttagcttggattccaacattaaaaatgtcattctcatcatcacctcctctaacatcatttccatcatcacaaactcgagcattctcaccattgacgttttcacaagctcttttcatcattacattcttcaagaatctattccttctccgtaaatataacaaccgcttttgtccactttgcagctagacacattctctcgaaaatatcatctctagtatacaacggttcagctctataaacttctcaaaaggaagcttataccgtatcctttgcccaaacaaagacaatcccaccgactccatcatgttattaaaaaaattttcttgcatgcacacaagtgtgtgaatctggcctccatcatatgtaaaaacattaccgtctgtacaaacaaaaaaaactatttttggcgaaaaaattatcgtcgaaatattgttggtaggaaaaacacaattttattttgttaactttaaacattaaaaaaataaggatatatggttattaaaaattaaaagagagtaatgaaaatgaattacatgaaagggtagaattaaaaatgagtagcattggaaggtcattcctaataatttatttattataaattctagatatttataaaataaaaactcaaatattattatatattatactataaattaataaaaaatattttctacaaataaaaacattttttaaaaattaattattaagcatttaatcgatagttttgatacgtatataataaaatatagtttttagtctttgtattgattactgaagttctacattatagctaaagctaaagctaaatccaaaaacagaggctaggatcggaacagaagaacaaaactatgttgtggtgtagagcgtttgggtccatttcttgttgttagctaaagctatgtctggagtgtttgacgttacatgctaaatttaggtacaacttaaacttttgtctttttcttgaaaacacgtgttgaacaaatcttttctggtcgataactcaagaaatcttatctggtcgcaatccatcttataccgacgtgaaatctcaagacacgtgaatatataacttgttcataataacattatcacttttatcgaacgcacaaaagatcctccgctataaatatttgtggtgaagaactctttataccaaacaaaaaaagctaaataccaaataaatgttggtactcatcatacatatataactaactcacctttttggtgtgtagataaatatatctaactaactccattacatattccagtcatttgcttataaattataaccgtcacacttaccaattcagtcacttaaccaaacatgtctgaaaaggggttgataaaaaaagaagaccacatgtttcaagaggagaagagaaagacaaactatggagcaattggcttggcttgcttcatttcttgtttctttgcattccaattcatgaaaatcgtaacaacacaaccttcaacaacaacaacatcatccattgccgttatcgatagcccaatgtcctcccataagctatctgataggagagaaatatggagagttatcccaccatctacctattgtctcaaaatcgaatctttcataaaattcgccacttctccaaacgccgagaagtacgaatcccgtccttttgaatccggtggatacaactggtaagtagtattttatcctacattttgcatatgtctttgcatcacaaattttcaacgacacatttgattgtaagactatatatccttttgcaaacaggacacttattgtctatcctaaaggaaacattaaggaaggagctccacttaattacgtttcaatgtacgtccaaatagacaattcaacactccttaactctccaaaagaagtttacgcagaagtcaaattcttcatttataaccggaaagaggacaagtacttaacatatcaaggtatatacatccgaacgccctatttatatcttatttataaactatattgtattaatcaaattttcaacgtttaaatttaaaacaattgagacgctgatagtttgcatagtttcaaatgccaaaatttgcatttaaaaacacacaatctcaaacgcatgtcttggtacacagagacggatgcaaaacgcttttttctgttcaaaccatattggggatatggtaatgttagaccctacaccgacgtggctaatcccaatgctggttggcttttcgacggtgacaatgttttattcggtgtggacgtatttgtcactgaagtttttaacaaatgggaagtgttctcattcactaagagtttgcatgaccgcctttacaaatggacgttacccaatttctcgtcactagagaaacagtactatgtctctgacaagttcgtgatcggtgggagaagctggtgagttcctcatgtcataaattctttaagccacatattgatacttagtcctggatgttcggttatccattccgttatcggttttttcggttctaaagttattatctatttggttattttgaaatttcggtttggttctttcggttttaaatttagtatccattccgttattttgatttgaatattttcggatattttaattatttttggatatttcggttatttttggatatttttgattatttttgaatattttaactattttatatatatttttaattatttagtttaaaaataactaatatttttaattatttagtttaaaaataactaatatttttggaaatatatttatatttcagatattttggttatccgggatattttggtacgtagccatttagtttcggttctttcggttctttcggttatatatagaatttagtatccatttgattattttttaatttttgattccgttcgattctgttattttgtttcgattttagttcggtacattcgattaggtttatttgcgcaggcttactaatactgattcaagaaaaaattaactatttacaatattttaatatacaactcttagggctttgaaagtgtatccaagtggcgatggcgaaggacagggtaactcgttgtcgttatatgttgttgcggttgatgttaagccgtatgacaagatttacctaaaagctaagctacggattataaaccagagagattctaaacacatggagaagaaaggtaaattatatcgaaccataatagtgtggctaatgttacttactctattaatttttttcttttagagtttaattaacactaacttaatgacagttgaaagctggtcggatcaagcaaacagttggggattccagaagtttgtaccatttgctgatcttaaggatacttctaaaggtcttcttgtgaatgatacattgaagatggagattgaatttgaagatttctctaacacaaaatactttccaagttaagttttgcataatgcaaaaccagagagcttggaaccaattgtgttctgttttttaagtgtttttgtgctaataattggaggattggtcttcctaaggtttaggagcctatctcccacttttcccaattccctagtttgtagaaatcgttgattccaagctagcttttcttgtacttgtttcctatttaaataaatgaaaactaagaataaaagcagtcttaatttaccattgaaaaactcttgttcttacttcattctagctgcgactaagactaacactaaccgtggaataacacttctaaaatcaaccgaataagtttgcgcgtatgatagtaatttgaaataataacaagctttgcgcaccaacaataaacatcgatcatgttcttaagtttcacgagtgcttctttgttatttgctctctttcatctgtttgttactctattatttctctggttatgtagtgtatataatacatatagatctaccaagcaattcataatgtataatatatctgccatgtatactctatgtaaattaagctatgtaaccaatccatactcttctttcattgtatttttaacaatcatcaataagcaaatcaaaattaccaatatctaatacaactcgttccttttaggaaataaataagaagcaaagaaaatactctctactagttgatgaaggcttggaagggagatgacaaaacgtacgtagcaaatcaaagaggaaaatccaaccctatccacacagtttttggctctttgcttgcatcacaagtcacaaagacacattgattctaaaaccattcatttggaaacagaacacttattgattatcctaaaggaaactaaagaagggagctccaactctggatggttttaactttacgtccaaatagacaattcaagattccttaactatcctaaagaagtttaggttaataaaaaagttttgctcttcctacaatctctagtgttatcaaaatctcataaaaaaattgtagacaaaataaaaataaaaaatataagccgctgatgttaagccctacgacaagatttacataaaagttaagctacaaatcctcagccaaaacgattctaaacatgtatagagaagaaaggtaaataatatcagaaacataacagtttgagtaattactgcttactttgttaagttgcccttttccgtaatcttattcgcattcgaagcttgtcggttggaggcgaggaagggatccgatgcagccaatgcgggagagcaaacctggagaaacatgggttaaagaggtgttcaaacgggctccagtctccagcaaagctcataatgcgaccatcgctactatattccaacttcttgtgacgccgaaacttgcctttgagcaagctagtagatactaaacatttatgcatctcactccacaaatacattttattagcatcaaaagggtttattgccaacggaaagtaatctaaaccactcttgatacaagccggagatatttcagatactatttcccatttcccactctttaacctccatacacataacttaagccctaaacttccatcatctttttcttcattgataattttcatatacataagagatccttgggatgttgtgaaagctcttctaaaatacacatcgttttctagatgagggaactctataactctgcattgatcagattccgtaccagtagcatataaattgtgggatacaacaaggtgatcacgatagttgttgtagcaaagccagtaaaggtttccattcaagctaacaggattgaaccaagcaacacgcttcaaaagataaggagattggacagtgttgaaactccataggcctgtctcagatgaatatatgagtaagctaatgtcgtcggtatcggtggtatctttcatcagaacaactttgtaacctaaaacgacgccgttttctattcgtgttgcaagtccagaaggtttgtatatatcagctcttcgaggcagacgaggaagaggaggtcacattgtcgtgaaattggattagcaacatagtaggtctgtttcaaactaaccaaaatcaatcctacatcagtgtaagcctcgacagtaaccttttccttgtggattccgaatttgtgtgttaggaaagaagagatgtaagagcctaaagattgtgtaagtccccaagtgtcgcatctgtagtgagcaatgacttctttatgagtttctctgcacatgagtgaccatgaaggatgcgagtcttgatgatgagacataaaaagttcgtgtagatattgagattcgactattgatttccattccttgcaaaccaaggtgaaagctgtgatgctctttagtggtaatctcgctaatatatttaccacgagatcttctgtgtagtaatctatcttcttcttcttcgttcctgactccattgatttaggttttagatcgggctaggtttactctgtttcagagactaactaaccctaagaatatagatatatacaaataaatttgtttcatgtcggcaaggattcttgtgacaaaaggaaataactcttcggtaaagaactaaatggaaaaatagaagacgaatgagtcaaaggctcattaaaagttgggcttatttacataataatgggcctttctcttggcccaataaatttaaaacccaattagggtttcttttttgtttttattttcgtatgagtccttatagggttttaatcgacgcctttcttcgatcttcttcacagacgacacaccattgataaatctccatcgtagaaagttttatctaactgtttgatcgagctgatcaacg

SEQ ID NO: 1312 - DNA, 67776 bp, Arabidopsis thaliana
gatccttgggatgttgtgaaagctcttctaaaatacacatcgttttctagatgagggaactctataactctgcattgatcagattccgtaccagtagcatataaattgtgggatacaacaaggtgatcacgatagttgttgtagcaaagccagtaaaggtttccattcaagctaacaggattgaaccaagcaacacgcttcaaaagataaggagattggacagtgttgaaactccataggcctgtctcagatgaatatatgagtaagctaatgtcgtcggtatcggtggtatctttcatcagaacaactttgtaacctaaaacgacgccgttttctattcgtgttgcaagtccagaaggtttgtatatatcagctcttcgaggcagacgaggaagaggaggtcacattgtcgtgaaattggattagcaacatagtaggtctgtttcaaactaaccaaaatcaatcctacatcagtgtaagcctcgacagtaaccttttccttgtggattccgaatttgtgtgttaggaaagaagagatgtaagagcctaaagattgtgtaagtccccaagtgtcgcatctgtagtgagcaatgacttctttatgagtttctctgcacatgagtgaccatgaaggatgcgagtcttgatgatgagacataaaaagttcgtgtagatattgagattcgactattgatttccattccttgcaaaccaaggtgaaagctgtgatgctctttagtggtaatctcgctaatatatttaccacgagatcttctgtgtagtaatctatcttcttcttcttcgttcctgactccattgatttaggttttagatcgggctaggtttactctgtttcagagactaactaaccctaagaatatagatatatacaaataaatttgtttcatgtcggcaaggattcttgtgacaaaaggaaataactcttcggtaaagaactaaatggaaaaatagaagacgaatgagtcaaaggctcattaaaagttgggcttatttacataataatgggcctttctcttggcccaataaatttaaaacccaattagggtttcttttttgtttttattttcgtatgagtccttatagggttttaatcgacgcctttcttcgatcttcttcacagacgacacaccattgataaatctccatcgtagaaagttttatctaactgtttgatcgagctgatcaacgatgaaaattgacaacgctagagaagaaaagaagaaaaaaggacagaaacgcaagcaccaggtgaattagaattcgtcctcttacttactagctagtacatcttcttcgtttaaattgaacaaattatgctttctttgttatagcagaatgatcaagctgatatggaaatgttaaaacttcgagctgctctagagggaaaacatagaagcaatggttctactgttttaaagtctgctaaagctcaaaaacgccagaaatcagaagactcagaagatgaattttacagacaagtgaaacagaaacaagaagctaaaaaagctgccaaagcagaaatctattcaaggtaaataataataatacaatcttacattaacctttatagtataacattgttcatctcaatgagaacgttttgtgttggtttaggaaaccatatttgatcccgtcatcgccagatctggtggatggaagacgattgatttcaaatcaggttagaatgttttccaaagcacacaacaacaaacatcatctgtttctctatacctagcaacatagttttaacgttcctttttttttttatctctaccaaaacgtagatggctagtaacagaggattgacccggaaacgcaacaaggaccataaaaacccgagaaagaagtaccgggtaaacgaccttggattgctggttctgcctttgacatgtttatttgcctttaactaagatgtttttggatcttgaatttttgtttgcaggatcagcacaagaaaatagtcattaaccgcaaaggacaggtcagagatatcaggacgcaagtgggtccatatgcaggagaaactcgcggtatcaatccctacacaagccgcagcatccgaatcaagaactaacctccttttcctatgttatctatttgcatcattgcatgcttttttctgttgttattatctttgtaaaacctctataaattaataataccgggggacaataatgtttcattttaagaaaatttatctctcgtttttgactaagcaatatcaatataactataagtcaaaaacgttaatgaagagctccgaaacgtgagcatcagggaggacattagacctcaagaagaaggggtcaatagagttgtgttaatatgaacatttcatgagttggcggaggagagaggcaatcaggcaaagctcatcgagaactaaagaacacaaacactatttttacaacttttttttttttgtcatccctatttttacaatttcttaatcaaatacgattttctattctaaaaataaggttattgcaatgaccatgtaagctgcgtttcatattataggcctataattaatcactcttgtcttaatgtaatctaaaagactaatgacaaaactttcgttatttttcctctaaaattatgtcgttaaagaactcatattgagatgcatcattattatctagggtttattagagaagtaggcagtttttagattttttttttgagaaatagacacttttttttagaaataggtggattaggtggtttttattgggcttgtgagatagaaaccatgtgagatagaaaatttgtggctaaagtccaaaagaggtgtcaaatactattgtagccttgtgttttaaaaacataaatttcgtctgggttcgaaaaaacaaagactaatgggtttaaaaacaaattcgagtcccatttactctatttcgttttaagtgagcccaaatattgagcccgaatgaaacaattcgtttttattcaggaaattattgagcccgagtttattgtagggattgttttactttactcttcttcgttatcacaaaccctagccgactgtggtgtacaacaaatcgagagggaacgagtttgataagagagacatttgagagaaacccaaattcttatggcgtcaactagcagggaagcctctgttgggaagcctctgttataaggtggaacaacaatttcaaggggatctaggaactcaagcttatcgtctaccattctcttaaaggtgacaaaaagattcacagaactttcagaccttagaagagacttgaacattctgaaagaccaatcatctttgatttcagtcggaggtgtttcctgaccattgagcctcaccaaaacgtcgttagcccagtatgacatctcaacaaacacgtcgtgaccaaccatggagaatcttcgtcggataacttcttcgagggatttgaaagtgtcaattttttcgcagttaatagactttcctggcctagttttatcaactttgaagtcccaccaaccattcgggtagcaaatccagcggccgaccatggagacgcaggattcgtcccctgagaaaaacgaaaacagagtcatagtaagcgtttacagagtcatagtaaacaaaaacgaaaaattcataaactttacaacgttttatgaaattcataccttccatctggtatgaaattgacaatgtatctatgaatttggcaacgacaagggtttatccttctttgacaacgacgaggtctaggtttgtacagatgaagatgtcgacgacgagggtttatgagtgtgtttggtttcaatgagttaagaaaatatgggttttagttgatgatattagcccatgagaaaacagcaagtagatgatattgggctggtttgaatgagacccatttgttttcatcaaaagcacaaaagggtaaaatgatactttactatttgctgtattagaggaggagctctattagagaggagagataaaactaccttctctgcctatttctatataagaccaatgttctaaaagtgtctagttctcaaattattttaccaaaaactgcatagtcttcaacttatctctattatttatataagatcaatgttctaaaaacgatataaatagcataagtttcgttttattgtattttttttttaattttaactgtagagaattaaattataaattttagcttcatacatatcgtatgatttgaattaaataaacattttagctctcattagagaatatgatatcatttttatctataaactcaaatttatgagcactttaatctaagaatcaaggaatatcccggacaaaccaaacgcacccaacaccatgaaccgagagtgagcatacacacgaactaaatccgagaagataaactcattgaaccaacagaacatttgaactcataacgaaactttgataagggtttgcctctgctcaaaaccagcaaggtagagaggctaaccgagaaccaggcggacaccaccacgaagaaaaacagagtctaaccagaagagacaacaagaactaagactcatggtttatctttattttccttttttagtttcaattattcttcctcattttaattcacaatggcatcaacaaaatacttaaaggtcattttcaacttttaagagctattctagtcaactttttttttttgttggagttgctattagagtaaaccaataactttttcagagtcattctaggtaatttctcaaatattaataataaataaaactttgtaaaattggcaagtgcaacagtctgatgacaaaccaagtactaaagaataaagcaagagaaatgccttaattacttctagtcaaacaaaaagtattaccttaaaatatctataaccattagtataaaactttagaattcatggaggagttttcagacttcaaacatggctaattataaaacacatatatgtctttctttcatcatcttgttatacatcatatcaggtaatctaatcactggtttgatataacaatcaatataccaactttttttcttcataatttcagtttaattaatttccatgtttctcttacagaaggaagttttatgggagtcaatgcacaggtacatgcttaagattactcttaaacaaaaacgaaacttgaaaagtaaacaaaaataattatcatatatagttttatatatagttttatatccttttgagtgctcttacttgcagggccaaatgcaatggtgtgtggctaagcctggcacgctgaccgaacaacttataaataacttaaactacgcgtgttcgatagtcgattgtcagattatatcgacaagaggagcatgttattctccagataatatctataatatggcttctgtcgtcatgaatctttattaccaagctgaaggaagaaacttttggaattgcaatttcggagactctggtctcgttgccataactgatcctagtgagttttatctatctcttctttttcactatacaataatctatgttttgttcttttgtttgatctcaaattatttttgtttccgacaggctatggaagttgcaaatatgaatttcgtatgtaaagcatagaaaaattcgcgatcgtatctcttacaagacaaagaactcttggttatgatatctaaactttgaatcattgttcagtttttctattatctaaactttatttcattgtccaaaccatcttatttaatatcataccaatatgtacctctctacttaattacatatggtcgatgttggtatgttaattaattatctctaagaaaaaaagtagatataacttaaattttatgtccaatttctgactatccaaaccaaatcaaagaatgtgttctggataataagcctaaacttatgacaagatttttttggagactaagcccaaaaaaagagaagcatacgaatgatactgcgaggcaaatgggtgaagtgatagggaataatctcacaggattctcctatcactttataaatttgagaattctatcactttacaatgaaacgagttttcaattaacaggagtctcctaatcaatcgcctagggctttagaatacttaactgcatatgttatacaaatttgcaataaaacaagattattctttcggtttcaggattttttcctctgttatgttgagtgcgatacatagagatatacagtttatgcaaattaagttagttaaccagtcccatacttggcatctagacgcagaaattaacgtcttccattcttatattgtatcgttaacaaggcaataaaagtaaccaatatctaaagaggccacaaccagtttttttccatcataattagaccaaagactaaaaagaaatcaaataacaacgtccacaactcagttcctcttgcataagaaaataacaataaataagaaacaagggaaagtcctctaactgtgctcatgacgtcgagatccgatgcagccaacgcggaagaacaaacgggaggtatgtgatatgctgccattctccagcaatgctaacaatgcgaccatcactgctatatgttccaagttgtagtaaagctcaaatatgcctttgtgcaagttagtacatacaaaacatttatagccaacggaaaatatttggaacggggatttgtagaatccaacgagatttcagatactagttgccattctccactccttagcttccatacaaataacttatcctctagaccactatcgtctttgggttctaggaaaatgttcatatacatacgtgatcccttagaagttgtgcaaagtctcttgattttcacatcttttcatacatcagggaaaaaaataactctgtatctatcagattccgtttcagtagcgtagaaatcataggacacaacatttcttcactgtctaagatgtagccaaaccagttaaggtttccgttcaagctaacgggattgcaccattcaacactgcgcaatgggatagcgttttggagaatgttggagctccacaagtctgtcttagatgaataaaagaaactttgtaacttaaaacgagtccgttttcatttaacactctcttagtgtcggttgacactgaaatcatggtctgactccaaattcgtttctttagcttaacttcgtcggttttgctccaaaatgttttcttatctataatccagttccgatcataaaaaaatacctgataagaagattttaaaaataataaaaatactttagaaataataaaaagactctaaaactaatagctaattcatagcttaaagtggtgaaaatcaaggtatatcactaacataaaccataatgttgtatccctatatatatgttgtatcttgtacaattgaatattaagagggagaaaccattcctaaaacctaattatttacaagagacaatagatacttttttttgacaaatcaaacaatatattacctaaacgattgtaacatgtaatatatatatttctcaatatgtaacgtttaaaaaagtagaagaaacaaacaataaagttacttaaaataacaaaaacaaggtaaatttggtatttcatatttttacagccctcgtctacaaatatgttgtggtatagagcgtttgggtccatttcttgttgtttgattgctaaaggctaaagctactgtctactgtgcttgtcgataattcgtctttatgctaaattaggtacaacttgaacttatacaatatgtattttatttgaataaccaaatgttgaacaaatattttctggtcgataattcgagaaaccttatctggtccaatttataccgacgtgaaatctcaagacacgtatgtacatgcaaaacatttttataccaatatcactacctagtatatcatcataaaaaaaaccttcacaataaatatttttggtggaaaggatttttttttgcgataaagaattctttacaccaaacataaaaacccaaaacccaaaagaaacgttggtactcatcatatgcatatatacctaacacacattttttgtgtgcagataaatatgtctaactacctccattaggtattccaatattttgcttatagattactagaagagtatatttcatctacgataattaaatttatttaaacaaaaaacgtattagaacgggtattattaaaaaacatcgaagtacaagaaataatattaagactttgttaattgacaactcctttacttggttgctttcttttttagttgtatataaatagtatatactaaccgattttttaaagactataaaaattcgaatctatggaccttaaacatataatcccttaaacacgcaatctccattgctcgagttagatcctcccatgcgttaatatctttatcactttaccggcaacgccactccagtcctctcccaaacttaacttccagttacaatttaacaaattaaataatttaaaattattaccattacatatgcaaatctcaaactaagccaaaaaaaaagaagactatatataaagtattttacatggtttttaacgctacaaatgtttggtcatcctcaacaattatcttaagattcttaacatgcagactaaataacatatgtacaacaatatcgcagagtatttttacttcaagaaaccaaaacacaaccagtcaaccacatcaaatcacatcaaaactctttttcttctctagaaagtggcatctgtttttttcatatagacccaaaatccttgtctcatttctctctttccccatttaatactactcaaaaaaataaaattaaaaccacatctttatatcaccacacaaaaactcacttaaaacaaaaaatcattatcgacatttctttcattctatcttaaatcctcatcatcactcaacttgagctcgccaacacagatttctcctatatataaaacaagttaaagaaacaaaatatgtatattttaaggttaattgtatgttgatttgcgtttgataaaataaatattagggtttagattttacacttatgcaaattagatgtcaatttggatttatggtttaaggcttagggtttagggtttagaattttacaattaaacaaaattatgtatcgattgggatttataacaacgaggttatggttagatattataattaaacaaaattatatattgggttgggtttataaaaaattaagtctgatttagattttacaattaaatagagttatatgttggtttggttagtagatattttgttttcttaatctgttttgttttatgattatagttttaatttatttttaaagataataagacatggtatattattatattttaattagtcaattaaaaggatgaataagattgtgaacccaataattattcatatacgacgtgtcaataatccactccttcaacttaggaccttaaacatctaatcccttaaacacgtaatccccattgctccagttagattctcccatgccttgataattttatcacttcaccggcaacgccactccactcctcttccaaacttaatttccagttaccatctaacgaaaataataattttaaactaataccattctgcacatctcaaactcagacaaatcaaatataaacaagacatttctttgggcaaaataaaaacgagactataaagtattttccttggtttttaagactaaataacaagattatttttgcttcaagaaaccaaaacacgagccacactgattacacaaccacatcaaaattctttttcttctctagaaagtgccatctgttttcttcctatagacccaaaatccttgtctcatttctctcttttcccatttaatattactcaaataaaaaaaataaaaataaaaatcaaaaccacatctttatatcacaataacccacataaaacaaaaaaatcgttatcgacatttctttcattctatcttaaatcctcatcactcaacttgagctcgccaacacaggtttctcctataaatacttgtaaattacaaacccaagaaatcattcaaaacttcatacctattatatatattggtgagagtattgagcaagattctgattcaatttctggttaagtttttctctcttcaactctctttttattcgtagtttaatgatcaatttattatgttttgtgttgtacgtatattatttttattatcataattttctttttcctcatgatttttacaggtaactgtattttttctatgtaaaattcaaatacattattgttttgaaaataaaataaatattattatcgagaatgatgtatgtatattaaaattaatatagaaatattcgtacaaaactatgtttcattatcaaggataatatattttcttaaaaccattctacaaaatctaggaatataatgtcgatagatccaattactttcaaaattgtcgctcattgaaattaacaatttattaagattaactaataaaaattcattttgcacaaaaaaaaaagtaataaaaattcactaagacaactaaaaaaatcactttttataaacagaagaaaaaacctatataactactttgtggatgttaactcctctaaaactgtcctaaatctctctaacttatcttgattatttttcctttcagcaatatcatcgatggcgttatccaaagatttgatgttgaaatgctcggaagacatgatgagtgcttacaaatctgcttgtgaagaacacccaaaactaaaatcctttgatgcttcccttcagcagcgaaccaacaaaatgatagactcactcaccgttgaagacaagaatggttcgtcctccccacacgacgcacacatggagctctccaagcacctagttgaagttacccaaggtgtggcagacttcattaccgaaatcgaagacgatgtgtgggacaaccaagctctaaagtatttggtcctggcctattttgaaaatactaaaaagactttagagattttcaaaactatagagaactgcgtcgagaacgcagaaatgggccaacttctcattcgagaggccttggccgagtttgagaaagagtcggcagaaaaagatgttggtgggaaaaagaagaagtatgaaaaaacattggaggacctcaagagttttaaagagatgggagatccctttgacggcaaagttctcacaactcagttcgagcggatcaaaaagcagcaagaatcccttctggaggaagtgagtgagactagaaaaaagattcaggacgaaattagtaatctagagaaaaaaactttaattacgaacgtggttttcggcgctgcgtttgctattgttgcggttgcatccatagctctaattgcaacaggcgtgggtgcggctgccggctttggggctctagccgcaccactgcttgcggcaggatgggctggagtctacactaccttggataaaaagaaggatgctctgaacaaacagttagaaggtctaaagaaagtggaagagatagaagaatcggtggagaaaggtataaaaaccaacgaagaagcgacggagaccgtatcgattttagtcgacgggctagaagaccgtatcaaaaatatgttgaaacttgtagataatgctattgaccatgaagataatgaggcggccacgagaattgtcctaactcagatcagtaagaaagtagagaaattaacaaagaaaatcacggaggttggtgaaagtgtggaagatcatagcaagttgattgcaaaggccagacttcaagttctgcaaaagatcaaccgttaatcttttgtttaacgatgtttgttgttcaaaatccatattttagtatgttttaatcatcccattgtacctttttaaaatattatatgttttgtaatttcaccatccgagagattggttgatatgtacctctatcccgtatattcgtgaaataaagtttgaaaaaaacttgtgctttattcatcttttcacaaattaaatgaccaaataaaatcaccttttttttttctttcgaccaaacaaaattacctaaaccaagcgtacgaaatttaatcttgaaatatgaaaattttaacgctcggaaggagaatataagatcaaatcaatatatacttttcctttgggataatcataaaactcattatcctatctgagatatttggacgagaattgacgtgaaaatagatttttgccattaacgatgaagatccaaccaattggtatcgatcgagcccttctacttatgtagatccaaccaattggaatcgttatcctatgcaaacctagttaaaatattgatttcacagaggagtaagagagggaagaaccaaagtaagcgatcattcttagacaagaatgatataaaacttttatattactgaaacttgttatctacatcacctagctacttgtgcctcttgaaaaataaacccgattgtgtcgttttgttttgtttgcatgcaagtaattaagtacaaacgagtgagtgagagagagtgagcacagatacatgtctctaaaggtttcaaggttaacaacactgctacgttatttttctgtttatgtattttcttcacttctatgataatggagtcggctgacattgtggtaacacttttcttccatttttctctcttattgagaccaaaccaaaatactcgaaataattgaaacaccttcatacaaaagaactaagagtcgtaatgcaaaataaaataaatacttgagaaaccaataaagtcttgcagatattatctctagacttccatcaactttggttatagagattatattcatatacatgagagatccttgacaagtggagaacgatctagtgaatttgggatgttttccgaaatcagggaaagtagtcacacggcattgaacagagctcgtaccagtggcgtataaatcgaaggatacagcaacatcttcactgtgactagtgctggcgatccagtgaatactcccgtgcaagctaatgggagactggttatgaaaacctgacacagtcaaatcgacagtgttgatactccacatgccagtctgggatgaatatatcagcaaccttctaaacgtatcgcttccattaaacaaaacaactttgtaatccaaaagaacgccattctcagttcgtgtggcaattcccaagggacatgagactttcttgagataaccatgagaagggatctctacgcattcctgtgaaactggattagctacgtacaaggatcggttcttcacgcagatacagttttcactgatcaaaatcattccaacatcagtactgtaagaccatactttgtagttgtttctttgtgtttcaaacttcttggtaaggaaagacgagatgtagaagtggagagatcgttggagtccccaagtgttgcatccatagtgagctatgacttcttcatcacagcgagacaggatcgaccatgatgaataatgcgagttttgatgaatagatagaaacaggtcacggaaatatggagaatccaccatcgattcccattgcgtgcaaacaattttgaaagttgtgaaaatctttattggtaatttgacgagtatcatcgccaatagatcctcaggtaaggaattcatattttcctatctctctgtttcaccgagattaggttttttttttctaagcgtgtgtgttagattagggttctcgggtcaatacaagtgctaccctaaacaaaggtaaaattattattgaaaacttgcaatatgtagaaagaagataaaactttaaaagtaaaacttttataaattaataatagaaagcaaactttggtgcttcttgctccaaaattagactgttttggcatgacaagggttaattcccaactgacaacactcaaatccagtattttcaataaaaggattatagtattcgccttttatagtaacggtaacgtataagactatcaatataaaaagtatgtatattcagaagtttaaaagttattaaatattttggttactgttattataaatatgttgacagtgctataagacataacatcgtttgataaataaaagctattgatgaattctaataataataccttttaaaaaataatgaaaagcatattttaatatattatatataaatttacctaattataatttatgatatttaatgagattatatatctacatagaaatttaaaaacaaattgttattttatctttttcgtctcttttaaacacttcaacatgctttgtttcatatctccaaaatcttcatctttaagaacctttaataaaaatatcttcccatcgaaggcttctaccttgaaaaaaaaacaccactaaaaccaatagaagctcaatcgactcaaccatccttgaaacttcacttgctaagaattcaaaccaaatatcgtatgaaaatggtagaaaatttacaattttttgttgtcttttttttgtagtgcgtgtaattcttcgagcctccttctttaaggtgttcagtttgggtttcatgctgaccgagtttctatgtttaaagttcagatttcgttgttaaggtagcataataattagttgttgtttcacaaaaaataagaaattagttgtttagcatactaaaagaaaaaggaaaaaactgaaaaaaaaatttcagagaaaaagctagcataattcgttcacggtcattaagtagcggatttgaatctacaaacagtataaagatgaagtattttaaactaattaaatgatatatttttcttccaaccagaaaagttataaattaaatgttcaaataaaagatagataagatattttttggaatcatgaaattactcactctgacagaatcacatgactctctaataatttattcgatttagaaatcatattaattaaactatattttaataatagttagttgatcacatgttttctctaatattttattagattataaatcaaattaaaatcttattatataaagtataattttcaaatttagcaattcacctgattgtgacacgtgtcaaatctattgatctaagattttgccacatgcaaatgtgtgggaattgtgcttatggtccaattgttcatgacgatttttgatgtagagaatcttgttcgagataattatatactcccttcgttcttttataaatgatgttttgagcttttatttttgtttttaaatagatgatattttaaatttaatgcaaaattaactatattttattggttttaatgatttttattctgcagattatttttctattgattgattaaacaataaatgatgttttagtttagaaaaaaaatggtttcttaatatgtgtgcattctcctaaaacatcaactaaataagaacggatggagtatgtttaagtagaagcattttgagtctttgactggtttgatgaaacgcatttatgtagttttaaagaacaaattgaacttcatgtaaataaaatattccattaatcttgcttattcctatgcatatctaagtaaagaaaaactaaacaaagttgatcttcttattttgtggatctagaaaatatggtttgattctatttagtgtgttcatgccatgaagtacaaaaactattaaatagctatatgttgatcatgtttaatcatgcaattaattatgttaatcatgcataatcatgtagatatttatgatttaacataaactaacatatagatatataaataagaagaaatatattgagccatgtgttcattgaaccattatcaactcatattctaacatgctttccttttatagttttatatgtaacatttatgtctatgttggtgtaatgtcaatatttacatttgtatattttcatttaagtatggttagttagtgggtgattggttgggttgttgacttagaatttttgttgtaattgttttgatgtactttgtttgttgtagttgtaggttgttttgtgtaagtattttgatattaaaacctcattggtaaagttagttcaatattatagatataaattttagatatatgaattttaaaatattgcaatataaaatatgagtgcaaatgaaacatttaataataataatagtcatagaataataataacatttaaacatttattatttaataataataaaaaaaagtttgcagattataagggatataacaattcaacatgctaaataaatgccaattttgataaaatagtcgatattcttatctaaagagtgtgcatgtatatatgtagtcggtcataaatgcatcgttattgtttttgttaaactgtaaatataattaaggtgataaattatgtacatagtagaaaccgaaaacataagacattttttggaaaaaaaaagaaaaaccaaatgctgaaaattggagaaaactttgtgggtttcatcacaaccataagggcatgaacttgctaaagtgttgtgtttctcttttagcggtgataatattcttgatctctcaatcaatcatttggaagattgtgtgtgttgataacgattgcatgttacggaggaaattgttcatttgtttccataaatggaagaatgatgcttgaacttttatctttctgagaatagttggggagtgaatcatgatccaaaaaagaagctccgacctggagcagaacaagacttgacgatctaatcatggaagaatatggcgtcatattttagaggcaaaaaaaaaaaaattgggaacaattggtccgttgactcctcatatgaagagcaaagaaaacaagcccttgaaaagtatacatgttttggaataatacattaatttcatccattccttctcattttgcctaggtctaggaacgtcgatgtttccaaagatgagaacacatgtgtttcttccactccgcacgttgctttttagaaaattctcagctaaaggtcataacttcaagaaagaattccaagtccatgaattacatgatgactcatagacagcccaaaagcaaccgtttccaattatatccattgtatagatgcatattattcgtaatatcaatctaacctttgaacatggtcgtacacaacgaacttgcatctcaaatccatttctccgagtctgaacttttttgaacctagactcgggtattatttaaaggctctacaagcaaaaatccatgaaaactatattggttcctagtatggtatcatatgctctcgcaatcttgatataattttttgtcattgctacccaaatttctttcatactaattggagttagctaattcttatatgcaagaaaatcccattgcataagcttttgatatggtagtctcgagtaatattctaataagaaattaatttacttgcctcacatatagtaaaacctctataaattaataatctcggtaccgtgaaattctattaatttgtaaaagtattaacttatccataaattaacaaatttgtaaggagattttcttaattttgtatttttttaattttctatgaagatataaaaatgatttcattatataaaatatacttttagaaccaattacaattatatatatatatatatatcatattcatatctagaagacaacatcaaaactttttgatgcaataaaatattagaaataaattcaaacaagaataaatgcgaatttaagccaaaaaaaaaatactaggattatatttcactaaaatttcttacatataatatatacaattataattatcaaataaatatataattgatatatttgtacaaataattaatttatgatattgatcattgatcattgatgggattttcaaaaaatatattatcgtattatattattgacttgtgttatgttttacgcaagtttcaacttgaaacaatataatttattattttgtagaggtattactgtattaaaatgtcttttacgatcattttaaagttgacagttaacatacataatatgatctaatattttatatatatatatataatatttattaaaaattgctactataaacattactaaaatactaggtaatcacccacgttaccgtggagattttgtttggtttcatgttttgtttgatttaatatcatattttaataaatataatgtttagcagcaaaactaaacaagttaagcaaaacgacaaatttggagtcagactataccttcagtgtcgaccaacactaggaaagtgtcgatcaacaccattcacaacccagcaagtcttgacggcttaaagattagaacatcctagaattgctcgagaagactttcctatttacattattagtccttgtatgttttaagacataaatattctttcaggtcattgtttagacctattaagttatcttctgttttaacttttgctctgcaactctttgagatttttggagacttcttcagagatttcaaaacctttagagagaaaaatcttttttaaactctattctcttttttatttctttatgcaatattattcaaacatgttttcagttactctgatctgtctgagtaatctccttgttcggtatagatgaattaataaatcaataacctgttatgatttttttagagttcttcatctttgattgttcttattgttagttctagaatagctaactagaacttgatcttacgttaataggtacgatccgagaggacgcttattactagaactatcttaggtgggcataagtaactagatacggatatgtctggtctatataattatgtgagcatatcaaaccagagtatattgcttgcttagttgtagggttttgcaacgagagtttgattcaatactattacgcataatagtcaacgcagcgagagttggttggttatagcatagtgatttgagttttagaacggttcagtaataatcctaattaactgttagatctactattaatctatttcccgagaatatccctaaacccgactctttcatccatcagacaacaatttaaattactttttctgttttttcatatctagaagacaacatcaaaactttttgatgcaataaaatattagaaataaattcaaacaagaataaatgcgaatttaagccaaaaaaaaaatactaggattatatttcaccaaagtttcttacatataatatatacaattataaatatcaaataaatatataattgatatattcatacaaataattaatttatgatattgatcattgatgggattaaacgattaataggattttcaaaaaatatattatcgtattatattattgacttgtgttatgttttacgcaagtttcaacttgaaacgatataatttattattttgtagaggtattactgtatacaacttataaagttgattttaggaatatatatgtatatttatttatttaattgaggttatagttgtaacttagccaacacaggtttctcctatgttcttctataaatacttgtagatcactaacctaactaatcattcaaacttcaactctcgctaatacttgaaagctcaaaatatcctcttgtattctgatcaaatttctggtaattttctctcttttaatctctaactcattttgattcttatatatatgttcatatttctgatttttagccaattgtcggtattttctatttattatcataattttctttttcttcgtgaattttttacaagtaaatgtatattttttctctgttctgaatattatataagtgactaatcaaaaaatttagaaaagattgtttcgaaatatcttatttgggaagctcggtgtatccaaaactctgtcctaaatctctctacatttttttgatttttttttcgttttagtaatatcatcgatggtgctatccaaagagaatatgttgaaatactcggcacaccttcgtgcttacaattccgcatgtggagaccatccagaactcaaatcctttgattctgagcttcagcagaaaacctcaaatctgataaactcgttcacctctgatgccaaaactgggttggtgccactgccccaacacgcagcatacaaggagttcaccaagcacctagctgaagtaaaccaacaggtgtcagactacatcattggatatggagaagtagtgtgggagaactcaactctgagatctttggtcgaaacctattttgaaagtgccaagaagactttggacattgccgagaatgtaacagaatacgtcgatgaagcaaaaaggggcgaacgttacattgtagcggccgtggcacagtttgaaaaagacaaagaaaatgatgttggcaaaaaaacgaagaggtatgaaaataccttgagggagctgaagaagtttgaagccatgggaaatccttttgatggcgataagttcacgactctgttcaagttgatgcacaaggagcaagaatcccttctggaaagagtgagggagactaaggaaaagcttgatgaggaacttaaaaatattgagatggaaataagtagtcgaaagaaatggagtataatttcgaatgtgcttttcatcggtgcgtttgttgctgttgccgtcggatccatggttctagtatgtacaggcgtgggtgcgggcgtgggcgttgcagggcttctatcattaccactgattgcgataggatgggtaggcgtccacactattttagagaacaagattcaagctcgagagaaacaggaagaagctctgaagaaagcgcaccgtatagcaaacgaaatggataagggtatggaaaccgacaaagtagatatgaattccatatctggaaaagtccacgcgctaaaaagcaagatcacgtctatgttgaatgctgtgaaggatgctactgaggatggagcaaatgaggtggacacgaaacaagtaatggaaacccttacgggggacgtggtggaattaacagaggatatcaaagcagttggtgatgatgtggcaaaatatagcaaaatgatcgaagagacgagttatcacgttttgcaaaagatcactggttctggaaaataaactttatcgatgtttgatggaatcgaagcaccaaggcgcagaacatcaaacagacgcagagtccaaaaccggagacaattttgtctcatggttttcttggtgtccgtttaattatttcagtttttcttttaagtgtttgagttttcaaaaataagagacgacggtcttcctctcgtcgaggaagctatcttctccactttccattatttcctcgtttgtaggagtcactgactccacttttttcttcttgtaatgttttttttctcttcttgtaatgtttctcactttctctataaaaaaaaaatggcattcttaattgccaaaaaaaattcttgttcttattatctttcagttttcgtacttactctgattcctcaagctttgacaaaatcaaatctatcatttggtatcagagcaaatagtgtttggtccgaaattttgtttcgttttacccattccacccaaaagaaaatcaaagaaatgtgttgccaccacccaccactcgaaacaatggctaacacaaaatataaacttgacgagctcgaaaagggcatgggtttggtcatggacgttttccacaaaatgcaaaccaggttgggtaacaaactttgttgtaacatccccaattccataattagtaattgggccattttgtttagttaaaagaaaacaaccccaataagcccaatatcttattccttaaacgacataggtcatggtcgtttgtgtgtagagtatatatatacatgtatatactttctttcttctttacgagccgtcatagagaaacacaaacctaattcgtgtatgaacagaccagcacattgatctttgagtcttgaaaagctatattagtgttcttgatgttgatgtcgttcgctcatacgaaggaagagatggcggctgcgaagttgttgttctgttaagttgtcattacggttatgtgttgcgttgtcgtcggactcgtgaggaggagaaacaagagtcttgaagccaccttggatgtgttgtggtggtgtgtgttattcggaaagagagagaaagggagcagaagagagagagaagtgaggagaggatagagaacaagctgttgcgtaggtggtgaaaacagctagtgggcttgattggtcatggcgtagctgtgacaggcttctatgttggtgaagagcaaagttggagcagatcagagatggagaagagaagaataagaaagatgaaaaaggaaataagaatagtgtggaggaggcaactttggaggctcgtacaagtaatatctgacatagatatggaattataaaggtactgaattgttcattagcaaaccaagagtctacagcaactgaaagatcttaaatcggatttaaatggaaagagttatggacattgcttcctgtgcacgaaacaactgaaactgttcaaacccagaaaccctaaaaggcagtccgagatggcttgttgacggtaacgtttggaggtcgtactgatgtccaatctggctgaaaattagttgagctgttcgtgggaatacaggctacatattcaatggtgggattctgttataaacagttagtttctgatttatttttgcgtttctaaaaatgtttgatatagagcaaattatgataagatctattgtttggttggtaaatgaacttggatgagctgaaggtgagggtgataatcacggaaacacaatgattattttctaagcatgttcttcatgaattgcttgtataggtttggaaactatgtacttgtttgtatgttctttattgatagtgtgtgacattgaacgatgatatgatgtaatataggaagactttatatataacatgatgatatactttgagttaatgtgttggggctacggacctgagattggttttgcgtatcgtgatgggtgaacctgagattggtttcgtacctggatgtgattgtacgaacctgagattttttttgtgcatggtaatgggcgagcgtgagattggtattgtgtctggtgattggacgagcttgagattggtttcatgccacactacgccgatgaaatttctatttagcgttattgttgaatgaatttatgattgaatatttttaaaaacttatgttgttatacgtatgtttgagaacgtggagtctccttccatgctatgcattgattgttgagtgtgattagaatttcgccattgtgttcgctctttttatcttttcccttagcttgataagctttatgagatgtggttttcttagtcgattttggttttgatctcttttgccttttctaccttgatgagcaaaaaggaagttttacattcttcttcttatttcgtactcgtccttatataaggatccaattggggtttgcaatattcagtttttgatcaataaagaataagggttttaccttttatcaaagtctacgaacttcctttgctttctttgcaagaaaccaagagttcatagcaacaagtctttctcgtaaaccattgatctacagaaagttcttgttctctgcattaaaaaatatgtgttttggcgggaccatttgaataacatgttgtttttcactgtaagacgggatgggtgttacatttgtagcatggaagaggcaaacgccaaaaaattctgaagacttgaggaatccaacaatcaatagaaaactctatacccggctaacggacatgatgacgcacattcggaatggcgcgcttactgcttacaattggggcggagagaggatgcagcaccgtcgttcatcacaccagctcacaactaccaacatatcaagctcgattaccctcggtttgatggcggtgatcccacggagtggttgagaaaacttaaactaatatatcacctttcattagacatcaagggaacaacttgtgagcttttgcatcgtatcatctcacagtggaaggaaacccttggtggaaggggaaacgtttatgcacgaattgtgggtacgatttgggccatcagaaggtgagatttttcacgaagcgttgtctaaattcgtcaaacagggtgctcacgattattcgtattaacgcaaaatctaaccccagatatgtaaaacataagccaaggagtttgagagataaatgaacatggttgagatagacttgttgtgtctatgaatcagatagtcctttatttttctctttcttttatccaagcttcttaatatatagggttgtcgcttcttttaagtctgcctgccacatgttactgtttcgttgaaatcattggagccataccatttctctgtataatcctcttgacggtatctcgttcaatataaattatggcttaatcaatcagagtttgtaacaccttgaataagtgagaagtgatgacaataagcttgtattttaggaacaatcagaattattctctctcttttttttttttttgctaacaacaaatttattctctgttttgcaaatccatttttaaaaagttcttgcttcaaaaaaaagaagataaatttactttttttttttttttgatataccctattggctaatctggtcagcttcggtagaaacgcaccgaagtactacagagtggacttctcccgattcgggtagaattggactaccacactctctggtccgagtttggaatgccttccgactaatgccaagggataatcagaccgcctgcctttctgactaccaggtaaaccaagtacgtcaatgcccaactgacagacttttgattacaaaccttgtttggcttgatcaaatatttcatcatactacactagttgagaattcttttgagaatttgttgttctcagagcgggagtatacttagtttgagaattctttttccgatagcaacaattagaaaacttgttctgttgtttgtaccgattaatattcaaagattattacaattttaaaaacttaatagatattgcataattatatatagacatgttttctatatacatctgtctagtgaatcattattatttttatgtgtaatttttttatccataacaagtttttgacattgttgcctaggaccatttagcaagcgcccttaggttttagatttaaatttcgctctctagcctccaaacacatagcttatgccctagacttctatcaacattggtcacatagattatgttcaattgttaaatctgtagtgagctatgacttcttctcctattcctccccaaacatgagcgaccataatgaagtatgtaagttttggtgcatatggaaaatccacgatcgattccaattgctttgcaaacaagtttgaaagttgtgaaaatctttattggtaatttggcgagtattatcgccaatagatcctctggtaaggaatctaagattcctatctctctgtttcaataagattaattttttggatgttgtaaattttgtactcttattagacttgaaaatttaatattttggagaaacatcttttggcagtaagtaatgaagattatagtcgaattcacttacacaaacaatttaaattcaaatttataattgatgattatagtattcatcttttttagtaacgtataagactatcaatataaaaagtatgtatattcagaagtttaaaagttattaaatattttggctacttgtattataaatatgttgacagtgctataagacataacatcgtttgataaataaaagctattgatgaattctaataataatctcttctaaaaaataatgaaaaacatattttaatacattatatataaatttacataattataatttatgatatttaattagattatgtatctacatagaaatttaaaaacaaattgttattttatcttcttcatctcttttagacacttcaacatgctttgttttagatctccaagatcttcatctttaagaacctttaatgaaaatatcttcccatcgaaggcttccaccttaaaaaaacaccactaaaaccaatagaagctcgatcgacccaaccatctttgaaacttcacttgctaagaattcaaaccaaattaaatatcgtatgaaaattgtagaaaatttacaatttcgtcatgtttttttgttgtggtggcgtaattctttgagcctccttctttaaggtgttcagtttgagtttcatgctaaccgagtttctatgtttaaagttcagatttagttgttaaggtagcataataaattagttgttgttttacagaaaaaataataaattaattgtttagcatactaaaagaaaaaggaaaaaactggaaaacattccagagaaaaagctaccataattctttcatggtcgttaagtagcggatttgaatctacaaacagtataaatatggagtattttaaactaattaaatgagatatttttcttccaaccagaaaaattatgaattaaatgttcaaataaaagatagataagatatttttggaaattaaatgttcaaataaatgatagataagatattttgttcaaataaaagatagataagatattttttggaaattaaatgttcaaataaaagatagataagatattttttggaatcatggaatcactcactctcacagaatcacatggcatcctaataatttattcgatttagaaatcatattaattaaactataatttaataatagttagttgatcacatgttttctctaatattttattagattacgaatcaaattaaaaaaatttattatataaagtatagttttctaagttagcaactcacctgactgtgacaagtgtcaaatctattgatctaagattttgacacatgtttcaaaaaacttttcctttttaataattaaaaaaaaaaagtaaatatataattataagaaaaatatatatctaggcagattttaaaatgtaaaaaaaaaagctattaggaaaaccataagagttttggccagtaggaaacgaaaattttgtttttaacaattaaaagttgaaaatgataattataacagaattataaatataaacagttctacaaatataaaaaaaaatattataagaaaactatacatataaaaaaaattatatgtatatttttcataagacaaatagaaattataatttagtaagtgtacaagaaataaaaatttaaaatagaaaaagattaagaaaattatataatcacttattattcatatacgaaaaaggattgtaaatactcacttcaatataaacatatagattacctcataatttctcgccaaacaaattaatttctttagaaacaccatcattgctttaacttcattttatttgtataacattttcttttgttggatcacaaattattttttggatagtattagtaactaacctttgactcaaaaataattataaaaaaatactcatgagtcaaaaaaaattgaaatgtaaaaattcaaaatagccctcatacaaaagacaaacatagaacgcgtattgtaatttggagaaaataaatgaagtaaataataataacccaaaatctattaaaaaaaaatcattattgaaaatttgacaacgaaagagacaaccaaaaatatcatttagtaaaatcatatcatactaaaagaaatatgagtagcatgtgattgttatggaggtgataatggtgatggtggatggttacgaaggtggtgatatggtgatttaaaaaagaaatgaatcatataaaaattacattcttttatcgtatgttggaaacatatcatgtcgtttatatttttttagaaaaataatttgaatcaaaatggttttctaaaaatagcatgtgatattcagattcaaggaatatatagtgatggaggcaaattaaaaattatgaacggcgatggacacagactagagttgttgtcggcgagactcggctggatgttggaggagataaagaaggcaaagaaataagagcaattagaaaagagaagaaaaggctttgattatttgttatttatttttaatattaattaagatataatttgatcagatacacatattatgtaaatataaaaatctagaagtttttattaagatgaagtgtataaaataaaaattcagtatattatgatgaaatagatagttaaactgtattgcaaaatgaaatgaactagattttaactcgcggtatatcgcgggacgatttattttttaaaggtaatatatattaaaacttacaaattttattttcataaaatatttatattttacagtttataattgttaataagtaacgctataccatgaaaccatgagacaattgttaaaaaactgaagttttaacccttattaaaacaacagattaataatattttaaaattttataaatattgattcaaatacatccaccatataacccaattccaaaataaaacccgttcggtaatttctttacccgtcccgtgatttttttttaagtaataatttttaaaatttaagaattatttattatatataaaagtttttcaaattgtatcattctctaatacatttatattttatagtttaattttatatatagtaacattatacataccacataacatttttggttttatataacctttataaattaggatgatttgatatgtttaatattagtggtcttaaaaaataataaattaaagatttaacccgtattgaaacagtggattaattatattttacttttttattaatgttgattcaaaaacccgtccctccaaatccgtcttgccaaaaaactatttattttattaatattaattttatttatgatatgactcttaattataatctaaacattttagctaataacataggagtgcaccatatttatttaataggggaatgtatcatatgacccgaatatagtagttaaatattagttagtttaaattagttaaagaatacaaattgaaaatgtatattacactttattcgaaaatagtatcaaaatttatataacacagagatttgataattttttaattgttgaatactttttttttgtgctaatttttatgtgattaagatttaattgatttcgtatgtaaaatattaaattgttttacgaacttatttgtttataatttggtaacagatagatatttaaatattcgatatattttgcttcagtttagaaaatctttgatgacccgtctttagatccaataagccctataattaagaaataaatattgttgttaaatgattttggtaaccttaatgacgtaattaaaagattttttttttgattaaatttttctattgccattgtcatgtaattaattacaaaaattaaggttacatttaaaatgtacttcccaaataatatagtaggatagattgaaaatttgtctagaaaataaatactaatagaaaatatgtgtgatttactatttgaaattcagatagcattgatcaaatagaatgtatagaattaaaatacagtttattatgatgaaatagatagtgaaagtataaaacacaatagattatctaaaattacaattttttaaaaacaaaaactactcgataaatgtatgttaatcatgcataactattcaattatttaggattaacatatcgatatcaaaataagtagaaaaacacgtggatgcgtatgttagttgagatgttttgaggataaggaccatagggtggacatgaactatatgttaatcatacaagtcgatatataaactattatactattaattctggcgacattacacatgcatagacataaatgtcatcctagaaatgacatttttacctacaaacttataaatgtcatttataaaataggccctttaacaaaaaaaaaaatgtcatttataaaataaaagcatgataagttgtaggaatccagcaatatataatatgagatgatgatggttcaaagaacacatggcttcatgtgatatttcacttatattatcataaatagtttcatgattaatatatagttgcatgataatcatacaattaattaactagtgtagtttattttactttatattctgaaaagaatcaaacaatgttaatataataaatcattaagtcacttatacaaaatcacgtcttccctaatatttgattctattatgaatcatatcacttaaactatagtttaatactaatagtttagttaaatcatatgtcttctttcatattttattcgattaggaatccaattaaaatatagttattaatagttaattagacaggtttggaaaattaaagttttaaattattcgggctagaaattttcagcagaatcatctcttgatcaataatttagtgtttatattagttagaaaattaaaacttatttcttcagatttgtttatagttttgcttaatacttccatgtaaatataggatccgtacacttaagaatttatttatttagaaataaagctctcaacttaaagtattttaataaatttaataagtaaaatagtgtatgaaagtagagatagataagtagaaaatagtaaattatttgtttttagataaaaatatatgtgtcccttatgtattcgggaacctcatattcatacaataatttttacatttatagatgattaaatacattggcttcgagaaccaacaccaacaattagctcccctagtccttcgagcttacacaccagttgagaggacattatttccttaataacgaagaatgcataatatgatctctattctcataatattttctgtttaacttaattcgaaatcgttaatctattgtgtgatctcagaactttgtgaaattttaatgtattaaaaaaatatattttaatatattatatataaatttacataattataatttatgatatttaatgagattatatatctacatagaaatttaaaaacaaattgttattttatcttcttcgtctcttttagacacttcaacatgctttgtttcagatctccaagatcttcatatttaaaaaatgacgacattactttcgtaaggaagtaggttttagaatttcggactcctttcggtttattattcattttgtcggtcctaaagagcgaatactatgtttacgcgatcctgttttggttgcttttttatttgtatcatgccccatttcattctctgagactatttccaaaagtaactagctcatcatccttaccgagatcagactcaatggattcaccttcttctcgagggtcttgaatggaaagggacatgtggtcatcaatcaaagtctcctcctcatccttattgcttaatagactgaaatcagttgatgagactacatcagtgacttgcttctctggtttattctttcatgtgggagatcaatgtggatttttacgagtgaccgcagtttactggttcttttccactttcctctcccccccggtctactatttcaccctcctctgtcttgtctctgttgtggacaagaactcatgatacgaccttgaattggtctgaatttatcttgactgtctcttgcggtaaaactgaaggtgagaactcggttagtaaaatgttttgtgagccttccagttcaaggataaagcctcttgccattttctctactgtagctttgtcaacaacattggccttgtctccacacctgtaaaagactgcattgtggaggaagtcaagggtagctaaccagaaccgtcacggtctagcctgaatcatcaaaattaatctagttcaccaatggtttttataggttgacttctaccagcactctcgccacatccaaacgaatacaccactctgtattcgggtacagtttaacaaaattgcctttagtactcgataggaatctaagaccctggtgcaaaaagagatgcggcggaacgtctttgaggtccacccacaaaggcatggccgactgatctgagggatattgtgcagttgcaggattccaaatactaatgactattgggatgtttgcaatgtgccaatagcgacgcttcaaaacatggtttcagatctgatcgctctctatgaaagcacaattgttgttttgtttaagaactaaacatcaatccttgaggatttttcagtgacaatctgtaacatccccgatccgaactaggatcgaggggaagggctgggacgagacttatagagagtcgggcgagaaaactcgtcccaagtcccggagaagggcggccaaatcgtgtgaacatgaatggccaagagcccgagggaaagaagtgagaataaatagctcggaaagctaagtgggaagctggagcagctcaagggaagctcggggaagctcagccacctcaaagggaagctcggccagctccactagctcgacttagctggaaggggagtgagccggttactcggacggttgtcggacggttgtcgaacggtttccccggcagttaccttgagcggttacccggcggttaccggcgattaccaaggcggttcccgggccataaggacgcgccacgtgtgtggttgggaaggaagcgccctgaaggatccgaaaggacctagaggcgcccgttcgcaagggcggttattcgccccttccttataaataactcgcccttcagccaaggaaaaacacaagtccatataccgaaactctcaccaaaactcagaaaagaaacgtgatctttctaagggtgcgaacgaacggaacaagatgaccgagatttagatcatgggcactcccggcaccactgggccgacggaggccgaggaagcgaatggtcgaacgaccaaggatatgaccaagttcgtgggaaggatatggcttagcggcaaggatggttgtccgggcaagtgggtggtgtttaagttaaagtattggatcgaatgattataataacctatagtgcaaacactcatgtcgttcgaaaccttatatgaataaagttggcttgtttctttatgtgaattcgtctctttttttacttatgaatctcagaatttccgctgccaattacacttagagcgaattcggataagacctgaggacacttgagttgtcctcggatgggaacaacctcaccgggcggacagcccgggatgggacgtttcacaatccaaatgtgattcatagtcaagtgaataattccaacgtgcagggcatcacccataaaaacaccgacaataaaacacttccacaacgacactgatgcacccactacttttcctgaaattgtgactttcgcgactctattttcaacaacaaagtctaagatttcctttagccaaaaagacccatgggtctcttatgggaggagagtctgcttgcgacgactgagttggagagggaagagaaggagaagacgccatcggcagcgccggagactccatcggagggggaaaatcgctaccttacaagggatgctagacgatgggagcgactagggtttatgcttcaaaaaacttaaactttcatatttcctttgggataattttaaaaccttctatccgaaatagagtgatatagatgccgtgatttcttcaagaactccctaacttcttcttggtaaactgaacaagtagtcagagtatttgtaaatttaaaagttttcatgattggtacgacactgctgaactcaaggaagcattagtaagtctcctgaaaaggaacaaatcatcctttgcctggtcagcagaagacatgtctagcatctgcccaagtataatttgtcacgagttaaatgtcaacttaagtttcaagcatgtaaagcaaaaacgaagaaagctcgggacagaaagggcacaagcagtaaatgacgaagtggataaacttctgaagataggttcaataagagaagtccagtatccgtagtgggtggccaatctggttgtcatcaagaagaaaaatggataggatagggtgtttatcgatttcacagatctaaaaaaagcgtgcctaaaggatgctttccgttttcgcatattaaccgaccaaggtatttattattataaggtaacgcctttcggcttaaagaatgcagaagtaacttatcaacgcttggtgaaaaaatgttccacacacacctcaaaaagacaatggaggtgtacatgacataatgttagtcaaatcattaaaagtttatttgggatgagaagtatgaagtagcatttgggcagctaaaagctaaaagcatacctaagcacctcgccagttttatcaaaactcaaaagttgaattcaaaagcatatttgggtagaactctgcgagtacgatattgaattcaaaagttgggtgaatatgaaggttcaagtcttagctgatttcttgacagagttaccaatgcatagctcgagcgaatgatgcgtgttctatttcgccttaggcttttacctgaaagactacatgactactgtaagtgcataacaaatcctaactacggaggtgggattcgatccctgattaataaggatagtacatccacatttaaccaccagactaagctaattcatttgtaacgaataaaaaattgattgtatatatattcttaaacactatgggttaaattttaacttcagttagaccatccgttaaagatatctgcttttgtcaaaatttaaagaaacgaaagtttttaaaggacataaaaattaactcaagtattgttcggaaaactttaataatgcagatattagacggataaattaaaaatagatgacgattattccgtgttttttctcccagaaaatataatacatttaaacgtgtttaaacgtgttagtattagtgtcatttaagtgtgttttacccgttttatattgttctagcatactgtggattctagcttttggcatataaaattttggaactccctatccttcaagtctcatattagtatcaaattttcaatgacataattttcttataacttggaacctaaatttgggatatcacacaatatacatactgtctttttgtttttttttgtttttctttttgctttcgaaaaaccacacaatatatttaaacgactgtaacattttatataaatataaacacatataaacaattaaatagtcatttctacgttaaggtatttcatctttttacagccgtcgtctacatatggttgtggtatagagcggttgagtccatttcttgttgtttgatagctaaagaaagctattgtctactgtcttgtgtgcttgtcgttaattcgtctgcaacttcatgctaaattaggtacaacttatacaatattttaattatttaatattatataccacgtgttgagtaaaatattttctggtcgaaaattcgagaaatcttatctggtcccaatccaatttataccgacgtgaaatctcaacacgtacataacattttgataacaagatcactggtatatcatcataagaagatccttcacaataaatatttttggcgaaaaagaattttttttttcctatgataaagaactcgttacaccaaacataaaaagccaaaaccaaaagaatgttggtactcaacatacaaatataccgaactcacatttttggtgtgtagataaataagtctaacaacctccattaggtattccgatattttgcttaaaaattattagaagaagacccacgctatgcatgctaataatttaaatatactttcgcgtaaaaaacactaaattaatgtaacttaaaaacttattagaacatgtattttaaaataaaatgatgtaaaagagataatagtaagaaattttgttaactgaaaaatcctaatttgtttgatttttttatttatatatttagtagttaagttaaaatttattggtttgttattattttttggtaaactgataatatatgccattacaattttaaaatatatttttggcaaccaaaaagtattagtatttatttgcattcatatatactaaataaaacagaaacatatatattttactcccatcccacataaactaatttaggtaaattaatttttaaaatttataaattttcgaagtaggtatttaaaatgtagcaagttaaacatcattaggagatcatttatataatttatgatccattaatcacaaaatcattgattaatattaggatggtaaatatttattttaaagtgaaaagaaaacaaataagacaatattacgcatatcaaaaaaaaaaattattagatcatattatgtatgtgaactgtcgactttaaaatgtcttttacgatcattttaaagttgacagttaacatacataatatgatctagtatttaatatatatatatataatatttattaaaaattgctactataaacattactaaaatactaggtaatcacccacgttaccgtggagattttgtttggtttcatgttttgtttgatttaatatcatgttttaataaatataatgtttagcagcaaaactaaacaagttaagcaaaacgacaaatttggagtcagactataccttcagtgtcgaccaacactaggaaagtgtcgatcaacaccattcacaacccagcaagtcttgacggcttaaagattagaacatcctagaattgctcgagaaggctttcctatttacattattagtccttgtatgttttaagacataaatattctttcaggtcattgtttagacctattaagttatcttctcttttaacttttgctctgcaactctttgagatttttagagacttcttcagagatttcaaaacctttagagagaaaaatcttttttaaactctattctcttttttatttctttatgcaatattattcaaacatgttttcagttactctgatctgtctgagtaatctccttgttcggtatagatgaattaataaatcaataacctgttatgatttttttagagttcttcatctttgattgttcttattgttagttctagaatagctaactagaacttgatcttacgttaataggtacgatccgagaggacgcttattactagaactatcttaggtgggcataagtaactagatacggatatgtctggtctatataattatgtgagcatatcaaaccagagtatattgcttgcttagttgtaggggtttgcaacgagagtttgattcaatactattacgcataatagtcaacgcagcgagagttggttggttatagcatagtgatttgagttttagaacggttcagtaataatcctaattaactgttagatctactattaatctatttcccaagaatatccctaaacccgactctttcatccatcagacaacaatttaaattactttttctgttttttcatatctagaagacaacatcaaaactttttgatgcaataaaatattagaaataaattcaaacaagaataaatgcgaatttaagccaaaaaaaaaatactaggattatatttcaccaaagtttcttacatataatatatacaattataaatatcaaataaatatataattgatatattcatacaaataattaatttatgatattgatcattgatgggattaaacgattaataggattttcaaaaaatatattatcgtattatattattgacttgtgttatgttttacgcaagtttcaacttgaaacgatataatttattattttgtagaggtattactgtatacaacttataaagttgattttaggaatatatatgtatatttatttatttaattgaggttatagttgtaacttagccaacacaggtttctcctatgttcttctataaatacttgtagatcactaacctaactaatcattcaaacttcaactctcgctaatacttgaaagctcaaaatatcctcttgtattctgatcaaatttctggtaattttctctcttttaatctctaactcattttgattcttatatatatgttcatatttctgatttttagccaattgtcggtattttctatttattatcataattttctttttcttcgtgaattttttacaagtaaatgtatattttttctctgttctgaatattatataagtgactaatcaaaaaatttagaaaagattgtttcgaaatatcttatttgggaagctcggtgtatccaaaactctgtcctaaatctctctacatttttttgatttttttttcgttttagtaatatcatcgatggtgctatccaaagagaatatgttgaaatactcggcacaccttcgtgcttacaattccgcatgtggagaccatccagaactcaaatcctttgattctgagcttcagcagaaaacctcaaatctgataaactcgttcacctctgatgccaaaactgggttggtgccactgccccaacacgcagcatacaaggagttcaccaagcacctagctgaagtaaaccaacaggtgtcagactacatcattggatatggagaagtagtgtgggagaactcaactctgagatctttggtcgaaacctattttgaaagtgccaagaagactttggacattgccgagaatgtaacagaatacgtcgatgaagcaaaaaggggcgaacgttacattgtagcggccgtggcacagtttgaaaaagacaaagaaaatgatgttggcaaaaaaacgaagaggtatgaaaataccttgagggagctgaagaagtttgaagccatgggaaatccttttgatggcgataagttcacgactctgttcaagttgatgcacaaggagcaagaatcccttctggaaagagtgagggagactaaggaaaagcttgatgaggaacttaaaaatattgagatggaaataagtagtcgaaagaaatggagtataatttcgaatgtgcttttcatcggtgcgtttgttgctgttgccgtcggatccatggttctagtatgtacaggcgtgggtgcgggcgtgggcgttgcagggcttctatcattaccactgattgcgataggatgggtaggcgtccacactattttagagaacaagattcaagctcgagagaaacaggaagaagctctgaagaaagcgcaccgtatagcaaacgaaatggataagggtatggaaaccgacaaagtagatatgaattccatatctggaaaagtccacgcgctaaaaagcaagatcacgtctatgttgaatgctgtgaaggatgctactgaggatggagcaaatgaggtggacacgaaacaagtaatggaaacccttacgggggacgtggtggaattaacagaggatatcaaagcagttggtgatgatgtggcaaaatatagcaaaatgatcgaagagacgagttatcacgttttgcaaaagatcactggttctggaaaataaactttatcgatgtttgatggaatcgaagcaccaaggcgcagaacatcaaacagacgcagagtccaaaaccggagacaattttgtctcatggttttcttggtgtccgtttaattatttcagtttttcttttaagtgtttgagttttcaaaaataagagacgacggtcttcctctcgtcgaggaagctatcttctccactttccattatttcctcgtttgtaggagtcactgactccacttttttcttcttgtaatgttttttttctcttcttgtaatgtttctcactttctctataaaaaaaaaatggcattcttaattgccaaaaaaaattcttgttcttattatctttcagttttcgtacttactctgattcctcaagctttgacaaaatcaaatctatcatttggtatcagagcaaatagtgtttggtccgaaattttgtttcgttttacccattccacccaaaagaaaatcaaagaaatgtgttgccaccacccaccactcgaaacaatggctaacacaaaatataaacttgacgagctcgaaaagggcatgggtttggtcatggacgttttccacaaaatgcaaaccaggttgggtaacaaactttgttgtaacatccccaattccataattagtaattgggccattttgtttagttaaaagaaaacaaccccaataagcccaatatcttattccttaaacgacataggtcatggtcgtttgtgtgtagagtatatatatacatgtatatactttctttcttctttacgagccgtcatagagaaacacaaacctaattcgtgtatgaacagaccagcacattgatctttgagtcttgaaaagctatattagtgttcttgatgttgatgtcgttcgctcatacgaaggaagagatggcggctgcgaagttgttgttctgttaagttgtcattacggttatgtgttgcgttgtcgtcggactcgtgaggaggagaaacaagagtcttgaagccaccttggatgtgttgtggtggtgtgtgttattcggaaagagagagaaagggagcagaagagagagagaagtgaggagaggatagagaacaagctgttgcgtaggtggtgaaaacagctagtgggcttgattggtcatggcgtagctgtgacaggcttctatgttggtgaagagcaaagttggagcagatcagagatggagaagagaagaataagaaagatgaaaaaggaaataagaatagtgtggaggaggcaactttggaggctcgtacaagtaatatctgacatagatatggaattataaaggtactgaattgttcattagcaaaccaagagtctacagcaactgaaagatcttaaatcggatttaaatggaaagagttatggacattgcttcctgtgcacgaaacaactgaaactgttcaaacccagaaaccctaaaaggcagtccgagatggcttgttgacggtaacgtttggaggtcgtactgatgtccaatctggctgaaaattagttgagctgttcgtgggaatacaggctacatattcaatggtgggattctgttataaacagttagtttctgatttatttttgcgtttctaaaaatgtttgatatagagcaaattatgataagatctattgtttggttggtaaatgaacttggatgagctgaaggtgagggtgataatcacggaaacacaatgattattttctaagcatgttcttcatgaattgcttgtataggtttggaaactatgtacttgtttgtatgttctttattgatagtgtgtgacattgaacgatgatatgatgtaatataggaagactttatatataacatgatgatatactttgagttaatgtgttggggctacggacctgagattggttttgcgtatcgtgatgggtgaacctgagattggtttcgtacctggatgtgattgtacgaacctgagattttttttgtgcatggtaatgggcgagcgtgagattggtattgtgtctggtgattggacgagcttgagattggtttcatgccacactacgccgatgaaatttctatttagcgttattgttgaatgaatttatgattgaatatttttaaaaacttatgttgttatacgtatgtttgagaacgtggagtctccttccatgctatgcattgattgttgagtgtgattagaatttcgccattgtgttcgctctttttatcttttcccttagcttgataagctttatgagatgtggttttcttagtcgattttggttttgatctcttttgccttttctaccttgatgagcaaaaaggaagttttacattcttcttcttatttcgtactcgtccttatataaggatccaattggggtttgcaatattcagtttttgatcaataaagaataagggttttaccttttatcaaagtctacgaacttcctttgctttctttgcaagaaaccaagagttcatagcaacaagtctttctcgtaaaccattgatctacagaaagttcttgttctctgcattaaaaaatatgtgttttggcgggaccatttgaataacatgttgtttttcactgtaagacgggatgggtgttacatttgtagcatggaagaggcaaacgccaaaaaattctgaagacttgaggaatccaacaatcaatagaaaactctatacccggctaacggacatgatgacgcacattcggaatggcgcgcttactgcttacaattggggcggagagaggatgcagcaccgtcgttcatcacaccagctcacaactaccaacatatcaagctcgattaccctcggtttgatggcggtgatcccacggagtggttgagaaaacttaaactaatatatcacctttcattagacatcaagggaacaacttgtgagcttttgcatcgtatcatctcacagtggaaggaaacccttggtggaaggggaaacgtttatgcacgaattgtgggtacgatttgggccatcagaaggtgagatttttcacgaagcgttgtctaaattcgtcaaacagggtgctcacgattattcgtattaacgcaaaatctaaccccagatatgtaaaacataagccaaggagtttgagagataaatgaacatggttgagatagacttgttgtgtctatgaatcagatagtcctttatttttctctttcttttatccaagcttcttaatatatagggttgtcgcttcttttaagtctgcctgccacatgttactgtttcgttgaaatcattggagccataccatttctctgtataatcctcttgacggtatctcgttcaatataaattatggcttaatcaatcagagtttgtaacaccttgaataagtgagaagtgatgacaataagcttgtattttaggaacaatcagaattattctctctcttttttttttttttgctaacaacaaatttattctctgttttgcaaatccatttttaaaaagttcttgcttcaaaaaaaagaagataaatttactttttttttttttttgatataccctattggctaatctggtcagcttcggtagaaacgcaccgaagtactacagagtggacttctcccgattcgggtagaattggactaccacactctctggtccgagtttggaatgccttccgactaatgccaagggataatcagaccgcctgcctttctgactaccaggtaaaccaagtacgtcaatgcccaactgacagacttttgattacaaaccttgtttggcttgatcaaatatttcatcatactacactagttgagaattcttttgagaatttgttgttctcagagcgggagtatacttagtttgagaattctttttccgatagcaacaattagaaaacttgttctgttgtttgtaccgattaatattcaaagattattacaattttaaaaacttaatagatattgcataattatatatagacatgttttctatatacatctgtctagtgaatcattattatttttatgtgtaatttttttatccataacaagtttttgacattgttgcctaggaccatttagcaagcgcccttaggttttagatttaaatttcgctctctagcctccaaacacatagcttatgccctagacttctatcaacattggtcacatagattatgttcaattgttaaatctgtagtgagctatgacttcttctcctattcctccccaaacatgagcgaccataatgaagtatgtaagttttggtgcatatggaaaatccacgatcgattcccattgctttgcaaacaagtttgaaagttgtgaaaatctttattggtaatttggcgagtattatcgccaatagatcctctggtaaggaatctaagattcctatctctctgtttcaataagattaattttttggatgttgtaaattttgtactcttattagacttgaaaatttaatattttggagaaaaatcttttggcagcaagtaatgaagattacagtcgaattcacttacacaaacaatttaaattcaaatttataattgatgattatagtattcgtcttttttagtaatctataagactatcaatataaaaagtttgtatattcagaagtttaaaagttattaaatattttggctactgttattataaatatgttgacagtgctataagacataacatcgtctgataaataaaagctattgatgaattctaataataatctcttctaaacaataatgaaaaacatattttaatacattatatataaatttacataattataatttatgatatttaattagattatgtatctacatagaaatttaaaaacaaattattattttatcttcttcatctcttttagacacttcaacatgctttgtttgagatctccaagatctttatctttaagaacctttaataaaagtatcttcccatcgaaggcttccaccttaaaaaacaccactaaaaccaatagaagctcgatcgacccaaccatccttggaacttcacttgctaagaatttaaaccaaattaaatatcgtatgaaaatggtagaaaatgtacaatttcgtcatgtttttttgttgtggtggcgtaattctttgagtctccttctttaaggtgttcagtttgagccatgtttctatgtttaaagttcagatttaattgttaaggtagcataataaattagttgttgtttcacagaaaaaataataaattagttgtttagcctactaaaagaaaaaggaaaaaactggaaaacattccagagaaaaagctaccataattctttcatggtcgttaagtagcggatttgaatctacaaacagtataaatatggagtattttaaactaaataaatgaaatatttttcttccaaccagaaaaattataaattaaatgttcaaataaaagatagataagatatttttggaaattaaatgttcaaataaaagatagataagatattttgttcaaataaaaaataaataagatattttttggaaattaaatgttcaaataaaagatagataagatatttttttggaatcatggaatcactcactctcacagaatcacatggcttcctaataatttattcgatttagaaatcatattaattaaactataatttaataatagttagttgatcacatgttttctctaatattttattagattacgaatcaaattaaaaaaaattattatataaagtatagttttcaaagttagcaattcacctgactgtgacaagtgtcaaatctattgatctaagattttgccacatgttcaaaaaacttttcctttttaataatttaaaaaaaaataaaaatataattataagaaaaatatatatctagacagattttaaaatgtaaaaaaacaaagctattaggaaaaccataagagttttgcccagtaggaaacgaaaattttgtttttaacaattaaaagttgaaaatgataattataactgaattataaatataaacagttctacaaataaaaataaaatattataagaaaactatacgtatataaaaaaattatatgtatatttttcataaaacaaatagaaattataatttaataagtgtacaagaaataaagatttaaaatagaaaaaagattaagaaaattatacaatcacttattaatcatatacgaaaaaggattgtaaatactcacttcaatataaacatatagattacctcataatttctcgccaaacaaattaatttctttaagaacaccatcattgctttaacttcattttatttgtataatgtttccttttgttggatcacaaattattttttggatagtattagtaactaacctttactcaaaaataattataaaaatatactcatgagtcaaaaaaatttgaaatgtaagaattcaaaatagccctcatacaaaagacaaacatacaacgagtattgtaatttagagaaaataaatgaagtaaataataataacccaaaatctaaaaaaaaaaatcattattgaaaatttgacaacgaaagagacaaccaaaaatatcatttagtaaaatcatatcatactaaaagaaatatgagtagcatgtgattgttatggaggtgataatggtgatggtggatggttacaaaggtggtgatatggtgatttaaaaaagaaatgaatcatataaaaattacattcttttatcgtatgttggaaacatatcatgccgtttatatttttttagaaaaataatttgaatcaaaatggttttctaaaatagcatgtgatattcagattcaaggaatatatagtgatcgaggcaaattaagaattatgaacggcgatggacacatactagagttgttgtcggcgagactcggctggatgttggaggaaataaagaagggaaaaaaataagagcaattagaaaaagaaaagaaaaagctttgattatttgttatttatttttaatattaattaagatataatttgatcagatacacatattacgtaaatataaaaatctagcaatttttattaagatgaagtgtataaaataaaaattcagtatattatgatgaaatagatagttaaattgtattgcaaaatgaaatgaactagattttaacccgcggtataccgcggcacgatttattttttaaaggtaacatatattaaaacttacaaattttatttttaaaaaatatttatattttacagtttataattgttaataagtaacgctataccatgaaaccatgagacaattgttaaaaaaactgaagttttaacccttattaaaacaacagattaataatattttaaaattttataaatattgattcaaatacatccaccatataaccctattccaaaataaaacccgttatataatttctttacccgtcccgtgaattttttttgaagtagtaatttttaaaatttaagaattatttattatctataaaagtttttcaaattgtatcattctctaatacatttatattttatagtttaattttatatatggtaacattatacataccacataacatttttggttttatataacctttctaaattaggatgatttgatatgtttaatattagtggtcttaaaaaataataattaacccgtattgaaacggtggattaattatattttacttttttattaatgttgattcaaaaacccgtccctccaaatccgtcttgccaaaaagccatttattttattaatattaattttatttatgatatgactctgaattataatctaaacattttagctaataacataggagtgcaccatatttatttaatagaggaatgtaccatatgacccgaatatattagttaaatattagttagcttaaattagttaaagaatgcaaattgaaaaggtatattacactttattcgaatctagtatcaaaatttatataacacacagatttgataattttttaattgttgaatactttttttttgtgctaatttttatgtgattaagatttaattgatttcgtatataaaatattaaattgttttacaaacttatttgtttataatttggtaacagatagatatttaaatatttggtatattttgcttcaacttaggaaatctttgatgacccgtctttagatccaataagccatataattaagaaatgaatattgtcgttaaatgattttggtaaccttaatgacgtcattaaaagatttttttctgattaaatttttctattggcattgtcatgtaattaattacgttataaatgtcatttatacctacaatatacctacaatagattaatgtattaatgacgtcattaaaagattttttcctattaaatttttctattggcattgtcatgtaattaattacgttataaatgtcatttatacctacaatatacctacaatagattaatgtattaatgacgtcattaattaatgtatttttctattgtcataaattaatgtatttttttattggcatttgtcatgtaattaattacaaaaatattaccatcaatatttttaagcgaaaattacgataaaaagacacaactgaaaaaagctaaccgccaatatttcaaaggaaggttataatgaaaagacacacaaaaaaaaattgtcaatattttaacggaaatttccgattaaaaaaaacgaaaaaaataaccgctaacaaaaaatatagccgttaatattttagcaaaaagttgcgctaaaaggacataactaaaacaataaccgtcaatattttaactgaaaattttgttttaaagacacaaccgagaaaataattatctatattttaacagaaaaatgcgataaaaagacacaaacaaaaaagtaaacgttaatattttaacagaaagttacgattaatagacacaatcgaaaaagtaaccgtcaaggaaaaaaagtaatcgttattattttaacgaagagttgctgtcaaaaaaacaccactgaaaaaataactgtcaatattttaacgaaaaattgagttaaaaagacataatctttcagaagtgaaaaaggcattgattaagatttctatcactattaaattttatcgatttatgtcattatttacattatcctcaaatactaacatgaaggcaaaaaaatacagactatatgcaacgtacaactttgattttggggatatatagacatttattgaggtcatagttgtaactagccaacacggtttctccaatattttcctataaatacttgtagatcactaacctaaccaatcattcaaacttcaactctagctaatccttgaaactcgatataacctcttgtattctgatcaatattttggtaactttttctctcttaaactcttagctcatttttattcatgtatatatattatatatatatatattcgtatttctgagaagtgataagaatatcaatttttagccaattttttatatgtaaatatatatgtttaatatttttttgtgtgttgaagctattttctatttattatcagaatttcctttttattcatgagtttttagatgtaactgtatctttttctctgtactgtgctgaatattatataagtggctaatcaaaaaaaaaaaaaaaagttgtttttaaaatatcttatttaggaagctcgctgtatgcaaaactctgtcctaaatctcttttacattttcttgatatttttcctttcagtaatatactcaatggcattctccaaagataagacgtcgaggtactcagaacacgtggatgcttacagagccgcctgtggacaccacccagacctcaaatcctttgattctaagattcagcagcgaacctccaatctgatagactcgctcaccgttgaagccaagacagggtcggtgtccccacacgcggtacacaaggaggtcattgatattgttttctaatctcaatttgaaacagagtatgcaagaaacagagactgaaaacttcttacttcaattgacttcagtgatagtctttaaatagaccttacaagataatcaaactgcagctcctaaacttaagctactagctaaacgcccgagtctttctccgacaaaggagctgacttattcaaaaacgaaaacagaacaaaacacagcaacttgaaaacgaaagatgcgtaactaaacccgtaggcccaaactccacaggcccaaactcattggacctttattcttcattccctcccttaaactgaaactccttctcttcagtttactcttctctaatccttactcccattctttcacgaagatcctcgaacacgtctcgtttcacagccttggtcatgatgtctgcaatttggtctgcagtagcacagtaatcaagcctgatagttccttctttcaccagttctctaagaaaatgatacctcacatgaatgtgtttgctccttccgtgaagcacaggatttcttgacaactttatagtggaactgttgtcacagaacacaagtgtaccttcttcttgtctgcaaccaatctcttctaacacatttctgagccatatcgcttcacaagcaccaaaagcagccgacacgaactcagcttctgttgttgataaagtcacgatgggctgtttctttgatgcccaagcaattgctcctcctcctaacatgaacacaaacccggacgtactcttcctgtcatcaacatcaccagcgtaatcactgtcaacaaacccgaccagctctgcaactctcccacgtttatactgaattccgtaaccttgagttcccttcacatatctcaagattctcttcaccgcaagcatgtgcagctcagttggactttccatgtacctactgactagatttacagaataaatcaagtctggtcgtgtagtggttaggtacctcaagctcccaatgagttgtttatacttggttgaatctactagttcaccagctccttccttggttaatttctgtcctggcacaattggattcttgaccgggttgcaatcttccattccatacgttttgagaatctctgcagcatatttcctttggttaatgaaaatacctgtttcatcttgaataacttccactcccaagaaatatttcattcttcccaagtcagtcattgagaattcctccatcatcgatgtcttgaacttctcaatcatatccattgaacttcctgtgtaaatgagatcatccacataaacactgacaaccaaaacatcacttctctcctgcttcacgaacagagtatgctcacagtagcacttttcaaacccttccttgataaagtaaccctctatgcggctataccatgctctcggggcctgttttagtccatatagggctttcttaagcttgtataccttgttggattcttcttcaactttgaatccctgaggttgctcaacgaaaacgtcctccttcaagtctccatgaaggaaggcactctttacatcaagttgaaagactctccaatctctctctgctgctaaggcgagtattaaccggattgtgtcctacttagccactggcgcaaatacctcatgaaagtcgactccgtatctctgatggtacccttttgcgaccagtcttgccttaaatttgtcgatttctcctttctcattgaacttggttttgaagatccacttcaacccaatcacttttccttcttccggcagctcaaccagttcccatgtgttattttcttttattgaggcgatctcagcttccatagcctttctccatacctccatctgaaccgcttcttcaaagtttcctggatcttctggtccaacaaacatcgcaaacaactcatcttcttcttctgctattagaacctttgcgtttccgatgacataatctttcatccaaataggtggttgtctctgtctagcagctcctgtttcaacagacggcaaattttgattttgatgagcttcttcttctactacttcttcttctgattccgcttgttcttgttgctcaggttgatctgcttctgtaccctcttcccctgcaggttctttaacagaatcttcccaaacaagctcttgttccagcaatttatcttcccattcccagcctctggtttcatcaaagtgaacatctctgctaatcaagatttttcctgtagcaggatcatataaacgatacgccttagattccttgcttactccaaacattacacacttgatactcttctcatcaagcttgattcttctctggtacggtaccaaagcatatgctaagcaaccaaaaattctcaagtgctctaccgatggcttccaattactccacttctcttctggtgttatctcctttagagcctttgacggacttcgattcagtatgtacactgcgtactgaaccgcttcaggccagaactttcttggtacaaacatctccatcagcatacatcgcgtcatgttcatcacactccgattctttctctctgcgacgccgttctgttgtggcgtgtaagctgctgtgagctgtctcttgattccaaattctttgcagtactcctcaaactcctttgagttatactctcctcctctatctgatctcaaacagaccaccttttgaccagattctctttcagtttcagctttaaattccttgaaggcctgaaatgcttccgacttctcggacaacagataggtccaacactttctactgaaatcatcaataaagttaaggatataccttttcccgctggccgatacagggtttattggtccacatatgtctgtgtgaacaagctgcaggacctgagtcgatttccacatgctctctttcggaatagactctctgatctgttttccctttagacaaatttcgcatgtcacatctttgtctccatgagtgagctttggtaaaccctttaccatttccttttctgcaagtgatcttaagccatggtgattaagatgcccgaatctcttgtgccataaattgtcttgagcttcgatcacttgaagacacctttttccttcagtctctctagcctctctaacagttgcaacaatagcaaacatgcgattctttgtcatggttgagtgcatcaccattctctgttccaacttatgccacacttcacacacatcgtcctcaattataaatctcaaccccttttgttgcagctgcccaacactaaggagattgttcttcagccccggaacaaagtacacgtccgagattacttggtttcttccgtcaacttcaagtctcagctttcctcttccttccacagtcattttccggtcatctcccagccttacattctgcttgaagtcatggtccaactcgatgaaccattctttgacaccacacatgtgattgctgcatccggaatcgagaaaccaaacatgtttctcttcttcaccaatatgttctacatgcgccatgagaagcaaatcttcctccatctctatgtaatttgcttctttctcccagcttggacattctgccttgaagtgtcccattttgtgacatttgaaacactccaccgtgtctctattcacatggccacgtcctcttccttgataacctcctcttcctcttcctcggtttggacttcctcctctacctcttccaccatccggtctccattgtgtctcagcttttaagactttatcttctacatcatgtcttcttaaattctgctcatgaaccatcaacgagctttgcagaccatctactgtcatcatcttgatgtcatttgattcttctatggcacatacaacgtatgtgaatttctccaccagagttcgcaagatcttctctaccaccttagaatctggcatgtcttcactcagatttctcatatcattggtgacttccatcactctagagaaatacccggtgattgtttctcccagcttcatctcaagaatctcaaagctcctgcgtaatctctgcagttgtgcgctttgaactcgatcgtttccttggtatttcctcttcatggactcccacaaatccttagacgtttccttctgcaagattgtcttgaggattgttttatctattgacgcaaatagatagttcttcactttgtgatctttcaccgtcttctccgccagctccgtcctctgcggtccggtgagaatcacgtttctctccgtccttgggattcccgtctcgatgatatcccaccactcctttgatcttatcagattctccatgagcatagcccaatgctcatagtcaccgtcgaattttggtatgatcacagactctttttcactcatgatgtttttctctctcgtaccaagctcgtgacaagctctgataccacttattgttttctaatctcaatttgaaacagagtatgcaagaaacagagactgaaaacttcttacttcaattgacttcagtgatagtctttaaatagaccttacaagataatcaaactgcagctcctaaacttaagctactagctaaacgcccgagtctttctccgacaaaggagctgacttattcaaaaacgaaaacagaacaaaacacagcaacttgaaaacgaaagatgcgtaactaaacccgtaggcccaaactccacaggcccaaactcattggacctttattcttcaattgagcacctagttgaagtaagcaaagcggtagcagacgtcattactgaatgcggagaagaagtgtgggagaacggaactctacaatctctggtcaaggactattttaacagtaccatggagactttgaagattttcgagactgtaacgcaatgcgtccatgaagcaaaaaggggccaacgttacattaaagcggccgtggcacagtttaaaaaagactcggaagaaaaggatgttggtgtcaaaaagaagaggtatgggaaaaccttggaggagctgatgaagtttaaagccatgggaaatccttttgatgacggcctgctcaagactcagttcgagttgatgaacaaacagcaggaatctctttttgatagagtgactgagactaaagaaaggattgctaaggaaattgaagaggttcagaaaagaattagtaatgtaaacacagcgactatagtttcgcacgtggtttttggcgctgcggctttcggttacgccgccggatgtatagctctaatgtgtacaggcgtgggtgcccctctgggcgctggaatggttacattattaccagtgattgtggtgcaatgggtgggtgtcaattatgtcttgaataacagtttagaagctcttcagaaacagcttaaagctctgaacaaggtgaaacctataccagaaaggataactgagggtatggaagccgacaaagaaggtatgaagtccgtacctgaacaagtcgacgagctaaaagatcagatctcgtctctgttgcaaactgtggatgatgctattgggagtgaaggagatgaggtggacgtgaaactagacatggaaagcctcgaggatgatgtgaagacattaacaacgaaaatcacggaggtttgtgaaactgtggctaaatatagcaaaattatcaaagaggcgagacttcacgttttggagaagatcactggtactggataataaacttcatcgatgtttgatggaaccgaagcaccacggcgcagaacatcaaacagaagcagagtaccaaaccggaaaatacagtctcatacttttaagtttttctgtttcaaaataagagatgactggctcttcctcctcttgttgaggaaaccatcttctccacttttttgcttcttgtaatgtttctctatttaatatgtattctcaattgccaaacaaaatttcttgttcttattatctttcagttttcatacttgctctgtttcctcaggctttgaaaaaaaccaaagctattatttggtggtatcagagcattagtgcttggttcaaaatttcgtttcgctctctatccattaaaccacactattccacccaaaagaaaatcaaagaaatcaattgtgttgccactgactccaccagtcgagtcaatggctaactctataaaccggctaaaggagatgatgacacacattcgactaaaggagatcattaggcaattattacatatttgcctagctaggttacttggtcgctactctgttctaatcatatatatatagtatgtaatctcttgcttgtgaagaagccatcatgtttgatgaaaagaccaccgaccaaactgctctccaaatttcagcagtcacatcgaacccgatgatcgagatccagaggcggacaatctcaccttacgatctactgaatcgttctacaacgtgcgtgggaattgtgcttctggtccaattgttcatgacaatttttgatgtagagaatcgtgtttatgataattatatacgttaagtagaagcattttgagtatttgactggtttgataaaacgcatttatgtagttttggttaaagaacaaattgaacttcatgtaaataaaatattctattaatcttgcttattcctatgcatatctgagtaaaaaaaactaaacaaagttgatcttctcattttatggatatagaaaatatgatttgattttatttagtgtgttcatgccatgaaatacaaaaaatattaaatagctatatgttgatcatgtttaatcatgcaattaataatgttaatcatgaataatcatgtagctatttatgatttaacatatattgacaaatagatatgcaaataagaaggaaaaatatattgagtcatgtgtttatggatatgtgttcattgaaccattatcaaatctagtgttagatttgtttcgatttgcgaaataatatagagatatttggaaaatctgtgtattcttgttagttcgatgtatatcaattagatgatataatgtgaaatttactccgcgctacaccgttagttgatttttttgtaactaaaattcgaattttaagttatagttgttttgtaattattgtttcttttgtttagtgtttaagattatataattatgttaaaattgttaattctaagatttcactcgtagattatcgtctcatataaatatcaacctaaacacgttcttattccaaaaaattaaatattatttttgttatttttaaatattcttttgtaatatgttaataaatcgagggattgacctgtggtagatcttggattaatatatttaaaaataatttatcatttataaatttatgatattgtagtatataaaaccaatttttggtgtataccttacaataattgtataaagtatattttaaaattcaaaatttgtataaattgatattgcaacctcatgaaattgtagtgatttacctgtagggtaccacgggataaattttattttatttttttataaacttattaatttgttgattatagttaaaaataaaaaataaattcagttatatttgttttgtttatggtttcagattgtataactatatttttgaattttaattccatgattttatctgtggtataatattgaccaacaccccgctagtttcttgtaatctagtgttgacactaaaagaaaaatcgataagaatacgtataaatgaatagtaaaattaggagataaacatcattagaacatgaagtaatttacttatgaatctctatctattttttaaaagaatcaatattctatattaatggtgagacaatgtgaatgtatgcataacatttataaaagatagattgtacgcaaaattagattttaatttggattcaatcttttaatatattttttaattttagctttattgaaaaaaactaatctgaatttttaaatttaggatgacaaaaaaaaaattttaaactctaaaaatttactatgatctcaacgattttggtatttttttaaattaaacttatccttatgcattatcgcaaatatggtagtcattattgttcgaatacaattaatcatctgtcaaaaaatcatattactaattgttccaaaaaaaaaagtcatataaatttcaaagaaaaaaaaataatataggtgtgaatcaatattttctcatttttaatatttgcattaaaaattaaaaaatttggtatttaaactttgttttactgtttaaaaaaaagaaataatcgaatctagaagaatgaatattccaaaagcttgtaactattataatacgtttaaaaatatatttccttttatatgattcaaatttagcttagtgatatatttttaaaataatgaaaattacatgtttaaaaaaatacttttaaagtttatatcatttaaattttaaatactttaatctatactgaaactattttgtagataattacaaatctaaattccaaaaattctcttttgaatatgctaaatcataatttaaaatcattttttatgtgtactaatgagaaacaattaacatagttttgttaaagaaattgtataaaatctaaactaaatgataatttgttattaaattagattgaagtttccaaattatctaataacatattaccaaaataaataagtttacatatatacaattcgaattaaaatagcttgatatgttatggaaacgtttttaaatgatttccgaaaatattgggtagttattaatttattgatttaattcaattttctttaaaaagaaaatctaagatatttatttagttgtagtagttgttaatttactaaattacccatgcaaaaattcatttattatttttaaactatccttacaatgttgtaattcacacaatgcttcccaattaatagtatagatttatgtctgccaaccacatgttaatttactgtttcgttgaaatcattggattacccataaggccataacattagagctagatcaggctacgtagttagaaaaaagactttatactcaatgagccataccatttctttgtgtaatcctcttgacggtatgtctttcaataatggtttgatcaatcagagtttgtaataccttgaataagtgagaagatgtaaataaaataattggtgattaaaataagattgtattttaggaacaatcaggtttattctctatttttgctaagaaaaattttattctgttatgttgttcagcgcgggagtatatttgagaattcatttcccaattgcgagaattagaaaacttgtaaccgtgaatattcaaagattattacgattttaaaaacttttattgcaaatttatagacatgttttctatatacatctgtctagcttttctttgcagaataaaaacgaacttatattgcaaaacgcggtaaggaaagcactcaaaagaaaactatgcatcatcctacaacttcttcctacagataaggaacaaagaaagtcttacaaatattagatttaaacactcctcaccgtgctagggaacggatgcatccactgtgggagaacgaacgaggcaaagtttgattctaagatgtatgtcatatctctcgggcaatcaacggaattcagaatgcgacccgcgctgctatgttccacatccttgtggagcacaatgtctccattgtgtaagttaatagataacaagcatttgcgactccaaaggtagactgttttagcatcaaaagggtctgttcccaacggaatataatcgaaaccagtcttaatagaatccaaagatatttcgaatactagtcgccattgccagctctctagcctccatacacataacttgtcctctaaattaccatcaacttttggtatagagaatatgttcatatacatgagacatccttgagaagttgtgcaagttcttctgaatttcggaactttatctaaatcaggaaatggcgtagcgcggcatcgatcagagcggctatcaacaacatagaaatcgatggatacaatgaaatcttgatactcggaaccgtgggcgagccagtaaagacttccgttcaagctaatgggattgttaaactcttgagatatatagctgaaaggaaaagtgtcactgttgagactccacaagcctgtctcagatgaatatatgaggaaagtgaagttaggtttcaacagaacaactttgtaacctaaaacgacgccattctcaactcttgtagctattcccaaaatccagaaacaatccagtttctgtgaaggaagaatctctacgcattgcctagaaacaggattagctacgtagaaagactgacttgacactcgatgaaccaatatcaatccaacatccgtgtaagacacgactctagcttcattatagttctcgaatttgtcggtaaggaaggaagagatgtaataaccgagagaatggttaagattccaattgtcagatccatagtgagacatgatctctgtctcacaacctctacacatgagtgaccatgaagaatgatgagagttttggtgtagagattggaaaaggtcgcggaaacaccgagactcaatgattgatttccataccttgcaaaccagttttggagtggtgatgatgctctttagtggtaatctcgcaagtataatctcccatagatcctctgtgagaaaatccatatccttctttttttgtctctccatgaattggattaggttttttttttttgtgcgtgctcgattagggtttcactcgattttgtagggatgttaaatagggttttccggcccaacccggccctatttatttaaagtccaatcctaagtaaaccctaaccctttttaagcctaaaaaagtttaaaatagggttgagccctatttaagccctttctagatttaaagtgcttttttatagttaaaagagaaaagtttttccaacaaaaacaattataagttaacaacactattgttttattatcaaatggaaacactataacaccacaacatataaaacaattttttctctcattttgcttaaatataaaacattcttacccatattacaaatccaaaagaaactgagcaattctttccaatggctacaaatccatactgcataacaaaatcggtttttgtgtatattgggaacgatacactcttttttatttgctcaaaatgtaattcccacattacacagttaactatttaagagaaaaagtcaataaaagccccaattctttagcttcgctagagaaagaaaaaaagggtaaattaagtgaataactatatttgttaaagttattaaataacttaacactataatatgcataattcaatgactaacacatatggggtatttaattacaactcactccttccggcaatagagtggctccggcgacggtggtggctacggcgacggaggtggttccggcgacagcggttgctctggtgacgatggtagctccggcgacgatagtggctctagtgacgatggaggctccggtgacaatgggaaccccgacgatggggtggtgactccggtgatggcactcgttccggtaagggttgtagctccaccggcggtggtggtggtgatgacggcggcatcggcggtgatgatgacggcggcatcggcggtgatgatgacggcggcgacggtggtagtggtagtgatgacggcggcgacggtgatgacggagatgattgtggtggtaagaaacaggtataatagcaaatattgtagaaaatatactgaatatcatccatttttttattttggttagttagtaaattattaaatttttgttggttattgatacaaattttccaagaaaaaaagttctattaaccacaaaaagctccaaatatcgttgcaaaatcatattatagtttctacttggcatttttaatgaaaaaacccctcaagtatccgcagatctctcctcttactaactagttttgtattttggtaaacatatttttaatgaaacaaaacaaaatacatgatccaattatacttatttagagttaactaggttgatagcatatatatgaaaatgtatttagataaataaaaatctgtttgctattttcttaaatataggtatgtgatttggaatagaacacatataatataagcttatttttattcacacaactcatgattcatgaggcaaagaatacttaagccgaatgaagatcaataatcaatatcttgaacaaaatcctcgatgtatttatgttgtatgtacattaaaaaaggaataacaaaaaacatagaatccatgtaatgagttcacaaaatttaccataccaaaaccccaaaaaatgaataaatcaaagaatttctaactcttgattgtattgaagatactgcctctgtgacttgtgaagatcataaggagcccaaagataatcaattggacaaggcttaccatcatcaagcctaacccatggcttccctttaccactccaatgtatcaaactaaccggaccaggatgcaaagatctacaactactcacaatgttgtctccaccgagaccgtgttggttccattgatgatcaatagcttcaatatcaccaccaaacactagaagaaacggtggtaaagaacccaattcgtagattctcttatcttctttctgaatcttcatccagttttcgatctttctcgtgtaatctccttctctccatcgctctaaatcgataaccatcactcctgtgttgaaataacaaggagtcttggaatcgaagacactcgagagtttttgatcggaccagaaactatctgtgaagtatttggtgaaatttgcgtggcaatactctggtgcaccgattgttcttgacccggataaagaaatcttccatagtttctgaatatcatcgaccacaatcacatccgaatcgagataaatcactcgactaacacacgaagaaagaatctcggataagtagcttcttgcgtaattcaaaggactatcaagagcttgtcttatagaagaagagattagattcttgaccgtggtttcttcaaaggtatagactttgaaactcaaagaaggaaaaacagaggatagggtcttggcgagggaaccctgacttgtacccgaagcaatgaagtggaagaagatgttttcagggcaagaagtgtgtttgaggatggaatgtactgcagataccgtgccacgcaagtaagctggatctagagtcatagctatatgaacagctgatggatcacaagctaacaagagtctgtttttggctaaaacagagcaatcaagaccgttttgatatgctggagcttccattaaatctgaagatgcatcgtcgaatgaatcagggaatagtcgaatcgattcaacggtgaagaaagatgtggagattattgagaagattattattagtctagaggctaatcttgaaccagacatcatcaagagaacttaatggctaagatctcaaagcagagctctttttaaggtttggtgtttctaaagtgtctagaaaaaaagtttctggaatttatggacaagagaaagaaaaagagaaaggtcgacgaagaagaccaagacaaaaaaggaaacgcggttttgtaaagaagagagtcaatttacgctcttttaaaactcgttttcttttattgtcactatcattgttttttcttagatattttattttatttctagaaacccataaaattactttttttttattatctcacagtcaatgtataacaaacattgaatttgagacactgcaaaaaaagtgtattggtgaatattgttcattgtatatggttgtaaagattaaggatacatttatgaccagttacatatgtacaagtacaacatgtagttaataatattgaccgttatattaaaactcttaatggcatatctattcacaagatttattcggaaaaaaagaagatttaatcattcgttttttcatatatctaggaccgatcttgacattaatggggtcataaataaataattacggtttagaggcgtgattatttatgtaaaatttgagtttttatagtttcgagagcaaatgatctatacatattaactcgttaaatttagggggcaagggaaagtttttaatttttaaatgttttttgagaatttcgagttggtcaatttttggagatgaagatactaaataaacgatatataagtataacctatttttgtttacagaaataaatgttaggtttaactaactcatcatagtcaatattgacataaagttttattaaatattaagtatgaaagattaactaataatttaattaaatgaatacgcatgtaaatgtagacatttcacgcatcgacataaatgttacatataaaagaaaaagtatgttaggttgtaggaatccagcaattttagaatatgggttgataatggtccaatgaacacatggttccatgtgcatctctacatattacgatatacaattatatataacctattcactattgactaacgcccaaaagataatgatatatttaaatggtcagctcacattcattggatacaatgctacttctaattaaagaaattatagaaagtgtttgtgtttactctataagcatgtgagtattcctcgtttgaatggattttatttgcaggttttcacccatttctatgactagaatttgtttgtttccctaagtagagtttattaattttctcttgtgatgacaatggtatacaaattgtagcatcattccaaacaaatctaactcttgcaaatttatacaggacgtcaggacccagtattttatgttatgagacagttggaatattcactttttaaaaattgatctctttggattagcaaattttctgaactactattactatttatagcatatacgaattccacatgaacaaatgttctcggcttctaataatatgaatggaatttatatatctatatttttcttccttttctaaacgatacaaatgaagaatataaataaaataatttacaattatgataattttgtggacaatagaaaataacaacgcactaaaagtttactttaaccagaactaatcaacacaattagcgagaactttataatattcatcatttcattaatttgaacacttgatatgagaaagacaatcaaaattttaaatttggaatataattattcgttttttggttttacagaaagcagccactatactttcacctgttttttttttttgattttatgtttaatcatgcaaacctactttcttaaaaattgattttttttttctttctaaaaaggttacattttcttataattgttcattaaaattaaatccacaaataagaaacaaaaatattgtgttatgtttgaagacagctgtatgtgcggctgtgggctggaaatgtcattattcttttgtaatgcgtatatatatctcacactttggaattatgttaacctaattacaaaacttcctaacattaccaattctagcgggttcttatttagaagcaacttaatgaaaagaatcttacggtacatctgttacgagttgctttcaatagtattacacatagtatgcaattttatacagtataatagaggcaattcagctcaatttatataattttcttattaattactataaaggctataaatttatttcaatataaataattggttaaccattgaaattcaactatatcaaaccgacaatcgattattaagatatgaaaatgaatatcttatgtcgtgcgctggagattaagacttctataagaacgaaagttctttttcttttcgtgtgctttatacatttgtgactgaacctattaataataataatcatataaatttaagtgtatttttccaaaaaattaaacaatacagtagagaaatagaaacattcatacgtgattttgtttaactatataactaaaattctattttagaactatgattttttttttttttgttacaattttcttttcctactcattaaatttggattttttttcttctaattaccaccattatgccatttgcacgcactcccatgacccatctataatgtatagagcaatatccaacgtatgaagatatgatgcagtttgtgaatccagatcatgaattacaatgttatttttgttagcaaattaaatattgctaatccaacaagaatcgatctcatgcttgagttttttttttttttttttttctcacaccagtattttacgatatcgacatgaaatgttttcttaaaacatttccaagaaaacatttccaatgtctaactctatattttcctctattttagagttgattctattttacaggaaatatagttgatttttctccattgtatgactctaaaatagagttaactataaatagaagaaaaatgtagaaataactctatatatagagcaaaaaatagcaatctctacactttacctctattttagagtcatacaatggagcaaagtcaagtatatttcctctaaaatagagtcaactaaaaatagaagaaaatatagagttgaaaaaaatagtagatactaataatttttcttggaactgcaaatcatttggatttcaactgaaacttgagggtaaaattgaattgggttatgtatatatcttagaacttctagataaaaacttaaaaagagaagccacaagctttgagatgagatttgggaaaacgtttattttatttctattcaattaacaagctttgttttcttttttacattccattgttatatatatagtgtttaaatcgtagcccgctttaaaaattaaacttcttgacatttatttgattacaaataatttcattagcgatgaaacgacatggtttaagttaaccagaagttgtctgaagactcaccaatgagaaataaatacctgtaggaccttttgacaacaatgaagagtgagtcccacgttccacgagtttgcctttgtctaaaacagcaattgcatcacaattctgaattgtgctcagcctatgtgcgatcaccacactcgtcctccctaccataacacgctcgagagcatcttgcaccacacgttccgactggctgtccaaagcgcttgtcgcttcgtctagaagcaacactgacgggtttttcaaaaccgctctagctatcgcgatcctctgtttttgaccaccagacaactgtactcctctgtctccacagtatgtgtcatacccttccgttaatgacgtgatgaaatcatgagcattcgctgctttcgccgcctcgatgatctctgcttcgtctattttatctgacactcctccatatatgatgttctctcggattgtcccagcaaacaatgttggctcttggctaaccaaagctatgtgtcgacgaagtgatctcagatgatacgaccttatatcgcgaccatcgattttcactataccctttaacgggtcgtagaaccgctctatcaagccaattatagtggatttacctgacccgcttggaccaacaatggctgtggacttcccctcttcgatcttgatggagaagttcttgaatataatcacatccggtctagtcgggtacgagaaatctacgtcaagaaattcaacctgacccgttattctttctgtttcatatccatctggatcctccggatcaatcgacgtgtaccgatccaacacagcgaaaactgaccctaccgcatccgaacctttagctagatccgtggtcatgcttccagcatcggcaatgactcgaccagtactaactaagatcataaacgtctcgaacaaagctttagccgtgatgtacccatcttgtatcagtctaccaccgtaccagaaatctaaagcccacgtacacgacgtgaggctctgcgacatagcaagcccaaagcctgcaaaccacgactggcgaatgctttctctccgcggactttcttgggccttttcgagcattttcatgatacgttcttgtgatgaaaatgcagtgatggttcggacgttggaaactgcctctgccgctagtttgctactttcatcttgagccttgattgcttttttcgacatgctcttgagtagaacccgacgagtgtagaagcaaacaataatcaccggttgcaccgcaatcatcacaagtgctaacctccaagcgatgaccaagcccatcgtgaaagctatggtaacagccgatacggtttgcaccactaatgccattcgatcacccactaacgatctcaccttatcattcaaaaaaaaaaacataagcaaaatcaagaaacactataacattgttcgttaaaaagatttttatgtagacttaccacattagcatcttttgcgagtctagagcaaatggcgccgcttgagttctcatctctatcgaaccaaccgacctcaaacgttaacaccttagaaagcatccgttctcggatacgtttagtcaaatactcacccatgtatgcaaaattgtagtgttgactgatgttgatcaagaaagaaagaacggctaggccaacaaaagataatgcatagatccttgttttctccttgatctcgtcgtggctcgttagaaaataaaccgagaccatcgaccctaaagaatatgcgtaagctggctgtatggctccaaataaagttgcgcttatgcaaccatacaatgcttgtttccattccggtaaattcattgccaatagtctcttaaacgacggtaattgcggcttgttgtcttcggaaagattctttatagtgcttggacctgtaaccgagttagcagagcttgaacggctaagagtcgacactctagaactatttcttatatctttgctcg

SEQ ID NO: 1313 - DNA, 73391 bp, Arabidopsis thaliana
cacgatagtgtggtctacatgttctgagtctggtaagaagtgtaatctgtctgaaaaaaacggagaataagaggaacccatatggttgttgttggttttcttcattactccatttttattagagaatctgctgtacaatcttgcggtctacattcactgtttatgtcgctctgcgtgtatcaaaaactgctcaataagaatctatccaatttgtttgttttttttctcccacatattcttgcttggttccggtaaactctttgtaatgtcgaataatttacgatgtatacgaattacttttggcggcctgaatttgtcttccgagagttggttgcttcgagtgctagctaattgcttttgaatatgagaaatcgaaaacacatacacgttagaaggaggggaaaataagaaaagttaaatttgcaagcttattgtgaaaagataattcagctaaactagttaatgtactgtgtcttgaacccccttacatgagttccaatccacttgaaaatagactcattggagatatgtttacatatcactttttgtatattttgttatagatttcatgaataatatgaccattaattttattttatttagaaatataaattttaaattttaaattgagtttaataatcttttattttttctttagtaaaaacttaataataaataaaactctttgacatacattgtttttagaaacggattttaaattttaaattttatattcttttataacattttctaaatagatatatataaaaaaaattactacatcatgcatttaatcttactttcattggaaaaatcatttttgcaatgttataaaaattgtgatgtcaaacaaaaagcccgacttaatcgggacgaaaaacccaacttcattggaacgactaaaaacgacaacagaacaaccatgttaatggcaaaaacatgacaacaaaaaaactatgttgacggcaagaatataacaacggaaaagacatgttaaccgcaaataaagataagagcccctctctctcaaaaatattagagaaagagagctttcctactatttcttagagtccgaatcgttacaacggttcgagcagacaaaaccgtgtatggactggacccgctttttatttaccattcataaactatagttcctaatagtatagataaaaaaaacagaaaaagacgttgtggaccaattgcacaccgttttttatattgaaatcagtgttcaagaaaacgtcagacgctattcgggaggtgatccaatgtctaccgcctaaaacacctaatcggagtctagacaattttaggcggttaagatgtttataacataaaacattataaatatgttattatagataaacatcattcaaaatatggattaaaaaaatataaatattaaatttataaacaaaaatgtgataaaacgtacatataattcatactaaacaatatttgaacatttaaaaccatgtatatgaagacaaaacttaaaaaaagtaaatttgaataattaaatattggaaacatatattggaagcataattaatcttaagcggtcgaaacggtcatctaggcgtcgcatgagagcctagcccctagtcgaggcctaaacaaccaccaaaatcgctttttagaatactgattgagataaattaaatctgtattgatttattgtctacccctaaaataaagtagactgaatcgcggattgattagtattaaccgcaacatccattcaaaacctcggtcgataattcataacttcaaccgcgttcacgttatcattacccaaattttaaatgatagttttttgttggagtgaaacccctaaatttaaccccaatgtgaaaaatccacttaaatctaaccccaatttgacatttttagccctcgaaagcccaaacaaatcttcgtcttcgtcttcctcctctaacctccactctcacatgacgcaccaccgcatcaccacctacttcaatggcggatccgcctccatcttcctcctcctcctactcatcaccaccacttcctcttcttctccaccaatcccaggcctagacaccttcctaacaaaccaatatcgtctcgacccaaaatcatcaaacgactcattcacatcactctcctcctctctcaaacgatctctctcttcttcatcaatccacttctcatcactctccaaatctctcctctctctctcaatctcaatcccactcaacgtccgtttcatcggagactctttcccttcctccgccgcctccactctctccgaattcatctccgccgccgtaactaacgacaacttccatgtaatctctccatctccagattcatcaacaaatcacaaactcgttatctctcactctctccaccttgacgcttctctatctccccaatctctctccaccagactcgattcaactttgaaaaccctaatttcatcaacaacttcatctctcagatctaatctcctttcgatccagtacaatccaatcgatgagattataaagcaagagtatgagaaagagaagcatggagatggtggtgtttacatttacttgatctctttaggctcacaagctaaaccttatgcttatagttactctcatggtgattcatcagctgggtttacgaaatgtttaggtagtatttggactggtaaagatcgttatctatggattgatctctctgctggtcctgtagattatggtcctgctttatctggtgatggtgttttaccaagaggtgagtttcatcctttagctgctttacatggtcgtcctaaatcagaaaaagctttacttgcggatttggcttcgttggtgtataatgcttatcaggttttgattgttccttctttgagaatccctgtgtactttgaggatacgttggtggttcagtttattcatgtgtatgggtcagaggttaaggattcgagtgggttagatttggagtttgtgaagagaacgtttatggatgaagctgagagtggtgggttgttgttaggtgaacagaagttgagttttaagagttatagtgtgaattatagagaatgttcgatttgttcgtttgcggtatctcgtgggatgaattcgtatacttctaggtttttgtttgataactatactttgattgtgagtgagtatttggattctaagcatatgcatcgggcgttgactgattcggctgaggagttgaggagagttgcggggattgttgaagaagaaggaaatgagtttgctagggttttacctgtttatgtgtttgatttggatatcaatacgcctttgttgcttgatcggtatcatcagtctgttgcttttagagatatggtgattgctgttagaactagaggaactcaaacggttagtgattatacttgcaacgggcgtcatgtgtttgttcatacgagagacttagaacgacctctcgttggttccattctgcagagtatgtggggtgtatcttctactcatttgacatggagcccgagacataacacaactctagttgattatacatggagcattgggcaaacaccgtttggaccattctctgatatctcgtctctatcgtttgttcagaaagatgctgctaagagaaacgtgattttgacatctttgaacacaactatcacaagtgcaatcgatgttatcgattccgcggttgcatatggaggagatgtgatcctacggaaacagaatcgccactctgagttcatgcaaaggtggaatcttatgcagtacaagctggataaaacggtttctgctctatcacacaatgagttcgagatggctttgttctacttaagatcagcttcacacgacttgtactcagtgcattcagtagtgtacctcgcgtcacaacgggtagaagcgagtctcaactgtttcaaagatccaccgttcccatggggaactgtttcagtgtcgggattcgggttaatggctgttggttacgtgttctcgaaaagagatagactctttaggaacaaacgaaaacagttctgaagaattctagcaatgcagggtaatttatagtcattacattggataaaaagactttgatagtttggtttttgaggttaatacaacatgtactactattatgagcttgtttccatttggtaatgttgaacaatagagacaatgctcggatcctctgtttggttgtctatttattttgaatagctccatcacattcctattgtctccttcaataatcacttctccatacccttagaccggttttcccctcctaaccaaagccaaacaaaaccgaagtaaccggtttggtaaaccgaacccgcatgcctacataattgatataaaattctgttttataagaggtttcttttccaaatgtgaaaaaatccaaaactcaaaacaaccttctgtttttaccgttttttgataaaggtctttttcccaaatctgcaaaaccaaaaactcaaaaattcaattaaaccggaaaatctaattttcgaaaattggttttcttcccaaaattaaaccgcctgagtgtctatgtataaaagttgatatcatagtttggaaaaaaaaaaatcactctctctctttcgctctcgctttctcgtctctctcgtgtctctcaacagaaaaccatggcggacggccactccttcaataatatctctctcagcggtcgcggtggaaaggtaccatcttctctctctgtctccttctatctctcaagatctttcaattccttcaaagttttcaccttttcctcttccttcgaaaaccctaatctcctttctctgtatccccttttgcttccgccgctcgattcttaaagaactcaatgagtcaaatttagggttaaaaaaaagattgtcgctttcatttttcagttgtgttgttttcttgtttacaattgttaaagctgcggtagtttttagggttttcttaaggctaattagggtttcaattttggttttttagaacccgggtttacttaaaatcaattctggaggaattcaatggaagaaacaaggtggtggaaaagctgtggaagttgatagatctgatattgtaagtgttagttggacgaaagtgacaaagagtaatcaattgggagtcaaaaccaaagatggattgtactacaagttcgttggatttcgagatcaggtttgtgtgtgtatatcttttttatttgatttgatattgtaatgtttgtgcttgttctgattcctttgttttgtaggatgttccaagtctgtctagctttttccaaagttcttatggaaaaacaccggatgagaagcaattatcagttagtggtcgtaattggggagaggtggatttacacggtgagagttcttatagcttttaggctttacttgtggttgtctagtttcatttgtggatctaaagggagaattttttgtttctttgtgtagggaatacactaacctttttggttggatcaaaacaagcttttgaagtatctttagctgatgtttcacagactcagcttcaagggaaaaatgatgttactttggagtttcatgttgatgatactgctggtgctaatgaggtactggtttcttttgatatgtaatctctaggctgttatgtatgtacatttactgatttatattctacgtgtttacagaaagactcgctgatggagattagttttcatattcctaattccaacactcagtttgttggtgatgaaaaccgtccaccttctcaagtgagttcccaaactattttcattatatgtatgtgcctcaagtatatatttttttctgttgatgctaaaagaatgtctcaggttttcaatgacacaatcgttgcaatggctgatgttagtcctggagttgaggatgcggtcgtcacatttgagagtattgcaatcctcacacccaggtaaagagttgattacttaaacatttgttgcactattgtatggcttcatcttgtcatgactaaatgatttggttgtttctatcacaggggtcggtacaatgtggaacttcacctttctttcttacgattgcaaggacaagctaatgactttaaaatccagtacagtagcgttgtccgtttgttcttgcttccaaaggtaattcttttttaagcatatctcagggcagttacctatgttagcagtcatcagattaaagggattatcgtattatgatcactgaatcgtgttcacattaattgagttcgtatttttttttatatgcctgagcagtcaaaccaaccacacacgtttgttgttatctctctagacccaccaatccggaaaggtcagacaatgtacccccacattgttatgcaggtaaacattacttacatttttccttccatttcaattttctatgtataattttcgtttttttactctgatttacataactgtttttgcatcttctccagtttgaaacagacaccgttgtcgaaagtgaactgtcaattagtgatgaacttatgaatacaaagttcaaggacaagctggagcgatcatataaggtttctgtctggtctgcacttacattattgttcctgaataaaaaaatttatacatacgctgaattgtatgaattttcagggtctcattcatgaagtattcaccaccgtgttgcgttggctgtctggtgcaaagatcactaaacctgggaagttccgcagttcccaagatgggtttgcagtgaaatcgtctctcaaggcagaagatggggttctttatccactcgagaagggatttttcttcttacctaaacctccaacgcttatacttcacgatgaggtaaattatggttattaaggattggagattttttataggctttgagatagagttgggttttctaacctgtttttttttcgtttttagattgactatgtcgagtttgaaaggcatgctgctggtggtgctaacatgcattactttgatcttctcataagactgaaaactgaccatgaacatctgttccgtaacattcaaagaaatgagtatcacaatctctataccttcataaggttagcgcggattatttcattgtctccgtctatatttactgagtgcatttaagatttgtggtgaatattccttatgttttcttgctgcagctctaagggtttgaagattatgaaccttggaggtgcgggtaccgcagacggtgttgctgctgttcttggggataatgatgatgatgatgctgttgaccctcatcttacgcgtatcagaaaccaagctgctgatgagagtgatgaggaggcaagtactttatgtctgaccgaattacttcatattctaatgatcatgtgtttgataatcgagacttttaatttatgaaggacgaagactttgttatgggtgaggatgatgatggtggttcaccaactgatgattctggcggggacgactctgatgctagtgaaggcggtgtaggagagataaaagaggtaaacttttgtcgcattcattcgaactctttcagcagcagtatttgtttctcatatcttcctgtcattgacttgttatagaaatctatcaagaaggaacctaagaaagaggcttcgtcatcgaaaggattgcctcctaagaggaaaactgtagccgcagacgaaggcagtagtaagaggaagaagccgaagaagaagaaggatcccaacgcaccaaaaagagcaatgtctggtttcatgttcttttcccaaatggaaagagatgtgagttcttctctcctttcttttacttttacctctatgatgtaggctaagttgcgaaatggagtatcctcggtctattacatacatgagagcaaacaattaacagacaaacttagcacattcctgattatgtcattttccatttgtgaactgaacagaacataaagaaggaacacccaggaatagcatttggagaggtgggaaaggtgcttggagataagtggcgtcaaatgtctggtaaaaaatttgaagatccttttcaaaagtaaatacattacttggttttactttatcatgtgaatgtgttttaattccccaaccgtgtgtatgtatagctgatgataaagagccatatgaagccaaggctcaagtcgacaagcagcgatacaaggatgagatcagtgattacaagaaccctcagccgatgaatgtggactcaggaaacgattccgatagtaactaaactttgattctccaacattctctactagtatctcatttacctacaatactaagttatggcatgtagtaaacgttggacctttagttgtttggagttaaccagatttttctctttgaccttaaagatcttgtgttacttcctagaaaagaagagcctgtctttacctcaaaatatagagtactctggtaaggccatagctaagaagcaacaaaacagatcgtgtttctatcgaaattgttatacaagaggttctgtatgatgaaagttatggacaagaagcatctaaaaccttatggacaatgggacgagctttacacatagcttgcaacgatgtagcttttcgcattgtggttcctttttcactttctctcatgtctagatacttttcttcaaccctctcccactcaaaacattggaccaatgatccaagagccaaagtcactagccgttgagctagccctgaaccagggcaagatcgtcgtccaatcccaaatggcatcaactttttatcctctccttttttctcaaacctctccggcttaaatttttctggctcttcccataactttggatctctatggatggcccatgcattcaccaagatgattgtgccgcgtggaacgtcatagccatcaactatacaatcttctgatgctaagtggggtaaaagcattggagccaccggataaagccgtaaagtctctgacacaatgtgctgaaggtaaggaagtttcacaatgtcttgttcctctactaaccggtctacaccgatttggtcgtcgatttcggtctttgcctttcgtaatacttctggatggttcaacaaattcgacatcgcccattctaacgttccagctgatgtatcagtcccggcaagtatcataacctatccaaatgcaaaatcagttaaatatacaacaacaaaaacattaacgtaatgttactgatttggtctctcattttacttacaagtatgattcctttgatgatcacatccgtgtagtaatcaggctgagtttcttgtagagaaagtaaatgatcgatcattgtgttaccttttactttctccacacgtttctcgttaactagactttgcaaaaactcatcaacacgacctgctaacttcttaacatgtttctcatagttcgttacgtaacgaaggatagggaagtagtctgctgcgttccctgcgccgccgctaacaactacctcggcaattagctgtctcacgtgtttagcctcgttgtcgttctctgttccatcaccgtagaatctttttccggccaccattctaatgatgttgttgatagttaaacacataaacaatggtttcatctccactttcacaaacccctgaaattgcaattgtttaaccaaatggttaaatttaaaggttcacatatttttattggtatctaaaaatctagagtaactatgttatactttgtagcccaacgtattttataaaaagttttaccaatcgagacgacgagacagtgattaaatatgttaaaatcgtacgtacttacatgttgagagtttttcgctagacaaattatgagccgtcggatctcatcttgacggatagatacgaagctattaagcctaagagacgagaagatctcaatggtgccaatacgtcgaagattcctccaactatctccataagccgcaccaaccatggtcgtagagttgtaccctatatgtttcccgacgagaaactccggccggttagctaacacgacgtcgttcttagtgaaacattcttccgcgacggcgtgagaagaaacaacaaaaactagacgagagccgaggctgagagagaaaatcttggcgttgtttaaagattctgagagagagagaaatctacggtggagtggtagctttagaaggtggaggtgtccgatgatcggaaatggtcgactcggactcggcggtaggtttagtttacgcggccgtggtccgaacaagagtttgagagataggaagatgaagaagaagaagagagagagaattaggtatatagtttccattattgtctttgttgatgacattgattaaaaacatgtgagttatagctgattttatagtgcatttggaagcaagataatatgaaaataagttagatcagattcgtatgttaacgttaggataattgttttgggcgaaatgaaaaataagaagaggataagagttttctgatgatgtcactgcctacttaaacatttagaaacaactagagatatccatgtgacacgtgaacattatgtgatttacttgtcgtcattgcatatgtcattgttttttttctttctttgttttgtttggttttaattgaaagttatacaatatccattgcatcccccttgaaaccaacaaacctactttgagagatatggagtaagaacatgaaatgatgtgtggtatcaactttggtagacctattgacacttcactatatttttggttgatcggttcgcttggtaacacaaaacaatccgaattttagtagaaaagagaaaaatatccaatatcctaacaatccaactttggtggacctattgagactactgtaggactagtaaactattttaggttaacagttataacttatactaggttttaacccgcggtttactacgggccatcggtttattttgttcttatactaaatatttgaataaatttgatatttaaacttataaatataaatttttagtgattagtgaagaatcgtaatatatgatttggatattattgattattgatttcgtgattgaatatagtgtttttagggatgaaatgtgatcatgttttgatttcaaaaacgacatagattccttatttttgttgaacggtttagattgaaggaaattaattttattgaacggtttagattgaatcgaatcatataaaatttaggagattgttaagaccaaattacccttaatgattttgaatagcataatacaaaatccaaaattgaaatcaaaactgatgccaaattagataaaattttaatttgtacttcccttttaataataaagggatgttaaagcgatttagttcttaatgaaaatactaatgagagtgtaattaagaaaacatgcgatattatattaatgatgagttacaaatatagtttgtttttaaaatggttacaaatagagattaatatcgcatggcgtttccctccttcatataatagtaaaaataaaaataagagatgaactcatggctccttcatctgttgtataaacttgtgccctttgttcaatctaagtgcttcttgtgagggttgctcaatggcctgaatccgcttcctccactgacatgcgccttacccgcggcatcgaagtgaccttttccaaagtacttcatgattccatcataatatccactgccggtttcacctccgactttagcttcaacttgagctctaaccttagccttacccgcggcatggacctgacctccgactttaacttcaccttgaactccaaccttacctttgggtttagttattggtccgtactccaagaatttttcactctgaactccaaccttagctttagctccgatttcgaatccggctccaacttggccatgagctccaacaaatttacccgcatatccgagaccttgtttagctatacctccaatgaaaccaacggggtaagtggggaaaccaatactctttccagcagagaatttcgtgctgcactgagagatcaccttcacgtaagacctaatggcactcttcaacttcatcacacatttttcaatctcagcactctcactagcgcttatcttagcattagcatcgaacttatacttggccgagaccgtagacatcatctccaaaaggttgacaaacctttcagccatcacggtgtagcttttgcccaacttaacagcgaggtctccttcaactccaatgtgtgcttgtgcaataaccatcgccttggtcatcaaagtgaatttgacatgaacgacgtgaaacacatctctggaggcagaaaacttaacgcccccaagaaagtcgatgtagctcttgcagatggagaacaaagacttgaacgcaatggtttttggtgcgaactgaaccttcttctcgacgaagctagagacttcaaggtaagggaaagcttgaactttggacaaagtagatggacacaaggtcttttgtaatttcttgtgggtaggtgggtgagccaagacggacccgatggctagaactaaggctaaagagaacaacagagaaatccttgccatggttgtattgatggcaaggttaaaaaaaaaagaacttgaaatataaaactagaaaggaaaatgaaggaagtgcgtctttggattgaggcctttgaagggtatatatacattttcaactatcctaataatagttacaagaacagacaataccacacaatacagagagattcatggctgttcacttaattttttttcctggtcaatctattttgttgaatgataaaaagaaataatgtgccaacaagtcataacctatctagctagtcttataaatagaatacatgtcataacctattttatttgatagacacattttatttgatatgtttcaatgttacccgaaagtttttgatcagttctcgacaatgaattcctgaatctctataccggtatggcgtgcaccgccctgtaatctgatcaaaacttgatccccgggtttcagcgaggtcacgggaacagcggttcgtcctgatgagtttactgcaaaaagaaactattagatgttaactaataactagtagcaaactgcaatgagggtgagactcaagaccaagaaccttgatgaggagtgactaatgcaactgtttctgcgttctgcaagatgatactatacactgtttcctcctcctttgtgctaagctggaaaagatgaagctgttaactcaaattgaatcctaattaacagtttgctagagtgtagtaaagaatgtgatttatgaaccttagcctccacaacaataagtggacgcttctctattttcactcgcccaacgactgctgtccgctgttttcctttctgatcaacaacaattacctctcttcccgtccttaactccgagaggtaacacgtctttccacctggtacagcgacataagcgtgcaccggcccctgtacattgagatttttagtgaatgatatctataaaaggaatagatccagcaagtgaaaaatgaaagaaaaaaaaacgcacagcgttaactctaaatggtctgctttcaatgtaattagactccaagcattctgagtgaaccaagaagagtcctctagcaaaagatccaaccttgtaagaagagtaaagattgatacttcaatgcttataagaatagtaaaaattagtactttatgttggagaaagagtgtatatacaggcaaacatacaagaagaccttcaccgggtctcattaggctacaaagatcaacacagactcggtctcccataccgaccatttgaacccgagttatagtagcttccgttaagcttaatgtatcactttcttcgtttctcttgtcaaagtattcctaatagtttttcaaaacagtaactataagagaccatgtttttaaacaaaatgaaaggacgcttgtggagatagtaacctttagatcaagaacagctttaacatcctcggatttaagaatgattccaccgagaccatgctctaaagcctagagagccaagcataacactaagaataaacatctcttgaaaactaaaattcaacatcagaaactaaacacaacctctaggaatagtttagcctctgagggagtatttgaaactgcaaatactgttttctcacttccttgaagagccgccactagattttccgctgggattgactgcgaaacgaaacttcaagtgttactaaatagtccacacagtgagttcaagttcaaggcttcaagctcagaaagttattaccttccagtctaagaaatcaagaacaatattctctatctgctcgttttcgatattcaaactccgaagctcctcgggtgttgaaacctcaaagaccgaagctacaacgttccccgtaccatcaataactttcttctcttcaataaacaatgtatccatcaatgcaatagctgcaaaaaaatccattgagcatactgtaaaactaagaacatagatatataaaaacacgtcaaatggagggctgcattgttacatgaccactcattggatagttttcgattatccgatgagaatataaatgtgttccagcctcgttccaccgcaacggtcatgacttctttgcacatagtccatatccaaaccttctttgctttgccaagattcataggcaaagttgaagcagacattttcacaacaattctctgagaaaacgttcttttactaaatcttatcttctgatgagagctccacaatagtaatctatcaagttctaatctttctgcagtatcaacatagctgaagtgagaacaaagcacaatgaagaaacttgaaagctcaaatttttctgcaatatatccaaaacccaaatgaaattaaacctttgattactaaaattttatgtaaagaagacaagaattagtatcataagctttagagaaacccagatttcgaaagcaaacacatgaacaacaatgtcattgtgaatttgggtaaactagttttgcttcaatggtgagaaacatcagactaaccttttctcagagagaaagaacaatggaattggtttgaggatttgatgtaagaaacagaggagaccaaaggcaaagccataaatcttttccatgaatcttcttctttgcttcttttgtgccctgtgtctgttgtgttggatcattcgggtttgggccaaaaaatggtcgggtctctcggtttacttaaaattgatcaaaaacagccttagccggatccggttcagttccatttcaatatcattctaaacgctgaagattagactaacatccttgttgtatctcatctataagtatacattttattatgttttttgagaaaattttgttttataagattgcatagtctatcgtctaattgcacttcacaaaatttatacacgaaattatagttttttcatgacacttaaaagaatgtgacttcgtcttcatccataatagtgttattgtgatttcagaccactttttggccaaatgtttcttgttatttgaaaagttaattttgtgatgcaacgtcaacatcttcttctcaaaaaattagtatattttaaatagggtttttcgaaaaaaaaaaaattttgagttgttttgttttgcaactataccctccaactcaagagaatgcaagtcaataccgtgaactttaaagtaacccgctaaataaccttcctatattttcctatctatatactttgtagttttaacagattttgcagctacgtcgttttgcactaatcttttctcaaaaataaattacaaaattggattcgaacccgtgaatttttgtttttaatattagcttttttaatgagtttagtaatattttgttctttaaagtgaatttttaatataataaagaaaattttttagtagtatatgcttttagaaactaatattttactttaaatactattttcctcttcaagattttagaaacagagttacataaattataatttttattctaacatgcatttaaatttattttcattcaagctcattattaacaacattgaagtagattactttttttttttctgttaaaagttgaactatactattattactaataatattttcttagtctattttaaaatttcatttattttacttcattagttttatattgattatatgtaacacaaatataaaaagatatgaattaaatgaacattgtaattaaaatttaagattaaacaaaagtgttttgctgatgtggataccttagatggagagactctctaattatagatatagatgtatttcattttttttcaatttatttgagttcttcaaatctacatgattggtttgctatcagcaaattaaaaaccactaataagcttggtttgctatttttgttcaaagatgagtccatcaaagtctctaagtcattgattccatatatctaaacttagttttgttacagattcactttcactatataaataacggatcaagaaggaaagttcccataatcatcatcactaaccatgagaaaagtttatttgttcttcgtttgttgcattgttgcaactagtttaactctcaatgtagttttagcacatgagacggtcgtgaatcctccaaacacgatcaaagatatagagccgtacatctcggatagagcccttgggtttgtgttgaagttggagaacaattgtcctataagagaacagctaagatcattctttgagaagctaaaagatcttttgaagttggagtcttctgttacgccgctaatcgaggacaacgaaccaaagacattcaagtttgatcttaagtccaaatccgaaaatctcttgcaaacgatgtttatgcttgggagaggactggtaagttatcttgaacaaaaatatttcaaagctatgaacataaattctaacgtaaacactaccaaaaatattttgcatttggaacaatcaaagttctagtctcattttatgtccttgcacaatgaagatagttataacgttatagcttatgaacttatggaactaatcaatgtttttattttgtgaatatgatagttgagttcaagtataagaaaggagatgtttgaagtgatgaaatcactaactgagttacatgctgcgatcggtagagttattatagagaaacatataaaaggtgatgaagcaatgtcactttccttggaacaaaagaacgcggtagaaacctcgataactcaatgggaacaaacgattacccgaatcgtgaagattgttgtagaggttaagtcaaaaagttcaagtgaggcttcgtcggaagaaagcagtagtactgaacacaacaatgttactacgggcagtaacatggtggagaccaatggagaaaattcagaatccacgcaagaaaaaggagatggcgttgaaggaagcaatggaggtgatgtatcaatggagaatctacaaggcaataaggtggaagatcttaaagaaggtaataatgttgttgagaacggcgaaacaaaagagaacaatggtgaaaatgtagaatctaataatgagaaggaggtagagggtcaaggagaaagtattggagattcggccatagagaagaatttggaatctaaagaagatgttaagtcggaggtcgaggcggctaaaaatgatggaagttccatgacagagaatttgggagaagctcaaggaaacaatggagtttcaacaatagataatgagaaggaagtagagggtcaaggagaaagtatcgaagattcggatatagagaagaatttggaatccaaagaagatgttaagtcggaggtagaggcggctaaaaatgctggaagttccatgacagggaagttggaagaagctcaaagaaacaatggagtttcaacaaatgaaacaatgaattcagagaacaaaggaagtggagagtctacgaatgataaaatggtaaatgctacaacaaatgatgaagatcacaagaaggaaaataaggaagagactcacgaaaacaatggagaatcagtgaagggtgaaaacttggagaacaaggcaggtaatgaagaatcaatgaagggtgaaaacttggagaacaaggtaggtaatgaagaattaaagggcaatgcatcagtagaggccaagacaaataatgaaagttctaaggaagaaaagcgagaagagagtcaaagaagtaatgaagtttatatgaacaaagaaacaacaaaaggtgaaaatgtaaatattcaaggagagagcatcggagactcgactaaagataatagtttggagaataaagaagatgttaagccaaaggtagatgctaatgaaagtgatggaaattccacgaaggagaggcatcaagaggctcaagtaaataatggagtttcaacagaagataagaacttggataacataggagctgatgaacagaaaaaaaatgataaatcggtagaggttacaacaaacgatggagaccatacgaaagaaaagagggaagaaactcaaggaaacaatggagaatcagtgaagaatgagaacttagagaataaagaagataagaaagaattgaaggatgatgaatcagtaggtgcaaaaacaaataatgaaacttcgctggaggaaaagcgggaacaaactcaaaaaggtcatgataattccattaatagcaagatagtggataataaaggtggaaatgcagattctaacaaggagaaagaagtacatgttggagactcaactaatgataataatatggagagtaaagaagacactaagtcagaagtagaggtcaagaaaaatgatggaagttccgagaagggagaagaaggaaaagagaacaacaaagattcaatggaagataagaaattggagaacaaagaaagtcaaactgattcgaaggatgataaatctgttgatgataagcaagaagaagctcaaatatacgggggagagtctaaagatgataagtcggtagaggctaaggggaaaaagaaagagtctaaggaaaataagaagacaaagactaatgaaaatagggtaaggaataaagaagaaaatgttcaaggaaacaaaaaagaatcggagaaggtagaaaaaggagagaagaaagagtctaaagacgcaaaatcagtggaaaccaaggacaataagaaactttctagtacagaaaaccgagatgaggctaaagaacgtagtggtgaagataacaaagaagacaaggaagagtctaaggactatcaatcagttgaggctaaggaaaagaatgaaaatggtggagtggacacaaatgtaggtaacaaagaagatagtaaagatttaaaggacgatagatcagtggaggttaaagcaaataaggaagaatccatgaagaaaaagcgtgaagaagttcaaagaaacgacaaaagttcaacaaaagaagttagagattttgctaataacatggatatagatgttcaaaagggaagtggagagtcagtgaaatacaagaaagacgaaaagaaggaaggaaataaagaagagaataaagatacaatcaatactagctcaaagcaaaaaggaaaagataagaagaagaagaagaaagagtctaaaaatagcaatatgaagaaaaaagaagaagataaaaaagagtacgtaaacaatgaattgaagaaacaagaagataataaaaaagagacgacaaagtccgaaaacagtaaattaaaggaagaaaataaagataacaaagagaagaaagagtctgaagatagtgcatcaaagaatagagagaagaaagaatacgaggagaaaaaatcgaagacaaaagaagaggcgaaaaaggagaagaaaaaatctcaagataagaaaagagaggaaaaagactctgaagaacgtaaatctaagaaggaaaaagaagaatctagagaccttaaagctaagaaaaaggaagaagaaacaaaggagaagaaagaatcagaaaaccataaatcgaagaagaaagaagataaaaaagagcatgaggacaataaatcgatgaagaaggaagaagataaaaaagaaaagaagaaacatgaagagagtaaatccaggaaaaaagaagaggataagaaagacatggagaaactggaagatcaaaactcgaacaaaaagaaagaagacaagaatgagaagaagaagtcccaacatgttaaattagtgaagaaggaaagtgataagaaagagaagaaagaaaatgaagaaaaaagtgaaacaaaagagattgaaagcagtaaatcacagaaaaatgaagtggataaaaaagagaagaaaagttccaaagaccaacagaagaaaaaagaaaaagagatgaaagagtctgaagaaaaaaagctaaagaaaaatgaagaagatagaaaaaagcaaacaagtgttgaagaaaataagaaacaaaaagaaacaaagaaggagaagaacaagcctaaagacgacaagaaaaatactacaaaacagagtggaggcaagaaagaatctatggaatcggagtcaaaagaagcagaaaatcaacaaaaaagccaagcaacaacgcaagcagatagtgacgaatctaagaatgaaattttaatgcaagcagattctcaagcagattctcattcagattctcaagcagatagtgacgaatctaagaatgaaatattaatgcaagcagattctcaagcaacaacgcaacgcaataatgaagaagatagaaaaaagcaaacaagtgttgcagaaaataagaaacaaaaagaaacaaaggaggagaagaacaagcctaaagacgacaagaaaaatactacaaaacagagtggaggcaagaaagaatctatggaatcggagtcaaaagaagcagaaaatcaacaaaaaagccaagcaacaacgcaagcagatagtgacgaatctaagaatgaaattttaatgcaagcagattctcaagcagattctcattcagattctcaagcagatagtgacgaatctaagaatgaaatattaatgcaagcagattctcaagcaacaacgcaacgcaataatgaagaagatagaaaaaagcaaacaagtgttgcagaaaataagaaacaaaaagaaacaaaggaggagaagaacaagcctaaagacgacaagaaaaatactacagaacagagtggaggcaagaaagaatctatggaatcggagtcaaaagaagcagaaaatcaacaaaaaagccaagcaacaacgcaaggagagagtgacgaatctaagaatgaaattttaatgcaagcagattcccaagcagatactcatgcaaattctcaaggagatagtgacgaatctaagaatgaaatattaatgcaagcagattctcaagcagattctcagacagatagtgacgaatctaagaatgaaatattaatgcaagcagattctcaagcagattctcagacagatagtgacgaatctaagaatgaaatattaatgcaagcagattctcaagcaaagattggagaatcgctagaagataataaagtaaagggcaaagaagataatggagatgaagtaggtaaagagaatagtaaaactatagaagttaaaggaagacacgaagagtctaaagatggcaaaacaaatgaaaatggaggtaaggaagtttcaaccgaagaaggttccaaagatagtaacatagttgaaagaaatggaggtaaagaagattccataaaagaaggctccgaggatggtaagacagttgaaattaatggaggtgaggaactttcaactgaagaaggttccaaagatggtaagatagaagaagggaaggaaggtaaagaaaactctacaaaagaaggttccaaagatgataagatagaagaagggatggaaggtaaagaaaactctacaaaggaaagttccaaagatggtaagataaatgaaattcatggtgataaagaagcaaccatggaagaaggctctaaagatggaggtacaaattccacaggaaaagattccaaagatagtaagtcagttgaaatcaacggagttaaagacgattctttgaaagatgattccaaaaatggtgacataaatgaaataaacaatggtaaggaagattccgtgaaggataatgtcacggagattcaaggaaacgataatagtttgacaaacagtacatcaagtgagcccaatggagataaactagataccaataaagattctatgaaaaataacacaatggaagctcaaggaggtagtaatggagattcaacaaatggggaaacagaggagactaaagagagcaatgtttctatgaacaaccaaaatatgcaagatgtaggaagcaatgaaaattctatgaataatcaaacaacaggaacaggagatgacatcatttccacaacaacagataccgagagtaacacttctaaagaagtaacaagtttcatatcaaaccttgaggagaaatctccaggtacacaggagttccaaagcttctttcagaaacttaaagattacatgaagtacttgtgtccggtctcttcaacatttgaggcaaaagattcaagatcttacatgtctgagatgataagtatggctacaaagctctccgacgctatggctgtcttgcaagccaagaaaagtggttcaggacaggtgcgtttaattaaaaccatcctctaactatctcatgatggataagctcaaaactgaattttattttaatttttctaacagatgaaaacgacactacaaggatatcaacaagaagtgatgaagactctaactatcttacaatcggttatgggcaaagccgtaactgaacaacaaagcaaagatagtggttccttgacacttacgttatcacagcaacaagcaattaaggaaatagtgttgaagtgggaacaagtgatgtctcaatttgtgaaaattgctacagagagtgagaaacaattttcactcgagatttcaactgaaaacggctaccacatgaagaaaagttataactctagctcgagttcgagttctagttcaagttcaagttcaagatcggatttgaaacttaacggtgaacatttgaaggggatgggtatgaatggttagagagtacgttatgtgaataataaactccacataatattaattattattaactagatatttttttctatttttttttttgtaaagtaattacatatcgtcctgaagtttagattttggataaaatattgaacatgattacaaattatgtaaattttgttttgtggatatgtaaataaaagaaatctcatttggctagaataaataattggttttattgtttgtttttttgagatggtgtggatgtaatgtatagccaacacaaacgactatagccaacaaaaatccatggccaatcattactcaagtacacactgataccacataaattatttgtagctaattatcaatgaccaacttacaaaaattccagtagctatatatctacttcgaccacactcttttcgtggctaaagattgaaatgggtttagctattttagccaccaagtatttgtgtgaacttacccaattaaccaaaaaactgcattgtccactcatatactttagttttacatggtgttagatatttttatttttatctaatcatgtttatactgaaaattttccttactcatttaagtacagaatttcatttcccttttaagataagcaggtgtccgcaatattgtgtgttttgtggcgaaaaggatgagtctcgagatcacctttctcttgcatatacggatacctttactgcttggtcgtcactaagaggtcatctcctcaatccaggatcactctgaactgatgtgacatgctccgtaatctaataaagaaaaaaagaaaaagattgccagttaccttaagtataacagaacatatagttacacatgtcaagcaaattaaagatattcaggtacatgatatatatggattgcatgatcatatatacgagatatatggcttcatgtagtcaacatcttaaatatagaatctcaagttaaccaatcgactgtctctagagttgtctaacaaaattattcaaaactaatcttttaatttattttgaataaaaatatttttatttggtgttgtataatcaaaaatcatattctatatctaatataaatatattttgcatagatatttaatgcattgatttttataattgttagctattttaatttcaaaactaaactacgaatggaaaaaaagatttaaatttcttaagatatgtaaatttaaattaaaacaggaaaatcttattaaaaacaattaagtaaaggatttttttttgtatgatcaattataaagttttaaaaagttttaacttctaatttttattaagaaataaatcattagaatcaaacccaacgccgaagtcagtcgactgcttaacatgagattgtttgtttatgatgttgaccacatgatgttattacttcgtatatgtggccatgtaatccatatatatcaagtagctgaatgtcttttagtttacttgacatgtgtgaccatgtgttccactatacttgaaataaccgtcaatcttttttccaaaaataaacttagcccattggattccattctaattaatatggttctctaaactgcgattaactatgtgtggcgggaaagaaataaaagaaagatttttttatattatcatcacttatatttttgatctaatcctattaaaaatgatgattagtctatcatttctatctatgtgcaacacttcagattaagataaacagctctacgaacaactctaaaacgtgtagttcacctctcgcaacactcgactctcttactgacaattcttagatgcaccataccaacaacggaaaatttacccctaacactcgagatcatgacggacggccctgtctacatcgctctagaatttctgattagtatggaaccactaatctacaaaaaaaagtgcactctctaagaatcaaagccagacatgttgtagaaacttttaaaccaagggacttccacacatatatagatgtttatgatttaaagataataacttatatactaatcagtaatcaatgttgattttttctcggaaatatgaatgcaagatatcatctttggttaagggtttttttcgtatacatgggtacaacaactaggaagcaaaaaatctcctacaaactttacagatacataagagccctgagaatacaatatggtattgttctaacgactctctgacgctaaataaaatttgaagagtccacaaactgatacataagatttacaataataaggatgagtaggttagtgtaataaacttacactagcagagtacgttagtgttgatgtttttaggaccgtggttggttgttttaggatagtccttgacggataggtattgtcatagtccgtaactatcttactttgttatgtgttattccgctttgacatctttagcgataagacatgtactgcctctactgttattaatcacaaacgcaacaagtaaatcattaaataatatacacaaatgttttactattttctattgtctcttcgatttatgcacacattactcacaactaaaaaaacttgtccagtttatatcaccaaccaaaactttgactagttagggaaagctatgagataaagaaaaacttaaggcaaaagactgaaaatttgatttaatgtatcatatatgcaaacccatttgcattcatattctttaaaaaaaaaatgtatcatgtatatatccaaaatttcttgtattcatatttttacaaaaggaaaaagggagttaattttatatccatgcaatatgcgtgaatataattctctagtattgagtgtatgtaattaatagtcttaaagcaaaacattctacagctcgctgctgtaactaagcagggccatctctttattgacataatagtattaataggtttttgacctctgggtctaaatctacgagtccgcattggcgctgtcggagcttttctcttccgaggaatggctgacggagcttttgcctgcggattttgagtgtgtcttttgatagttggtagattgatagctagcactgccggcttgtcctcccatagattggcctccgaaagttccaccttccatcgagctttcacttgcacttccacttgggccacccgcagagggactaccggttggacttccacctgtagaatctgtgtaggttcctccactcgcgccaccggcagtagcactccccccactagcgctttcactcgtgccaccagcagcagtgcttccaccactagaactctcactcacgccaccggcagcagcgcttccaccacccattgaactcgtttcggtgctagttccactaccggcttcagttgagcctccggcagcggctccaccattggcctcagtcgagccaccggaagcagctccagcactagcactttcactaccagttgagccaccagaagcaactccactgctagtgctttcaccgccggtttcagccgagccaccggaagcagctccaccactagcactctcaccaccggatgcagctccaccactagcgctttcatcactggtttcagctgagccaccggaagtagctccagtgctttcaccaccactttcaaccgagccactggaagcagctccaccactagcactttctccaccggatgcagctccaccactagcgctttcaccaccggtttcagctgagccaccggtttcaggtgagccaccggatgtagctccaccactagcgctttcaccaccggatgcagctccaccactaccgctttcaccaccagtttcagccgaaccaccggaagcagctccagcactagcactttcaccaccagtttcagctgaaccaccagaagcagcttcaccactttcaccaccggttttagctgaggcaccggaagcagctccagcaccagaagcagctccaccactagcactttcaccaccggtttcagccgaaccaccagaagtgtcagcggcagcagctccaccactagcggtttcaccagcagcagcacctccactatcggcactagcagcacctccactatcggcaccagcagcacctccactatcggcaccagcagcatctccactatcggcagttgctgcacttccactctccccagctgctccagcagaagaggaatcaccacccattgaactttctcctccggcagaaccatcagttgtacttccactagggccaccagcagtgcttccactaccatcatcacttggatatgatggactacctgccgaacttccactatcaccagtggtgtctccatagcttccaccgtccgtaggactcccagtgtcggcggagggagaaccgctgtcagagcctggacttccactatcaccactgcttccaaggccagagcttccacctccaagaagtgatgacagatcaatctttgcgccgtcaccattctgatcgccaacttttttcacaaattgaccaatcacttgtgcccattttgccatagatgtaactaactctcttctttgttcacttgtcatcattgttgcaccgctcctcttaaattcagcaaatgttttccccattgacatcaaactctcgatcaatttgctcgtatcagcctatcacataaccaagaataattaaacatacaaaaaatgtaatgctcaaacaattgggttcggttagtaacacaaaacaatataatttttaagcagtaaatgattcataaataacttaaaaatcgtaagatgtagccatataagataacaatatcaaaaagctgagagtaatcttctaatactcatgtgaacaataataaaatatgaaatttaccgatgatcctcctttgacacccaatgcagagatagccttgaagaggccctcagcttgttgtttcatttgagactggaactctgaagacgacccttttgccgtgtttatgaaggacatgaaagctttcagctttgagaagaaatccttgtactctcctttttccggagccatattctcaaggttatccacaaaactaagcatacctttgtaagcaaaaggctcaaagtcttgggaatttttaggaaatttattcatgtaatgccttaataagaatacaccttgcgcttcatatatggtacttgatgctactagtattaacattagacatattgctataggaaatctagccattgttttgtcagatatgtaaaagaaagatttgaaggatttttttattttttgttttttaaatttctattattatttttgggtttttgaatgattttttttaatgagaggatttggcttatatagatgctgaaaatttctaaatttgagtaagagaaattggtggatccatttaaggtcgcgagagaatagccaaagagagactaatggttctcatgtcccataaccgatttcgacggtgaattgtgttgctcttatggtttatatcattctatatttagagaataaattacttgtaagttgtaatattaatgtactatgcacgcaatttatgttttgtagaaatgttagaatcttttgaatgcttattacattccggtttatgcattacttgattttataattttcattagttgattaagtttcaaatttaagattaaataatgacacatgtcgatgttgtaatcttattaattatttcatgtgtcactctctaaaagttttgttgaaattatatatttgtaactagtatatgtaaggctcatactaatttaagttgaactttacttacaaattacacaattagtttctagtcttccaatgtataacatggtttatatcccaacatatatagggttcgaacaattttgttgttattacgcaggcattcaaagttttttggaatcattgaaccgccttgaataggaggtcaatatcacagaatatggagattggagagttagataaagtgtgggatacgggttttgctctctatgactaattcgacccaaacaaagattgattaagtcaaacaagcagcgaatatgaaaaaacgatccattagaacaacagcccatcaagcatgctagctcggtccaatgcgcttctgcacaataaaataaatttggaagagtaaaatcgaaaaaccacaagagagacaaaaggaactctatgtcagctcttagcttataaatagcacaagacattgttggcaacaatatctggacttgaagtcattacctagcaaatttaagagagaattgttgcctacctcgttttatttcttacttttctgtttttcattcaatatgtcggttttatgttctgtacgttattgttctcgttcatcattaataaaaaaagttgtttccttctccccaaaaactttttagttatttatgttacaactttggtaaaaacataaagcgaaacttttgtgggaaagataaagagagtgtgaatgtaacatgtacctaatgttttgctatatactttataaaagaatatttcatgatttagagggtcttttaaaatatatatatatatatatatatatatatatatttatatattaataatatcatgtttttagtaaatataaatttatttaatctacttttatatgtaatatcttttaatattagttagattgtataataaagaaaatttgtgacgacaatgtgggatcaatttctccaaactagttaagagggtgagtgaccataagaataaactcgttttacttaagccctgacacgaaagagtacaagactcctaagggcggatttttatctattctgccatcatcagcaaaaaaaaaattctattttgccactttgaaaattgaatttcgttttgatttttttttaaatagaaaagtagagggattttacaaaataaccttgttattttaagaaaattacatgacccaaccacatatccacagatccgatccattgtcattgggttttcccccaaatcgttttcttctaacctaaataatttttaaaaaaaatcaaaattgtcgctttcttctccgattaacctaaacggcgatttttccggcgattctcgaaaatttccgtcgcttctttccgcgatcagttcaccgtcaccagtttcatctttgcttcttcaccaaacaatttcttgaaaacttttaacctaagtaaaattttaccaaatcaaaactgttgacatccactttgtttgttccgtctccggcgattccaaaatcatcaaaaccgaatttcgcggccggtcaatatacataatttaaaatacaatactgggctaagttgttccagttggccggtcaatacacataatttaaaatacaatactgggctaagttgtcccagttggccggtcaatacacataatttaaaatataatactagctaagttgtcccagttggccgttcaatacacctaatttaaaataggaaaatacatgtctaattaggttcaaatattacataaaatccagaaacataacataatgccatagaccatcctcaataacataaaacacatcatatgattaccatgtagaaagtaatgccctaagcctatcaatctcgacttctttgggcagtaacctttctttaagggtttcaatttcgccttgcataagatgaacagtttcccggatagactccaaagcatgattacatgctagttgtccttgtcttagtgcagaatcaagtgagtgatttaccttctcaagctcctcagttaccgcctgatcccaccactgaataaggtggtttcgggactcgtactcttcatcctgcgaaagagagaagacttcataaatataggcacttgtactttgttgttccaatgaaatgaaacacaataccttactttaagcattaggcatttgtacactctttcgccttgcttgtaaccagttttgcacacttgaagtgttacaggcttaccacaaaaacatttgactggaacaccccaatttgcatcggcactcgcctctccactatttcaactagcttcggatgtggatggttgagagtaactatagggcatctatagaacagagaaagatagacatatgttacatcgaaattacggagaatccctagatctacatcggcattcacactaccctagatctacatctatctcatagaaccctagatctacttcgaaattacggcggctagaaaccctttatcataccttgttagtagttgtcgtcagcgggggctggaaacccctaatttcagttgttgtcgtcggtgatgttgagaaagagagaagaacgagagagagagaaagtgaaagtgagagaagagtgaaatagaagagagagagagaaagagagatgaaatcccgaataaatagggagaaactatgtagtgtgaacacaataatcgtagtgtgaacgcaagtcgtggggtctattttttaaaaatattatttattagaatatgcagaatatacatagttgtatgtatatgtacagttggccggattcacaaacagttgaactattctaaattttatgtttttgaagttgaacctcaaaaaccaattcatttttttagttggtcccataagttttaacatattaatgacttttaataagttttgatagaaacatatttaagaaatatctattttcatacataatgtatgtacattggacaatcatgaactaaatgttccttgttatacataggtgatttattaggaaaccttaaagtttaataataacaatgttgtaatatcatattttagatttattcaatgtttagttcttgttaatagctgaaaataatgagaattatttattaattttgttaaccctaaaatacagatacatatatcagttgtctcagttgaacttaaaaaaatacattaaacttgcaagaattcaataaacttgcacatattcaatacaaatacgaaaacataaaaaagagttgtcgaagtttaaaatagtacatcatacttgcaaataatataatacaaatacaagtgaactcagttgtattggttgaaccctttctgcagttggccaggttgttccagttgaaccctttctgtagaagacttaatcaaacttcttcaggctgcagccaagcctccactgtttgtaactcaatttcaccttccttgaggtttcatctattccaatcttcttgcatatcttttctactaacatagagtatgttacctttgacgtcctcaacaatacaccgcttaaagaattgtttgaaatctactcatgctcttctgaataatactcattgtcgaattgtatgaatgtgtgcttgttcttcatcgtctcctgtaactacaaataaattattaaaacacagttacgtaatcattcagatttagacataattcactaataccgtttgtaccacatgtcctattgtttgtaccccttgtactattatgtctcattgttaccatttgtcccagttcgtcaattctgggttttacaaatcgttaatttcgattgaacacttactgaactctctgattcaaaacgatacaacagcccagaatcaacaatacaacaattttatgttattaacaactaactcgaacaaaaaattcacattaatctacaaatcaaaaggagatcagatttacttttgctggtgaggaggaagctaattttgggagcagattttcatcttggaagctacgaagacctcgaaaactaactcgtcggtgaaatcagagctcaagtcgccgccgaaatcggagctcaagtcgccggcgaaatcggagctttagtggtcggaggtccgtataaacacgatgcagaaatgaaatggaattaactgttttctttttttctttttttactaattcttctcagttattcattaaggacagaggggtaattgcacaccaaagagtggtactcagaataaaaagtggtacgtcagaattgtttttcaaaaatgatggcagaatagaacgtggctccctaagagcatcattattgatggtattttagccaaatcttaggctaaaatttgtgaagaaagagcttttatataagaacttttagacttatataacagcttttttcacaaatcttagcctaaaattttgctaatatattttatataggattttttgtggacacaattcactacactaacgaaattataggacttatttcttggaagaggaaaaatattcaaaatccctttaatgggtcttacacttctgtatattaacatacagagtgcttagtctatctttattttttacatagtttttttaacttgcttacgtcggtttataggtataccgatcttagttttatttaaaaccaaaaacaaaatctctacttagctactaaatataatatttttgggcggtactagtttgtctttcttgctggtttatggctcattgatgtagctttggctttgtactcagtttttcatggccatctttgcacttccctgagaggaagaagaagacgaagatgaagatgaagatgaagatgaacttgaagaagcagccgtctcaacgaattgggttgtgacttgttcccacttggtgattgtctgcttaagctctgtctgttgtgttgatgtcactgtcttgccactcacgatttgactgttgatgtcttgtagttccttgagactctgcatcacttcttgttggcaagatgccatggaggtcttggtctatattaacaaaacaagaaaacaaagatcattttgtttcaatctttaaaagaatcataatattagagtttgaagtatggtttcgttttacgcgtacctcttcggatttgctaaaccttgaactcacgaacatcattgcctcagctatttttgaagcagcagatctcatcccggtgaccaattcttttgcgtttgaggtagatagctttgcggaagcagacatggaagtctttagcttttcaaagaagaccttgagctctgaatttccagtgtacttcttctccaagttagaaatgaaagaattgacttctgaggaagtttgtgtctcaacttcttttactgatgtggtggatgagctactagatgaacttttgctgttggactctttcttttgagaagcagcactttcttcagcacttgcactagcaccagcacttgcacttgcacttgctccagcacttgcacttgcacttcctttcgaagaggctttaccatcagtagaagttgagggagtagggctgccactgggacttccgctcggacttcccgaagatgtaccggtagtgtctttgtaagtgtctccagagcttcctttgttggtttcttttgtcttggaaacacttccgctagcagcactttcactttcactcttagaattagattcttttttcatcgaagcactctcacttcctttctcagaggttttgccagcagcaggagttgaaggggctggcgtagaaggggtaggtgtagaaggagtgggcgtagaaggagtgggtgtagaaggagtgggtgtagaaggagtaggtgtagaaggggtgggcgtggggcttccacttggactggcgcctgaagatgaaccagtagtgtctttgtaagtgttaccagaacttccaccgctgacttcttttgtcttggctgaagaagaacttttgctaccagcctcagtttttgatccggtgttagtttcgatgcttccagccgttgattcacttccggatttgctggacgtgccttgtgatttggtgtttgaggaactctcattatcggatgaagaggagccatcacttccactagaacttccaatgctggcattaacatcaacatcaagaccgtaagacgattcatcaatcgactttcctctcttctcggcgacactctttacgaatgttataaccattcgagtccatttcaccatagccacaaccaactctttcttttgcttcaatgacatcatccttgaaccttgcctcttctgctcaaccaaagtctttcccattgacaacatggtcatttttaactccgactgtcgtgtaaaacaaggaacatttaggtttagaaaacacaacaaatgttttttttatatcttatgaatgttttggtattagacttactgattggctgcttttgcttccagtcaatgcagacatagccttggaaagcaattcacatctcccattcatctccacatcgatgtttttcgatgcggatatcgatgctgagctgataaagctcatgtaagacttgaacgttgaaaagaattgtttgaactctctagttgcgggacatccaccttcaaggttgctcacgagcatcaacatacctttgccagcataaggggcaaagtcgatacaacgtctgggaaacttcctcctcaagtaaagctttaacaagaaagtcccttgcacttcataaaccacacttgatgcaaccataaacaccagacatattgctagtaaatttttcgccattttttttatatataagaaaagttaaatagaacagagcaagacaattatttttttttctttttttttcttttttatatatatttttgtctttttttttgattttggaatgatttttgtttctaggagaaactgggtttatatagatgcttaagaagtctatttttaagttagtgcgagtaaatagtggattgatttaaggtcacgagagaatagcataataagaggttcacattttaatttactttctatttttacggcaatttatgttgctgtgcgcaattctcttcaatctatatttagaaggatcaaattattgacactgattaattcgaacccttgactacttcatcacactaaaaaatgtgatataattacatttctgactttaaattattggtgtagatgctactggcatgtaacttgaattgccatgtaatgtaaaaatattcaaacggaagaccttgacaaatttcatctattcatattctgaatatccaaattatgtgtaatttttgtttattatgtctctcattaattacaaactattgtagtaattagaaaagaaatttttacattagcgaatgaaaaaaaaattgctctcatggtttgtcaaagtgagatatggttttccgtttgtcttttcaatcgtttttagaccaaaatacttttaatgagagcaaccaaaccgcacagcagttggttttggtttagttttgtaaaaaaaaaaaaaaaaaaaactgaaacgaagaaaccgaagaagaagaaaaagagaaagagacagagatatttgagaaagaagtgaaaagaagttcaaaattcattatccactccttcatatttcaacatctctccattgaactccaaaattgaagaacaaatttcttattttcacagatgaacaaaatgcaaaaaaaaaaaaaactcataaattcaatcactttagctttttaaactaataatattctaggtttacaagatttatttataaatagtcatcaaaacgtaaaaagaatgagattttgagaaaactactaaagacggccgcaaaattaggtttgcagaaaagaatacacaagttgaagatgactggaaaattacaattatacccttcaacaaaaaaattctatgtacgtatattcaatttacagtgtacgtacacgaaattatttattggaacgtatatagtacgatttctaataagtcaaactatttttgtacgtagtcttatatctcaataatctccatacatacataataattaaataaaaatagatggtgaaataatgtttgttcctcatattgaaaagttatgtacgtttatgtgtaataatgtacgtacatttttgttggtaaattaatgtatgtacatgtgtaataatatacgtacatctttgtttttgaattaaattattaagaaaaaattattgatacaatattaaaccaatattagcagtggctgagatatattctaagacgtttatacgatgtgattttgaaacattctgaattcttgacgacttgagcagtcaaatgtcatggacaagtatcatcaacgcataccatctccaatcttataggacatgatctaggttgcttgtagcaaaaagattgtttgattgcgagataagacattgtttgttgtatgacttttctgttcttaaaaacactttccaatctatagtgtacgtacattggtacaaaccatgttgacacatacttcttggagtcacagctggtgtacggtcacccaagtgaaaaaagttatctccgtcaggtacacgctgacttgtgtacgtacactctgccaacagacgactgaattcccctagatgttgaacagtcagttgtgtgagaatgacgttctcctcaacattccctatttcatattcttctacagttacatcgttccacttattgtaatcataatcttcgccactactttcactaccatcaatagtaggatcgagggtacttccctccatagatccatcgtcaccctgataatcatcatacccatcactatcttcgttgttcccctccttttcatcctcatctgttttatcgtcttcaacgtcgtcttgctcatctacggcctcattattttcatcaacatttgaaacattatcacacacacggtcactttcagcatcgtcaccatgagtcctagagatatcattcccgagtgtcttgacggttgtaatgaaaaagacaaacaagttgagagaaggataccgaccacgaatcaaaaagaacgtatccaaccccacttgactgtcaatgtagataggagggcgtttagtatctataatcactaacatctttcccgacatcgagtaactaattatgtgattgatctctgtgtacttcagactgaaagcctcgcttagtgtacgtacaaattttgtgtacgtcatgttttccttaacacgtacacaacgaccaaacatgtcttcttttggttcaaatttccattcttcttctttgcatctccactctccgaccatagtaaatacgtgaatatccattacccaactgcatcataaattcaggagaaactcattaaatgcaacataaaacatgattatatctacaaaaacaaatagaattttgatatacacacttataaacatatatatttacacatttagcattttcaaccaacaaaattggaaataataaattttgggggttttctatagaaaacaaagttgatttcgaacacaatgaagatctagtgtgttataacaagaaaaatctttaaacttcagtacttacacgataatgtttatcttggctccaaacttctaaataaacaagatcaacacttcttgagcatcaatgtacgttcgcaattaatgtttgttcctgagttcatctttaactcaacacttattataaataattttataatattataacatgtaatgatgattttgcattaattatgacaagagtcacgtctaaactttttgggccattaaatgttgatgtcacttcgtttttaatggtaaaaatctcccttctaactgtatagccgcgcttctcaacgtgaaacaaaaatatctccaactaaaccggaacagtttacctaactaaacctgactaactaaaccatatattcaacagtttctcaactgtagcagcaagggcaaaagattcaaatttcagttaaaaagacaaaacgtgaaaaccacttttgactttaccaatccctaaaaataaaatatagtcaaaaggtgtggccgcaaattaccctaactagaattactgaagagtggagagtatccgtgctatgtgctgattattcatatattttctgacatcaatttttggctacattatattttatattggttttcacattatattaaagaaaatgtaaattatagatctattcatttgtgaaacaacgatttcatgataatacaatttttatttatttatatgtaattgatagtaaatcaaatatataaaggctggagttgttatgtatcgtaaaagatgatcagcgaaacatttcataaataggcaaaagataattattgatttggtattttgtgaataataatagatgatgttcggtgctatgtaaggaaacccatttttttaagaatattaaatcaattacgatatttttattttatagttagatactggtaatgatatcaaacatgttagtttaaattttattggtaggcatatagtagatatttgaaattttaaataacattatattatgtaaattttagtttttacatattatactagattttaacctgcggaacgatttattttttaaaagtaatatatattaatacttgcaaattttatttttataaaatatttatattttacagtttataattgttattaagtaacgctatatcacgaatccaaaagacaattgtttaaaaactgaagttttaacccctattaaaacagcatattaataatattttaaaattttataaacattgattcaaatacatccaccatataacccaattccaaaataaaatccgttctgtaatttctttacctgtcccgtaaattttttttaaagtagtaatttttaaatttaagaattattttatatatatatatatataatttttgcaaattatataattctctaatacatttatattttatagtttaattttatatatggtaacattatacataccacataacatttttgtttttttataatcttttctaaattaggatgatttgatatgtttaatattagtggtcttaaaaaataataaattaaagatttaacctgtattgaaacggtggattaattatattttacttttttattaatgttgattcaaaaacccgtcccaccaaatccgtcttgccaaaaagccatttattttattaattttaattttattaatgatatgactctgaattatcatctaaacattttagctaataacataggagtgcactatatttatttaatagggaatgtaccatatgatccgaatgcatttttacccaaatccaccaaaaaagtcttgcaaaaatactatagatataagaaacgatagtcggttttgataggtataagattagcaaatatattagttagcttaaattagttaaagattacaaattgaaaaggtatattacactctattcgaatatagtatcaaaacttatataacacagagatttgataattttttaattgttgaatactttttttttgtgctaatttttatgtgattaagatttaattgagttcgtatataaaatattaaattgttttacgaacttatttgtttataatttggtaacagatagatattcgaatattcagtatattttgcttcagtttaggaaatctttgatgacctgtctttagatccaataagccctataatctagatattaacctgcagtataccgcaggtaggcttatattttacttaaactaaaaacttttattggaaagatgatttaaaaatatatgatattattttatttgattttaaatgtatagtaaactgtgagttgtatatgttttgttgatattatccatattgtttagtgtttaagattatacacttgtagtttgattgttaatttaagagtttcacctgtagtataccatcttgtattaatatcgatataaacccgtcaattctaggattttccagcttgtattaaaaattgaatcacatcataaacataaaaaaaatctaatatgttattaattattgtagtatataagattataaattttcaatataatatgtatgaaattgaatataaatatttcaaattatgacccgttactcagtagaaagttttcttaaatctatttttcacgcgttaaaaatattttttcatgtattgaacagtttatattcgtttttaaaaattcaaattatggcatatgcaaaaaaactctaattctctttttataataatgatattattttttcgcaaaaatagaatcatataaagatgagaagtgaactataataataaataaaaaattaatatgataatttagatatcaaatctaatttgttgattttaattggttacttttttggaaattaatattgtattttgtttttctaattaaattaaattaattaaaatttatatatcaaatcttatatgttgatttttattggttattatgtttggaaattaataatgtattttcgtttcttaattaaatttaattaattaaattagtatttgactttttaatccttaaagagataaattaattactctttaaaattttatttctaatggcatacctatgtaattacttacacaaattaatgttacatttaaaatgtacttcccaaataatatagtaggataaaaatttaattttcaaatgatattctttacaaaaagattatctaaaactaaaaatgaaaacatcattttttattttgtagcgaggtggagacgtcggtatacagggcagttgcaaggctaaagtctgtaaagcatggactttatgcagcaaatgagtaaaaagaaattagagtggttaacactttcactctctcaatagaactgtcaagtttgaaccttctgaatgtacattgtatttattttatatttactgtatttaataaagggccaaattttattttattttgctttaagcagtattttatcttggatggaccctgttggtatggttcctggtagattttccttcttgtctcttgcatcctctcttggtccaaataccttttaggaactcgattcttcatttttttatttttttttaataccaggaggttctaagccaaaatccgtaattctcctaggtgcgaaaccgcaacatgtaatattagtttcgtctcaagcgtcactcgaaccgacgacctctaagcttcgcatgggatctttactaattgagctaacgacactaatattacgtaaagtgaatgaaacctaaaaaatgcaatgcaacaatatacactaaatatgattataaagtgaatgaaaacagtgaaaaatattaacataatgcctttaaaccacccaaaaaacacaagatatctgtgttcaactaaaatcttaggaaagttttaggacgttcgtacattgttaaatctcgttaaaagttattatgtcgtttgccttttatggtcttaaacatattcttcttagtttaatttcgaagaagacaaaaatatcaataaaaatcatcgagtgagttcactcacttctgactgtttgttacaatatatatttacatttacatagttattccttgtatagatcgctcgactgatctatggctggcctatacagatattggttttatttacaacaaaaacaaaagtagtattaacatagggcattattttagttatgcctttgatttcaatttgtgttcattttgccaacagaagatgaagtagttgatgatgactttgtctcgctctgaatagcggtctctacgaattgggttgtgacttgttcccacttagtaattgttgtcttaatctgtgtttgttgtgctggtgtgcatgtcaaagatccttctttcttgccttggttctgactcacaatttgactgtggatggtatctaactcttgaagagttttcatcacttgctcttggtaagtttccatagactttttaacctgtggacatagcacaaattttttaaaaaaaatatgttaatggatattgttgttgtatccatttgaaggaaaaattcttatatgcactacctctgctgatttgcttccaattctagaccgcataactcccatcgcacccgatagtttaccagcagcagatttaatcctagaaaataaaccttttctttctttggggggagcaatcattgtacccttgagttgctcgaagaagaccttgtattcctccttttgtggacacttcttttcgaggttcattatgaatgtcgaaacatctttggacgtctcttcctcgacttgtgtcactgttacaccactgctctgactagcggaactttcttctttagtagcgcttgtagagcttccaccagcactttttgaagaggaagtctcactttcacctttagcggaagtcttactttcacctttagcggatgtctcactttcacctttagcggaactctcactttctttaccagagcttttgctgttttcgctggaagcttctttcccaacactagactcttcattggaagaagcagagttggttgtgctcgataccattgtgtttgtgatccgagtaatgattgtttcccatcttaagatcccttctttgatttctttttgttgttctgctgttagcttcattgattcctcgctctcctcctttttgcggcttcccacaattttagtcgcaagaaatctcataaacttaaaggtattaataacttccattttatcctcttgaatttccttttttatctgttatacatatgcaagtttaagtaaattaaattggttcattaacaatatatcttcacgttgaagaaacatttacctttccaatcgcaaaagaagatatgacttggaagaggcctccagccttggccttcatgtctcggtcgtaatctacttggtcttttctttttattgggcagacatacttggcgaatgccctaagtttctcaaagaaagccttgaatttatttgtcttgggacattctttctcgaggtcggacacaaagactatcactactttaacggtgtaaggttcaacatccttcaacgtttgtggaggttcaatctgaggcaaagttggcttaagcttcaaatgagctgaaacgatgtccagaagagtcactgatgcaaaaagaatggtaaagcataaaaatagctgaactcttgccattgttatatatcttgttagaaataaaagttgaagaatgaaggaattgaaatgggatttttttgtatacttttatagttatgtttagtgttctatgtttaggattactgatcccctgaccattggtaaattggtggattaaagtcataaataatagtaaagagcttcatggttcttacgtttcacaaatctattgatggtgaagtcttttgcgtttgatgttttttgtattagttttataaaaattgactttttatatagaaggtttatagaatgaatacatatgaaggctggttctggttggttcccctatctttgacttctacttgattttatcacaaactgtgtgtggtatcattcgccgccatattcattctctatattcgactaatacggtgatttgataagcaagtcggaacacactctcttcaataaaacagatgggggataggaaatatgataagggactccaaatgtggttcgtatcaagaacttaacctcttttgatcgttaaactgttagccatttttcattttaaacacatgtcgtattagttgtaaaaacgatattttttctttttaaatataatttaacattacattcaaaaaaaagaaaaaaaaaaaagacaactctctcgttaagcaaactttgtgataccctaattattatagtttttgttatgaaaataaatataaattaaaagtacaaaaatctaaatatgctattgaaagagatctctacaactccacaagattacaagctagttccttttgtttggaatttttttgcgtttcccacgatgataatatgattcactagttgcatggtttagaatatatggtaggtctcgggacatttagcagaaatcaataaattaattgtgagacacaatgtcgaggatgtggaaacggaagaagcaggaactattaatagtgctttctttgatgccttcacagtgatgtgcctagactaattaaaccggtggcgtaactagggcccttgcccttatcacaatgaagaacacacgactctttgctttcggcactaaaccattggcgttattggacatatctttggctccgagtgttttcatgtcgatgttaatttttggaaaataatatttgttttggagactaggtaatgggtcgattcagtaaagagaacaatagttaaggtttatacggtctagataaaaactcaccaaatcatatatatgaaagttggtcaactctctccataagattgctacatcatcactttaacatttgtcatatgtttattaattaattaatgtaagcttttcaacttctaatttatatgttaatgatacatttattatttaattttatatattattttattttacatatttaatgtactattactaaatttaattaaacattacatgatttttcaataaaaccattttaataactttttcatacttgaagatttttttgtaatccaaactcaaagtatgagtatataataatcgtggattagttaatgatttgagtaggttattctcttaaattgatatttatataataaatcaccgaaggtgcataatacgtacaaagctccatcatcaaattcttaggtttctagaatcgaacactaacttctattaaattagtttaagatgaacgttatttatgaattatgtgtatgatgaaatattgagaatgtttttagaaaaaaatattttaatactaaaaataattttttttgcatgagtgaatgattagataaataacaattatttaaattaaacgatacaaaaaatccgaaaaaaacacggcgtagcgcgggtgatcacctagtagttttaaacatgaaactagtgaagccagccttggttcgtgttgtccatagacccggtgagtctttgatgcctcgacttctcttttttggtcctcctttgcatattttttcagagcatggcttattctgtatgcattttttgcctctggtttctcgttgaacattgattttatggaaatcatgtctctgttggcatcttctgcttgaggacaatagcaggattattaggagcgtgtatttcttgtggctggtcaagttctctcgtcgatccggttgctgttttgcttcgttgagtagttgttgtgttgttggataagttgaggatttagctatcggtggtagctagctttcctctccttttgagagctccgcaagtatttcttttcttgggttttgttcatggcttgttctctgttatggcttcctgttgttagtgttgttgtttgaagaatgctttgatttgcgtactcgcttattccttgcgtcttggttttgcattagaggagctagtagggctaatggctctcgtgtggtgctgaatggacttttcttgctctgcgctgctgacttcgaggaacgaacttggtagagagagcttgcaccttttgtttttttttggcgtgtgaggttcctttcaagggaaagctcatggtttgctaacagttgacggctcagtaaaggaccttttgcgaaaggtttctatagctgttggtcaatcgcatcaaggtgtttttgaatctgcttttgcgcttctccttttgcatctcacccgggaaggataacaagaatgtcatcacttcatcttgctcccaaagcttcattgcttgcttgggtagatggacggaaaacttggtttaaataccatcttatgcttccttgttttatcttgtgtgtcttggaaccatatgtataggttttcaatctttcgattgcaacctaaactatttttatatctataaaatatttacaatttagcaaaaaaactagtgaagtgttattatagagggagacacaaacaaattccaaacatatacagtataaggaatttacttgtaatcttttaggggtccccttctttttaattaagtgatttcagtattagcgctatatgtgaatttttttactaaatattggcggtcatagggtccccaagagaattttagcttcccgcttagttaatttttgatttagtatttttaaaatgctataatatagtaactgaaatccgaattttatttttaatagtagttacgaaattgtgctatcgtcatgtgctatgaatgttcatatttctggttttatataatattcaaaaaaaaaattgcacttcaatttatttttaattccaaaaatatattacagtaaggggattactacaaatatatatttcttacaattttatagaatagtagtgccaaaatgataaaatttaaatggaaaactaaaagagttcatcatcaatgatcaagtgaaacgtaagatattaagagcatccccaacggtgggctttaatgagtccctttaaaaagaaaaaagaaattaattaaaaaagtaagagagagaagaggaaaaagagaaatgagtccctaacgagagggctttgctttactggactaagaaacccactttacatgtggaaaaatattattgatcaatttttttatttgtaactaaaaatataaataaataataaaattatacttaaataattaaaataataaagataagggattgggaatgtattttaccgttgggtttgctctaagaaccacgaaactctttgctattattttgaccaaattctcaatggtgaaagggtcaataattctaaacatagaacacttaacataactataaagcagacacaaaattccattattattcattcattcttcaacctttattcctaaaaaaatataataaaacaaaaaacaaaaaaataaaaaaaataatggcaagagttcagctattgttatgcttcaccattctttttgcatcagtgaatcttctggacgttgtttcagctcatttgaagcttaagccaactttgcctcagattgaacctccacaaacgttgaaggatgttgaaccttacaccgttaaagtagtgatggtctttgtgtccgacctcgagaaagaatgtcccaagacaaataaatttaagactttctttgagaaactcagggcagtcgccaaatatgtttgcccaatacaaaggaaagatcaagtagattacgacaaggacatgaaggccaaggccggaggtctcgtcagggccatatcttctttcgcaattggaaaggtaattttttcttcaacgtgaagatttattatgtctaatgaagtgttttaatttactttttttttaacgtctaaacaaacattattaatacgaatctgagtatacaagatcagtgagattacagatacaaccaatggtttatgtaacgaatgatagaagaagctaattacgtgccgctttcttagtcaaatattttatcatcttcgttatatcggtcaatctttcttgtttgggaatcatctttcttgttttaatttactttatcttgcatatgtataacagataaaaaaggagattcaagaggataaaatggaagttattaatacctttaagtttatgagatttcttgcgactaaaattgtgggaagccgcaaaaaggaggagagcgaggaatcaatgaagctaacagcagaacaacaaaaagaaatcaaagaagggatcttaagatgggaaacaatcattactcggatcacaaacacaatggtatcgagcacaaccaactctgcttcttccaatgaagagtctagtgttgggaaagaagcttccagcgaaaacagcaaaagctctggtaaagaaagtgagagttccgctaaaggtgaaagtgagacatccgctaaaggtgaaagtaagacttccgctaaaggtgaaagtgagacttcctcttcaaaaagtgctggtggaagctctacaagcgctactaaagaagaaagttccgctagtcagagcagtggtgtaacagtgacacaagtcgaggaagagacgtccaaagatgtttcgacattcataatgaacctcgaaaagaagtgtccacaaaaggaggaatacaaggtcttcttcgagcaactcaagggtacaatgattgctccccccaaagaaagaaaaggtttattttctaggattaaatctgctgctggtaaactatcgggtgcgatgggagttataagatcaagaattggaagcaaatcagctgaggtaataaacaagaaattatccttataaattcgatgcaactcttattataattcatttccataattctttgtttgtttgtttgtgctatgttcataggttaagaagaatatggaagcttaccaagaacaagtgatgaagactctcgaagagttagataccatccatagtcaaattgtgagtcagactaaaggcaagcaagaggggtctttgacatgcacaccagaacaacaaacacagattaagacgacaattactaagtgggaacaagtcacaacccaattcgttgagactgctattcagagcgagacacaatcttcttcaactacttcatcttctgtcggcaaaatgaacacaaactgaactcaaaaggcatagctacattaattctcagaaaatcatcaaacaaatactttatgttataatcactagctagtaaatgtttttttttttttgtaaaataaaatcaagattggtatagggcaaccacagatctattgatcgacctatgctaggataactctgtaaaaacaaatatagattgtaacaaacattcagaagtgaggcgagctcacattaataaaagtttttgataattttcgtctcaacacaaaagtaattaagcagttataatcttttaccatatttcataattatgatcgctacattaaaaaaaaaatctacttcaatttcatttttcatttttatctttgcaatgacctaacacaaattcttccatgagatcaaccttttcataagaaagggagattgaatcaaagaccaccataataaattaaaaatactgtccaagaaaaaaatagttttgttgacgccaatgatcgaatatgttataggattgtgcttttttctatttttgcgggtaattgtgaggttacttcatgaaagaagatcaacaatctttgcggccaatttggtaagctacaaaactaagcctatgtctgagcagttcacgtaagcttctctagtggctcttcaatccaattttcaaactaaacgtgtgatttccacacttaaatctcacgtatatttattcggttcttatggttccgagacaggttctggtctagtgtaactgagaaaagctccttataaatttctgcatgtttctatttttaaccgtttgcatgcaattcatacaagtttagtaagggtttttttttggggtcaaagatgccagttttagtagttcttaaaccgattttgtaaaagctatggacgattcgaatttatctcctcggaagattgtatataaaccataatttatacgaatgattgatttttggtagtttaattggtctttgtgagtgttcttagacttttctcttgatggttgtttgatcttaaaacatttcccatgtgaagtctaactctcttatagtattatacaatagcaaaaacatgttagagattttaagagaattgaatagtttaattattttagtcaacttattttagtttaaaccttttaacatttccaccatcatacaaataaactatttaattaacactttgtaaggtgtaacactttttagcatgtatgcattatatattattttgtttaactcagtgaagtattcatctgaatacaagttaactatgaatatatagtcctgtcttcttacatgaaagagtcatattttaataccacatagcaacagcaataatattgttacatgctataatatcagagcatccacaaagacaattggtccactagtcagagatgtacctagcttatgttgagcgacaagaaatcaaatattttggtacgtacagtgatcaacatgtgaatagtaagatatgcaacccgatatacagtcatttacataactagattgatgatccataaagaccgaaaaagtagtggtcataaacgaatgttgcacaaattttgtttaagagtcagttacataataatttgcatctaaatatagattaaagaaaaatgcggatcacagcaatagaaattgccgtcaaaatagagagtgaaacaagagaacctcttttgctattcaattgcaaccttaaaccaatccaccattttctcttattcacataaaaaatagagttttaaccatctatataaaccccacctcacctagaaagtaaaatcatcccaaaaggagaaaaacaaacaaaaaacaaaacaaaacaaaaaccaaaaaaacaaaaaaataaatggcaagaatttcactagggatatgtctgatgttagtagtagcatcaagtgtgatctatgaagcgcaaggaacgttcttactaaaccattacttgaagaagaattttccaaaaaaatgcaacgagtttacgccttacgctaacaagggtatgataacgttggtgaccgatctcgaaggtagcagtccggccactacagagttcaagactttctttacacagttcaagtcttacatgtctttcatcgagacaacatcggcctcaacaaaaaatgttgatgccgagatgacagctaaatgtgacggtcttttcaaggccatgtctgcattgagtgctagtaaaggcgtcaaatcagtaagtcattaccatatatactatttcatgtgatagtaatttttttttttttgtttggttttaagtgttgtttgttttgcgaacaggcggatgctgggagtatgaagatgaccatgttgtcgatgggaaagactttggttgagcagaagaagaatacaaagataatgacattgaaggaaaagaaagagttggtcatagatatggtgaaatggactaaaatggtcgctacatttgtgaagtcggcctccgagcagaaaggaaagtctatcaatatagcatcttatggtcttgatgtcgatgttaacgatagttctattgtcggtggagctgcaagtagtgaatcatcctccactaaatctggatctgtttccagtagcggaagtgtttctaccaagtcgaaagaatcgagtagtagtggaagttctgccagtggaagtgttgctaccaaatccaaagaatccagcggtggaagtgctgctaccaaatccaaagaatctagcggtggaagtgctgctaccaaatccaaagaatctagtggtggaagtgctactacaggtaaaacttcgggcagtccgagcggaagtcctaaggccagcccatctggttcagttagtggcaaatcatcttcaaaaggaagcgcaagtgctcaaggaagcgcaagtgctcaaggaagtgcaagtgctcaaggaagcgcaagtgctcaaggaagtgcaagtgctcaaagaagagaaagtggggcaatggctatgtccaagagcagagaaacaaagacatcgagccaaagacaatccaaatcatcgagtgaaagttcatcttctagcacaaccaccacaacagtgaaacaagtcgagagtgagacttccaaagaagtaatgtcattcataatgcaactcgagaagaagtatgcagcaaaggcggaactcaaggtcttcttcgagtctctaaagtcttccatgcaagcttccgcaagcgttggttccaaaaccgcgaaagactatgtttctgcctcaaaagcagccactggtaaactctccgaagccatggcttcagtgagttccaaaaatgtcaaatcagcaaaggttcgtaaattcgaactcaaatttcttattcctttgataaaggttaaacaaaaaatcaaactatttctttgtgatatgatagatgaagagcaacttggacactagcaaagatgaaatgctgaagtgtgtcaaacaaattcaagatatcaacggtaaaatggtgagtggcaagaccgtgtcatcaacacaacagtcagagctcaagcagacaatcaccaagtgggaaaaggtcaccacccaatttgttgagaccgctgcttcttcaagttcatcgtcatcctcatcctcatcctcatcctcatcttctgctgcttctcagcagcagggcaatgcagcaatggtcaagactaattgagtttaaaggtgaagttactttattgcgcaaaagatcaccaagaaagacacaaccagtaatgccaaatattataataagtagttaactattagataatttttcttgtaaataaaactaagatcggtataggtaagcattgcatgcttataaaccgatgtatgcaagtaataactctgtaaaaaaacgttacagatagattgtaaccgctttgtatgttaacatacaaaagtgagtgatacctatgaaagggatttttgaatactcatcttctcctttcaagaaaattaggtctaattttaagatctaccgaaatataatcgtatgcatttaaaagatatgggacttaaagagtgcaacgtaggacattacaaaaatggattatgttgcgtattatttttttacttcatatgattattttgtatttttttgacataaaggtaaaattgcaaaaatgatcgactttaagttttttttccacaaaactcttatctatatggtcagtccaatttaatcaatcgaaattatgatgctttagatccattagaaaatcagcgaataagatattcgacgattacactcactttgtggaattagtgaaatagtaatatcccgaaagaaataaataacagattgaagaataaacgtataaaaaaatagaacagtttaactcattgagttggtttagatatatcattgaaactctccattattcattttaactagttttcaattgtatgtaaaagacggtttacgtttgtttttatgatgcaattgttgaagtagataatggcgtaattaaacaatttgttcgtggattatatatgatgaggtttataaggtaaaggtttccctattgatacaacctcgtattttatataactacttaagatattgggacgtgttgaccgtagatgatctccatttgagtggtcaagagaaaaataaaataaaatgaaactgtataacaagaaacatgttcttacgcgtccgcaacatgaattctacttggtgagacccaaaatctttcagtattcttcttattgaggaatatgctttttttaggaaaaaatattttgaggttgatattgacgagcatgtcatagatagactcaacgtctggtattgacattggcctcacatttcaggtaagttgttttactagcattttcggatgcaaaactcataggattatatggcttatgtagtggattggtatgtatggataggtgaacaaataaaccagagcaaatctatgcataattttaatcacaatagacttgctgtttttttttattagttaaacacatgaaaactttattaaaattattattattagaaccaagattagttaaattgatctgtatctaaaaaagaaatgggacaagccattaagaaaacatagaagactcactacatttgccaaaaaaaaaaaaaaaaaaaaaaaaaaaaaaaagaaaagactcactacattgtacaaataaatttaatatcactcctatatactttgatgatatcgcctgtcctaagatgtcttgcatctttgatataagctctatctcttacaatctagagaatatgtactagatgactatgaaaatgaaaagaatcaacaaactaactatgagctacagtgttttgtcagaaggtagatgaaatgaccatttaacctttcttttcaatttttatgtttcatcgtcatcaacacaacatcttaattctcaccatcatcaacacaacatccaccaccaccctcaacaacactaccaacagtcaagatttaatcgcccaccaccctcactccaaccaaatcaatattccctcaaccatcatcaacataacctccaccaccatcctcgacaccacggccacaagtcaaatttaatctcacaacacaaccaccactacccccactccactcaaatctaatcccccaccatcaacatcaacacaacttacccccactccactcaaatctaatcccccaccatcaacatcaacacaacttccacaaccatcctcttaaccattgccacaagtcagatttaatctcccaccatcattctcgacaccatcgccaccatgctttaataactaataaagagatatttatcaatatttcatggtatacaataaaatcgcataaattcttgcaattatgttctatatatttcatgctattcaacaaaatcacatgaaatcttgtaattatgttctatataatttcatgagattcaacaaaattgcgtgaatttttataataatgtccagatttctcaatataccatgctattcaataaaattgagtgaaatttttcacaataatgttcatatttggcaatatatcatgctattcaccataatcacattcatttttgcaataatgcctcctcaaccgccgtacaacttctctgctacctattgttctctaattctgataaaacgtagaaagggttatttggtcaatgtccctcttttaaaaggtgggtccatggttagtttctaatagaaaagaagtccaacgttattttcttaattattttacagtcaaaggttattcattaatattaccctacaatctaagtaacataaactcaattaatatcatataatctcttttacaatctaagagacataaactcaattcttatctaatactataatgatactaaaatttatacagtaaaatacctataaattaataatgttgaaactgcaaaattttattaatttagagaggttttaatttatcgataaattaatatgtactaatttataaagagattttcctaatttagtaacttttaaaaaatttctataagatttttttcattatagaaaacaagaatcaattacaagtaaaaataataatatcatgctaagaaaacaacaccaaaagttcttgatacagtaaaatactagaactaaatttcaaataagaataaatataaatttaagcaaaaaaatattagaaatatatttcaaagaaatttcttacatataatatatatatataacaattatatatatatataattgatacatttatacaacaattattaatttatgatattgatgtgaccatatatttacatagaactttcaaaataattattatcttattaatttatcgatttgtgtcactttgtacacgggtcccaactcagaaccgaaagaattttattaatttatagagattattaatttatcgagtattaatttgtaaaggttttactgtatttgttattgatattaaaatctaatgttaaataacacctcattctatctatactattaattgggaatcattgaaaattaacaaccttatgaagggtaaaatattacattgaatgccattgattgttagtgtttttaaataaattcattaaggatacaatagtaatcacaaaattaatagatttaaatataaaaaatggtaatattcttttaagcaattattagtttcccaaaattaaactcactttctctttcctattaattacggacgaaaaattaaaatttatttcttaaaattttttaatcaataaaaattgaaaaactaagatttgatatcaaattatactactatattattaaactaacattttagaagttcatttttatttttaagttttttaaaatcataacacttgcttgataccatgaataaaaaaatcatactttgtgatagataaataaattcaattttagaattttgggttaagtactttgaaatataaaacgaaaatttatttcaaaatttctaaaaacgagattagatgttacaaagatttatatttactatgaattaaacaaaaataattaatttaaagtaattatcattatgccgtacatttagaaatatcttaacaataaattatacatactaatttcaaaatattttgggttttactttttctttttttcaaccagatctttttaaaaataaatccataatatattattgaaaaattttttgaaataatgtaaactaattatacatttttcattcaaaacaaattatccagcaacaataaattgcttttataggtgtatttcaaaattttaattatattccaaaaatccaattaattatgattaaacaagagaaagaagaatattgaaaatgtagctaaggatataaacattattacatttgttcaaatataatttttttcaaaattatttgttataatgctattcatatttttgaatttgaagaaggaaaaaaaatcaagaaaagatatttgtgtgttttaatttataatatatttgtaaactttaacatcctatatattaatccccaaaactcagtcatatatacattggtttttaaaggtaagcaaataagaattttggaacgtacttttaatggaacaaaatgaaaataggaattatgagacacaaacgacatgaaaagaaacggaagtactatataaaataatttgaaaccaaactgaacatcaaattaaatatctaactggtatgagtttgagttatgagtactatataaaataaatttgtttacacacataactctgtatgtacgtattttgtgacacaaattctatttgtgatagttacgggttggtagtatttttatttcacatatacggacgggttatgggacgaagaatttgtgatagatacatcacaggttttccattccaagaaatataagttttaatttctaaactaatcaaaacattataacagtttgattactggtgtaaaataggatataaatttggttttagtttgggttctttctccgtatgagtctggatcttaaaatataactatacacgaacacaattgaatttcgattattactcttaattttataatatctatactattacaaagtttacttataacaaaatattatatatttttaaaatttattaaaaaaattatattttgtacgtatatgcgaattcagatatctaatacattgtactataatatatatcacaaaataagaaaataatttacattgaattgaaaatataaaatcccgcacatacgtgcgggtcaggatctagttactattgttttcagaaaacattacttaattgggttaatcttatatctcaacatttacaatcaaattattaaaattctacctcacacaagtcatgggttagaagaacctactagttcatattctcaaaagaaaaagtatcctttccagaaaaagaatgacaaagattaaaacacggagagcaattaacgattgcagaccaaatagaaattgaaagaaaaatatattttatagaaactttgctagtctctagcgaccttaaatcaatccacagttttctcttatattcatctaaatttagaccacttagaaatctttataaaccaattctccctcaaacaaaacttaaaaaaaaaaaaaaaaaaatatataaacataaaaaatattaaacaaaaagaacaaaaaaaatggcaaaactttcattagcattaggtctattgctactattagcattaagtgaggtctacgaagtgcaagggtcgttcttattgaggcattacatgaggaaatttcccagaaggtccagagactttcggccattcgcttgcagaggtatgttgaagttcgtggacgttttggagcttaagtgtccattaaagccacaatacaagagcttcttcggaaacctaaggtcttacatgaacttcataaactcggcatccgggtcgaaaaactttgatgccgagctaaaagggaaagcccagggcctcttctcagctatgtctgcaatgagtggcaaaggcgccgcatcggtaaagttcatttagatcttaaaatgtatttaagtaaagatcatcgtggtttgataatgcttgatttatttcattttatttggtaaccaggctgattctagcaaggttatggatacattgctgtcaatgggaaagacattgggcacccaacagcagagcggttcatcggtaatgtcgcttggacaaaggaaagagatgatcatgtctatggcgaagtgggcacaaacgattggtcaatttgttgtgagtgctgcagcaaagagcggaaacaaaattgatatctcatctttaggaattgatggcattgatgctagtgctgccggagctggagattctactgccagtggtggagtttctgccaccggaactggaagttatggcgcgggagctggaggttctagcgcttctggctcagataccgcagctggaggcactaccgcaactggaggcactaccgcagctggaggctctacggccgctggaggcactactgctagtggtgctggtaccgcaggctatggtgccacagctggaggcgctaccgctagtggcgctggtactgcagctggaggcactaccgctagtgacgctggtaccgcagctggaactaccgctagtggcgctggtaccgcagctggaggcacaaccgcagctggggctggtgccgcagctggggctggtgccgcagctggggctggtgccgcagctggaggcactaccgccgctggcggtgtaagtggaagctatggcagtagtggaggaagtgcttcgaacaccaatggtggaactagtagttgcggcacaagtgcgtgttctaatggtggtggagcctcctttaaaggtgctatgaactttcaaggaaaggcatcctctcagtctcaacaagctgcatcatcccaaacctctaatggctccagttagataagggccgacctagcatatatataaacgtacgtattaatattatttaaataagaagatggccctgctaacatattaaagcagcgagctgtagaatgttttggctttatgtatctaagcctttttctataatatgagaatattttgtgttaacacaagatattggtaatttagttttgatcaaacgggttcacgtactttttcttgactgttgtcttgtgatttacatctctgcataaaagtggtctacgcagccccagcccaacaataattagagctttagggcaaaccaaattttttggacacttactatatctttttcatattttaaagtaaatttgtacatacaaaaattgtttagtttcttactaaccttttttgtaaaaaggtcctaaatgttaagaaaaatggagttatagtctaaatgttttttttataacaaaataggctttaaaacataagaaaagtcttaaaaagtatgatgaatctgtagtcctggaatcttttggctgctgcctttttgtcgtacccatttgggctggaccgggttctatgttcttatggtatttccctcttcatcaacgctactaaagaactttactctaattgaacaaaatgatttagtagtcaaacccaatcttatgtccatttttgggtgcattagcaagataagattaatataccacgcgttgttagctcaattggtaaagaccctaggcgaagtttagaggtcgccggttcgaatgacgcttggaacgaaactaatattacatgctgtggtttcgggcctaggaggattacgggcttcggcccagaacctcctggtattcaaaaaaaaaaaaaaagactaatatatacggatgtatatgacattgagaacataaatctttggaagttgcctcttgtggtaactctcttccaaaaaatttgtataagatcaatcaaataactattttcattttagtgaaaaatctaaatcttattcttatttttattcattgcacaataaagcttaatgaactattttgtttcgagattaatcacactaaatcaatgtttcttggaaaatatgatatatttttggtgaatcatataaaaagcccaacaaagctcaaatatgctttaaagagtagggggtttacaatgatttttctagcccaataataaaagcaatcaaattacaaaactaacatccaaaagttagattaaaaaggagctaaaaactaaacccagcctttaacaaagaaaaaaagaaaaaaaaaagagctaaatatatactctgaaaacatgaatacatgatacgttgattaagtttgacacatgtgttatctacgagctgccaatcgattctcatcttgaaatcattatgagtttaataatttctgatataacgatcacgaaaataatatatatacattttgcttctcagcaaaactttatcgtcttcatcaattgttattatcaaatccttagataatacataggtaaattaaattttaaaaatatttgcattccatctctaagaggatctcgtatcgagccatgggtcacatgcataatcaggtgattgatataagctatttctatgaagactgttgaattttaagtcccaaactgcccggattgggtttggatccaacaaatagctgagttatggtggccgagttagttatatttactaattattatcgcgaggtaatataatttacttttataagagaatacatttaaactaatttaatatatatctaaaaataattttatagtgctgaattcattttgtcatcgtctcattgagtattttatgtttttattatcttattatataaagtatggttttcaaagttactaactcatacgattgtgccacatgtcaagtcaaatgatcagatgtttacatgtgtcattcaaaatttaattttttattctcttaaaaaatagaaaatcttaaaaagtaaacaaatttatatatactaattcatttactaactcatacgatcatgccacgtgtcaagtcaaacgatcagatgtgtacatgtcattcaaaatttaactttttattctcttaaaaaaatagaaaattttaaaaagtaaacaaatttacatatactaatttatatgtctatatatttataaacaattaacatttattcaacaaaaagaaaattatcaaatttgtttttatatgtgttattggtcatttaaatgtaccacatattattttcttaaaaactgatttagtatggataacaatactaattaaaaagaccattgaagtttaaaatagtaatataattttctaaacattattttagttggataaaattatatttgtcaatgtaatacaatgtttttattcgtcaaatcaaaacacaaaatattaatgaacttataagaataaaattttgaatacttatgttttattctaagaattttaactcatcgtatgatggagcgtcttgcatcttttgatgtgatactatatctatgttttattttaagaattttcactcatgtaatcataagtgaaaatagaacattttgagaaaaaatagcttagcttataggatttaacttttcaattatttttaatgagaatattttcatttattaattttacctcatttgatattaatttgcatgatgtaagattaacttacgagattaccgcatatataaaaaatatattttcaacaatgtttggttttaaatatttttgtggatttctttttttttagttaattattagcgttttggtattcgagtcaggttcggatcggctattttgggtttgggtttagaagtttaggacccgtttgggtaatttaagatttcaggtcgggttagggttcgagtttatttatatattaaaatatcaaattttgtgtgcaaatctattaaattacttgaaatttttaaaatatttccaaaacaacacgagtagttttgcttgaatatatctaaaaataaataaaaataattaaaatatccgaaaaaatcctaatattttctgtatacaagtataaatataactaatatatacttatatttgagatatgtttggatacctattcaggttcgggttttttaggttttgaagtttagaaccgctcgggtctttgaaaattttgggttcgggttcgggtcggttcttagggttggagtattatgcctaggcctattaattatgttttgttaatttttaattatttttaatactaactaggatatagatttgatatgtcataaatattattttgatatgaaaatgttataactcaatatgaagtgtgtagaatttaaatcgagtttattatgatgacatagatagttaaactgtattacaaaattgaatttgtaatatataaatttattttttctttttcttttctagatattaaattaaatatagaatgatgatcgcttactttttagaattcaaatatcattcataagattgagtttgtataattaaaatagaatggataagactgaaattttgtttaaatcaataattattaaattaaatattaagaaaaatatattgattattataccaaattctatcgataaaacttgatttttgtatcttagacctgcctaaataggcgggccttatctagtttaatataatataagagtcgtgatattactaatttatgaaattttatttgagattagtacgttcccgaattttatttgaatttgataaatacgttccagttttttatgattgatgagaaatgacgacggcaacgaaattggaaagaatctgaataaactataacagctaaatctatataataatttaataaacttcacttcaacttgtcaaactctacttatatatctaaatacaaaagtcaaattatttgatttaaaaagagtgaggctgcgagctaacaaccattagagaatatcataaaattcagtatattaaaatggctaaggggattaagataagtttcatatataaaacaaggtttagtggaggccatctaattcttgtctcgaaacagcaacacaaaataagacacatgaccagcattaccatgaagccacttagtaacccacttctctctctcttttatttcctccagattagccatttttgggacacatttgcatactacttaaatataatcactttcttacactttactttttttttgtagaaagtaaggaaacgatttaatttttattaacatactttataatttgtgtcattggtcaacacattaaaaatagggataatactacaattttattaaacatctgcatcaaaaaactaaaacgatactaattttaaaatttaaaacgctaaatcaattgaaacaaaagtactatttatactagccgtgaaagttattttcccaattaattgatcaaatagtaatgtctttacttttgacaaaaaaataaaaaatagtaatgtctttacatgaatagacttcatgttacaatcttttttttcttggaacaactagttcatgtaacaatctatattattgtttttgtcatgtcacaatcaagattcaaattcataactattgatattttatttcaaaacaaaaaccgatttcttacataaaactttctttttttataacagcgaagttcggacctagattcttgtaaacatagattcgaagtcaacatttactcccaagagaaattgaggtagaggcacaatagaataaccttctaccacaatggaaaccaatatcatttgctaatcactacattatcgtactctaagaatttctttataaaaattagaggtttgaatttataatatgattaattttgccccaaaaaaagaaatttataacacgattttccttgtaaaatatgattatgtagtgctataataccactttttctttttttttgaaagaaaagaagattttgcattttgatattagagttaaattttgatcttatgatctgtgggttacggagcctatgctttagctgcgccactctgatatatttctatcatagcacttcaatgcgatatatctttgaaggtgaatgcatacatgattaaaaaaggacgtgaaacaatatttgtacagttttttttttcactgaactacttacttatattcatatttcatatatatataacttataatcaaaaaagcatttatacaactttttcgcattaggagtatgttcacatcacgttaattagtcaaactatacatttttaataacagatgctaaaattgagggggagaaacttatttatttataatttgttgtcgttttcgtataccagcataaatattgttggagattatagcacatataaatataagcattaatcctgaaattgaggctaagatttgtatttacatatatggttgatagcaatttgattaaaattttatctgacccatcaccaaattagtggacattgattttgcttttaaaagtactaagctttactatttttctttgctacttagttcgtggctttgtgctgtatagtttgtatgttcactgaatccaaatcatgcgcaaattattaccatataattgtactaatcactaggattgagattagttgtgttattttgcatcaaggttatgtgaaaatccggaaatttactaagacagcgaattactaacaaactccaaaataaaatatgggagtgtataaaaagaagtaaaaaaacagataggagtgtaaactacttatattaaaaatagttaaaaactaaactgcaaccttaaaagtataagtatttgattaaaattttatctgacccatcaccaaaaattgatataaacttatattataattaagttaattattagttgtcaaaccaaaaaacaaaacatcaaaaacaaaaaaaaagcaagataaaaaaaaacgattacaaacaaaaatccaggtaaataccattcctacaaaattaacccagtattaatgatttcgttgtaatcacaacctaaataattgtgttgatataaaatattcagccgattgtttttgcaaaacaattttgcaaatattattattttatttatttatttatatatatatatatatcttggtatattactagtatcaatgaaatcaaagaaagtggtaaacatgacttgttcttgaaaaatgaaaaataaaaataaatgatttagtctataacattatctttcaaacccacctataattgcttaactattttcgaatcaaacggttttcgtagcttaatgagtattatctcaaattaaattctaataattgcttcgacaatgtatccaactaaggcactctacttaacttacaccaccctacttaaactacatttatttctattacttaaactactttagttgagtcaataatacgatctctgataatactcacaaatgttacgtatttcgaattcaaaattaatcgacaatgtagcaatcaattagtgtctcttacatatgacttcattctatctattttatatgtgaggttttttgacgtctttttgaaataatagttcttatcagttcatcttggaaaaaaaacatatagaacaatatcggatcaactaattaaacgtttatttctgttacattttgtaggatttcattgaataaatagtcataaattaatagttgtaaaattttgaattcctaattataacatttgcttaatttttatatagattcattactacggtgcctttacataacagtatagcacatgcacctagcctctgttaccatataggaaattaattatatttcacacggaacactttttgacagtatgcacctaccctctattttgtttttataaatcaaacctcatttgtttataataaatatgctttctatttttataatcagtcaaaccatatatatcttatagatatagtgttttttccgtcatgtttgaattgtgcatcgagttgcaagtttagggttttatttaatgtttgtttatttatagtggaaagactgttaattattactttgtagtttgttcaaaaaatctatttcgaatttatatactagaccataaatgtatttaatcaatattattattaggcattttttaggcatgttaaatgctagatgtgtaatgtcctgtttgaaaatgaacattgtgtaaatagtttaatcgcctcttttttcttttatcagctgtatgcctgtatctaacaatatatataattcatactttcatcatcactagttttaaaataaaataaaaaaacaatttgatttaactataagaaatgaaaaccgtagatgatcttaaatacaattacataaataaaaaaacgagtaatttcaagttcgaaaattagctctttagattttagtatggggcagctggaccaattttcggtcttatgtaaaattcatatgacttataggttcagggagattaatctactaaatactagtatagtgtaatttatatgcatgataagtaaaaacaatgatgaaagtaataccgttgggaggttgcatgtcgtgttccagtagtccacacattagcttctcgtaagatcgtatggagtgttagctattctcgtatatgttggtttgagagaatgtatacgtaaaggaccttgttccctttgcaatcgtaaaagctttgggggaaccttgcagtaaaaatctctcatggctaatttgattccacatccctatgtcagcaagttgctttccttcatgccgattaaatcaccttccatgagaatataccttattttattccttacctgacttctagaaagatttgggaagttttgttgaggatcattctaaacttgatgtatgctctctatcttatatccttgaaactattgttcgttagagagttacaaaagactatgcatcttcacgcaaatattaaaacggataatttggttcggaaaatcaaatccaagccgaatcacatcacttatgtaaacaacattctacaataatggctcttttaagctctaattaaaagtggatgacaaaaaaaaagactatgcaccgagacgataagttttttttctacttcaaaacccaaatcttatatccaaaatctagtctaattataattatcagtatctatctatatataaaatttactaaatttggtaaaacaattctatggaaattattttatatattagttattatatattatttcttacctcttataattccttcgataaattcctattcaaattatttttaatccatttaataaaactaaatttcaaaatcaaaaaatgtattactacatttccaaaatttattactacatttccaaaatttattctatatacataaaataagcaatttatttatgtcaataaaagaaaaaaataaaatgacattaaaagcaaagaacatgacaaaaaccagtagatatcattcctaatttaagcaatcccaaaaagttttatctgagcgtggatcacgcgccttcacattaccctcaaatatgactttgtagaatgagtagtcaaattcagagaatttaccaaattgtgtcattcaacaaaacaaaacaaagactttatacataaacaaatctctctcttaagaaaaattttctacaaacctcaaaacattcttccttcttctcctccttattctctctacgacttttaaagacagaacccagacgatggttatgatcatgaagatgtctttgtggtctctttcttaaatgatttggtttggtccaaatctctttctcgttttccatttattctttccttatagagtccaatcacaatcctctgtttttggtcccctgttttggtctctgtttttcagattggtctaaaaatccagagaatagaaaaaagatttgatttttatcacaaatctcgataataattcacaaaatccagttttgttttcccaaaatcaaatcaaaaagtcattttttttgttcccgttttaccctttttgatcatgggttgtgcgagttcgaagcatcgtaagcgttgtctccattgccggagaggatattctcctccggtggatgtacagagaagtcactcagtgcatcacgcatcgcaaaactctgaagatagttgtcacatggtggctctaagttcctcaagccttggatctctcaagctatgtgattcttcttttgggcataatcacaaacacttggcggactttagcgagaagcttgtttctggcgaatctgtgaaaactggaaatgggtttggtccgaatgttgtcagagagaagtcagataaagagaaatcgaatttggaattgcaagctaagcttatggaagcaaaggtatggtcaagtatgatgaatgagaagataccgaagattgtaccgaaaactcccattgttacgcctcctggtgagccagaaacgattaatacttgggaaatgatggatggtcttgaagatgttttgagtcctttacgatcacctaatcatgttaagagtttctcgtttgatgttggtcctaatggaggtaagtctaatggtagtgttaagccggtatggcttcaaatggaggaggaagaagaagggtttgaagattttgatcctgagatcatttcttcgtttaggaaatcgcttcaagaacttccttctgatcatccgtttcacatttcgaaccacgatttcgaattgaaaccgcggttcaatttctctgatgaggaaaaggaggaggaggaacaaagtgttggtaaagagagagtgatactttactttacaagtcttagaggtataaggaagacttatgaagaaagctgtgatgttcgggttatactaaaaagcctcgggattagagtggatgagcgagatgtgtcgatgcattcgggtttcaaagacgagttgaaggagctactaggggaaaagtttaacaaaggtgttgggattactttacctagagttttcttgggaaggaagtatattgggggagcagaggagattcggaagttaaacgaagatgggaagcttgagaagcttcttggagggtgtgagagggtggaagaaaaccaaaatggtaatggtctagaatgtgaagcttgtggagatgtaaggtttgtgccgtgtgagacatgttcagggagctgcaaagtgtactatgaatatgaagatgatgatgatgatgatgatgaaggtgatgatgatgaaagtgttaaggaagaaagagagtatgggtttcaaacatgtcctgattgtaatgagaatggtctcattagatgtcctgtttgttgtgattagttgtttgaacatacacacaagaaaagggaaccttaaaattgttctttttttttgttttgtttactaaatttgagttatgagtgcttgagggttttattgcctcttaagtttttgttgtacataaagaggtctttgattgtgaaagtgtaaaattgaaactaggaagtggtgttgtcttttgtttgaaagtcttctattcttgctttatatttgggttgactcatacatatatttaaaagcagtgtgtattgaccgtgtgtattgaccggagaaaaggagaaattgtcaaaactctttaaggggattgtattggattcaagattttagataatcatgggcatttggttatctattcagtttcggttatattcatttggttatcggttttttcggtttttaaatttaatatctattcggttattatgaaagtttggttcggtttcggttctttcgattttaagatttaatatccatttggttactttactttaaatattttcggatattacggttatattttttgatttggttcagtttggttatttttgtttcggttttggttcggtacattcggttcggtttatttgttcagtcctaattttagaggacttggtggaatttagaaaggctttcattgccacacggcccacaccaatgtaatctcattccgtccaactaaataagaaacaacaatgttcccatttagcaagatgaaaagtcgattaagattactgaatcctcaatgaaacttgacgtcttcttcttagttcgtagcgacaatacgaaaacacaatcccactactttggacaaatccatctcaactcaacttataaccctaaaaatgtgtagctaagaacacaaatccatctcaactccagggcggatgcaatgcataagtatagaggtcaattgaccctagtgtaattaaaaacaattgcggaaggtttattaacaatattaaattgaccctaatccaataaaatattgacgcttgtaaaattttatcttaagaaattatgctatactttatataatattaaatccaaaaagacttattttaactaagcctattaatataaactattctaatattaacatttatacggagttagtctcaaaatgatttaactttttcttccttatatttattttcttttcaatcttagataatgagtttctaatgacgttttatcttcttctttcttatatttgtgataatatttttattattttaaactcttaattaaaattttttttgaccccgatgaatagattttattgttccggcaacttataaccctaaaaatgtgtagctaagaacacaaaccagctatccttaaactccttgattaaaagctaagaacacaacccaacttataaccttaaatatgtgtagcgaagaagacaacccagctatactaaaaaccatcgaaaactacttgttctaattttgtattcttatgatttaatatttattaatattatactacgttccataaaactaatttataaaaagtatatagttagagaacgaattatttgctcatcttagggatattgttatcaacggcaaatatgattttcccagttttacaaaataaacatttttgcctaacaaaactcaaaagttcacttgaaataatacaatattatgatttattataaaatataaaataatacaatattatgatttattagaaaatcaacattattaataaaataatatttagatatttaaaacaaattaaaacatagataagattaaataatatagaaaacttcattactcttatcccacaaaagtgaaatttcatcgtcccttttgtaaccttttgctctcacgatatccatccattttcccatgaaataataatgaccattttggtattttactagcgttacatggtattcattcccattcacatctttaactatcacttcgacactgtttctcaaattcatgactaattcccattccatttccggaagtataaattgttcaaactctctttttggtagatgaagcctattattataatcgacatcagattgggttagtcttttgtttatgatcatagagtgatttgtttgtaaactcaactccaaatcgatattgtctgccattttataagtaagtaattctatatatatttttaatttgtttatagagtatagtgagtttgagaagaaatcccatcatctatgtttatatatagttgttgtaatgtttataattaatttttatgttaatgattaaacactattttcgattttctttttctttttcactattctcaataatttctcattgaaaacaaattacctttatttactttagatttctttttccatcaaactaaaagtgttttgaaaagaaatttttgttctttgttcatataaaaaagtttgttgattgagaccataagatacgaaattaaagatgtctcataatactactgacatgtgtgagttttaagatttactaaattagtacacaactaatactagtataactttaacaactaattaatactactcaaattatcatatccccaacatatataatgtttattaagttatttagtcagacaaattactttttttaattttacacctaataatcattttggatcacatatgtattagttttcataaacaccaaatatatataaacaagtacctcataaaacgggaacacattttcaatagcctatcactcaatttaaaagcaaaaaattgagatttgagaacatcaatcagtagactgatgttttaaaagtgatgttacatcaataatctcttgtagtcctaataaaatttaggacattaagttatttttaatttgatgaagaactaaattaagaatacttcttcataaatagagtgctaccgcacataacaactcctaacaaaacttttagtgcatttgcattataagatatttagtgtttgttttagaataccaaaatacagtaattaagagtcgacatcgacaccgagatagaaatgacttttcttttctactacatcgaagtatttaatcatatattgtaatgttgaacgaattttgtaaaagaaagcttctctaagtaattttttgtctataccaaaactaatggaaaggaagacttatttacttcaaaatgcttttattttagttaatttggttcatagaaactaaggctttaaaaaaaacctaaagatagagaaccaaaccttattataaattaagaattacaagaattacatataggttttcacaaatgcatctcttttggaatccttaaactacttgatgagactattcacacttgaccaaagttcatgtgattatcgtagaagaagaatcaagactttaagaagggattaccaaaggctttttataattaatcaaaataaaccagcagaaaaaaagatgaacaaagttaagaaaaaactttagattcagaaaaatcgtaatattacatacatctgcggttagaatacatagaatatttatatacaaaagagtcgatgtcgtagaagataaaaatggaaagtttacaaaatcagaactgatcggttacaatgcgtcttttagactgatcagttttgcgctgtaatcaaagcaatcaaccaatcagtagttcagtacaaaacatacatgataactgattggtacaatcccatgaccgatcagttggataagttagttcgtcataagattgctgaatctcctgacatgatttttgagggttataaggagagaattattgtga

SEQ ID NO: 1314 - DNA, 14842 bp, Arabidopsis thaliana
tgaataaaccgaacaattttaaccgaataaaccaaatttttagccctttattgtacactacctatcagcaagtatatatgacccaatttttttcttgaaggatcttcattatcaaattattgtagatgatttaaataagaattaaaaaacaaaaaaaaaaacaatggatgtcacaacttttactctctcctttacataatataagttgttatagctataagtacgcatattaagaatattttcgtttagtcaatcataaatgaaactgtaaatataaataattataaaatattaaaataatatataatttacattaaaacttgaaaataactaattttaaaacaacttatattatgaaacaaaaaaatttatccaaaacaacttatatttcaatacagaagtctctcggctattaagaaaaatattatgcttatgtcaacaaaacaaaattttatttagttatcatgaagtagattaaaggtttagtatcttaaagaaatatcacattggaaattcaaatcttgccaaggcaaaaataaggtataagtggtttaagaaacaggaccacataaaagtgaaataatctttaattattcccaaaggcatttcaaaaaaaaagtcttcaaatttatttctgttaaatgggaaatttatttctgataatatgataagtaaacagtatatttcaaaaaagttgagttgaatataggctttgagaacaaaaactaattgtatttattacataaatacaaatttattcgctttttaatatgacaaggtccacaactaagatttttcgttacatcaacaatttctgaggttttgtattatttagaaaatttaatttattttatctaccagtaaagttaaatgacttttattatatataatattctgtttgtgtaattatatggtcctctaattgattttcaactaggggatgttatcaagataatgctcataggtccttttttattttgttttcttataatacaacaattttttttagaatacaaaaggagtgggaaaaagatacacaatttggtcttttgattctccaaatctcaactttcttagaataagcttttccagtttatgctatcccacttcatgcataacttcgttttttcgtttttctttttttacataaagtgttgcaagacatttttcgatttttgtttacgagaaaagaaataagacttacctatcatgtggtacaaatgtgaagacaagaaccagaagattttttctttgtagcattattattgttaaattatgggtcatttgcaaaactagccatatttgataatttaattaaaaataaagcataatatacatataaattaaaaaagtagcatataagggttgtaaaaagacaattttggtgtggaataattggtgagagatgatttagtaacacttcatttagttttcacccatttttatgtttttgttatatatcttttccaaaaaatagattctaattctgaaatttatgagatgaaaatttatgtttttttctacatacaacatagtttaaattttaaaaatcggatttgtatttataaaatagtaaataatgtttgtaagtaaatttatattctactatttatgatgtatagaaataaaatgttgtactatactattttcataaattattcgtaattcaattttaagtttagaatagaacaaaatattttaaattaaataaagtaatagtggtggtagtggtggtgggatagtaatttaagttgcaataatagctacgataatcgtaagaaataaaatatagacgatctaaatgaccgagttaaaccgatatgatcatcattaaaaaactataccctaagagatacaatattgggaacccaagcaagcgtggtaaactgttgttgtgacatagacagtagcgatggtggtgggattgacggtaacaatggtgatgatgataacgattatagtggtgataacggtaaaaatgacggtggtagtggcggcaatacgattgtagtggcgacaatacggttatagcagtgagacagtgataaggtaatggtgacttggtagtagagataatagtataataatataggtgatagttatattataaattttattatgtataatattatttttttagaatagaatagaaagtacatatagaaaataaaagtaagagacattaagagagagagggagagagggagagagggagagagggagagagggagggagggagagagagagaaagagagagggagagagggagagagagagagaaagagagagagggagagagggaaggagagagggaaggagagagggagagaggaaggaggcaaaattgtgaataatacataaaatatagagaatatgattttagcattttaaaattgtagaaacaacaaaaaaattagaataaaatgaaaaaatatataaaaaagagagtgaattaattgaaaacaccagaactagtattttaagaatgttcataattcatattaaaaaatatgataaatagttttctgcaaatcggattccatcaataatttgtgattagtaaaacgactaaaatttacatcacaaaattatttcagtatattccactaaaattaatttatagcggaaattaggtcatctatgtttccaaaaaataattatataaattaaaataagaagtaggaattttgttagcaatagttacgtcaggaataattcaaattagtaagtggtgcactgtgcacatggtatatggcagttagggccataacctcaccctgtgttaaagtttgtccctaccacgaaaaagagatttgtgacttcacgaaatctgtaaaataatagcaaatatatattaatttgtttattagcataaatttaacaaattctatttggtgataacgtaaaatatatatatatatatataatgtatagatctttaccaaaatctctctccatatatattgaaccaacccttagttttgacccaaaaaccccttaattagtaaaacttattaaaaacgtaaaccatttttcttaagtaaaaacttgaacctcagattttttcgataaatttctgtaatcaagtgaattatcactgtttagatttttattctattacaacatcattcaacaaataatttgattttctaaaaccataatgataatataatccaaaattttctttttttataaaacataattaatagtactacctatttagtatttacaaacgaatgcacaacaaacaattctattgtaatataaaattcattgcatatattcattcataggtcaaatttaattgacaattcacatagaaacccagatattctatctacattatattatacatctttagatagttttatccataaatctagctaattagacaaaacgtattctctaagaattaaatcctagacaccaaaagcatactacataacatattttgtgctttctcatgcaatattctaatctaattacagttttattaatattttatgtttggtaagccgacatttattaatcacgactagtatctaattgtcttaagcctatcgcataatcacggctgcatttctacgtttcccagttagaaagttatttaaattattcgtaaagttaatgattagttccacgccctaaattaacactatatagcactttaataataatagttagatcccaattatataatatatacttatttgtagtttgcactttaagaatatcgaacacttgagcatatataccaaaaacggatagtgggaatgtaaggatgataaagaaatggattaatgaggaaattaaaatgaattatccgatgaatcttttgttaattagacaccaagataactaatcattgcaaaatatattattagaataattaatatataaaacaaaacctgtctcttttctcaaagaataaagagagatttatgaaaaggacacctagatcttagtttgatcgcatattaaattaagcgacaaagtactcttcaagataagaaaccatcaaataatattaaataattaactaaattgcaatagtttatttatgtttgggactcacattttagggttcgtttgattacctaaattgacctatagtgttgtgactaattcgggtgattagttcatataatctttccattagtggaaaagtattatgaaacctttgggaacgttacaatttaaaaagacaaaatgcttttaagataagaagccaaaaaacatattattaaaaaaaacattaaagttataaaattttcctcattagggttcattaaattaaccaaaattgacttattataacataatccaatttgttgatataaacttactttaaatggaaaaataagacaacgtcgtggtaatgaaattataataaaattggaaaattaaaaaagagctaaaagagtttaattaatattaataaaacgtattaacgataataataccagtgcttactctctatgatctaaagctaaaaacaaagcttaagcttccattattataactctttccctgcaaaacgacatgatgttttcttcttcacgacgaagacgacgaggcgtttacgtttccgccaccatcagctcctccactatcactctcaaatctcccaccaccaccgtcaccgtcgttagctaaaccgcgaactccatcatcgttactgttctcgccgccgataccgttatcgtttctctgcacggtggttgctcctccgccggagaatttgaaggagtttttgttattatgcatccaaactttgagaacacctttatcaactccgatctcacggcaaaaatcacgaacttcgtcttcgtcacgtttctgaatcttccaaccgattcgatcggcgaattcatgcatcttctctttctgatttgagctaaacttcgtcctgaatcgcttcctcgagccaggcgtggcggagagatggttagccgcggcggcgaagtttagatctgagaacggtgcggttttattattaccggagagagctaaaagcatgtaggaggaagagataggcggcggagaagatgaattaggactacgtggtaacggaggagctagcggaggaggaggatgatgacggtgatgaggctgatactcaattgcggcggttgttgttgaagatggaagaagagacggtggtggaacggcggaggaatcgtcagtttcacggcggtggaagttacggtgacaaccacaagctgcacacttgagagaagttggatcggaaggtgttgacgaaggagacggcataaattcgccgcaaccgtcaagcgcgtgaccaccaatcgccgccgcgtggttcttgagacattctttgtaagtgactttgttgttgttgtggtggtggtggtggtggcgtttgatgattccgttactgaaagagattggtttagctggttggatccgggtcggagtttcggattcgggttctggtgattttggagtcatatccattgatctaacttcaagcatctttatgtttttattttcttgaaaaaaatcaagaaaatattagggtttatgttaagcttacaaaaaaagaaaagtttgatattgagaaatgaagaagaagatggataaaaagagattaaatcaacttttgaagatcatgttttttgtaataagtttaagaaaataaactttagaggaagaagatgtgttataagatgatgatagtgaatctgctctggttgatgaatgttgctaagagagaataaaataatttaatagggagagatataaaaatgttaataaatgtgaataataaatatatttaaaataaaaggacagagcttgaagatgtttaacagagaaaggtagggtttgatgatttaactatggttaaatgtatggttaaaagtgggacctgtaatagggagtggggaaatatatatagagtaataaatgtcttaaacctaaagacagtccaattataattaatattctcatgcattgtgacacttcttgtttttttttgaagttggcttctttttactttattctaatatttgttccttctgttaaaatatgtttagcattttgtatatttgactattacaatgtaattaccgaacaactttgtaaaagtttacttatactattaggtattattgtaaactaaatagttgtttttcacaaaataatattaaaaaaaatacttattctgttttgttgtttaaagattttttccaaaataagtattgttctaaattttcaatgtaaaatctataaagtatgaatcagtttggtttttaaaatataatatatattaataatttatataaaaatatttaaaacgatattattatgaatggaggaaatatatgttaccagcaggtaactatattgaaaaatgaataatctcaaataaattcagtggttatcatttgaagtcattcagccacctttaaaataaattcagccatcatcagttaaggggttgattggttctccttctactacatgcaaacgcatcatttacatgtggtaacaattgttagtgattgacaataatcatataaatcgcgggatactgctcggatcgctcgatatcaatacatttcaaaaactccttcccgcaaacgtttgtagttgtggatggtagcggttgaattaaaatattaaaataataataaataatcaacatatttgtaattaagataaatatatataattctgtatatatcttttcatatttgtatctaatcctatatattatatttattttggatcttttttatttatttaattattattgcatctagtcataagatttctgcaaatgcatctattttgaaacgttaaattagtcgtttaaaacgcttgaaaccacaatatctcgcttccgcaaatttccgcaaccgcaagcgaaaccacagccccgtccgctgcaattaaaccagtcatgtctttagtcatatgcagttaaattcttcggttaccataaatagatcctatatcaaattcggtcttttgggtttaaaactaagacctaatgtctaaaaactaccgtcattcaaggtcatagactaaaatctaaattagtatcggaacttactaaatatatgtaatttatatttattatttaaaatattcaaattttgatgattctctgtcatgtgcggtggtgtgtacaaacaatcaagcaaacgccatgggccaaggccaatgtgttcgtaccaagcgaccatcgccgagaaaaacgaagtcggtggccaaagtttcttctgggcgatcacatcaagagcatcacaacttgctccttctttcgaacaagcaaaatacggctaaaaccaaaaaaaataaagaaaaacatttcagaacaaagccaatgatgactaaaccatagtgatgagaataatcactatacaaatgaattggcaaataagaaggtcgtattgtacgcatgtttttggattctgaaatcacaaattattttccaacgaatgattgcatcattggaccgagaaattcaacctatcgatcggtaaccaaacacgaaaaatatgatccttcgatttttttttttaattatctctcaatcggttcgtacaccaccatcaaacatcagttaagtggtacgtgaaatattaaaccacatattacgtccgatataacaatctttgccttcttcgttttttgtcacaaataaattatgtgcatctatgtgtattttgaatttcgtactacaaatatttctgtacatggattagatatacagattcggtgcataaaaattatggttaatgatgtctattatgagaataagatgtatattatgttggggactaagttttctttattgttttttttgtttgatgataaagaattattctattttcttggtcgaaagaatgatggaaccacatttttctagatcaggaatcagattatcagaagaagataaaacaatattttttttttgtacgtttattagctataatgcattagtttctaactgtggctattaacttagaccgcgagagattaagaacatatttttagctgacccgaaccaaattagtgatatactgtaaaacgattttggacaagtttcagtggcccaatggactatattaaattactatattactccatcttagacaatttttattgatggtatcttaacataactattaattaaaaaatatgtcttatatctaactaaagtgttttaaagtcttttaaataagagatttttgttagttataagctattataagacattataagacatgtctcttaatttaaaaattattttaaaaaaccattaataatatactcttaaaaagataaataccatttttgtctctctacacgaggaccacctgcgtattttttttttttaattagttgaaaaatatactaaatagactagtgactagactaatagtcattgtccaaatataatttaaaaaacaatcattttattatttattattttaaaaatagtcacctttcactatttttttgtacactaagattcatacaatttatttagtgtgtaaatataaagaaatatacataaactagtttcactattttttccacttagtctcttccaaaatttgattccattataatttttttttccaacctaatcttttatttcctgattatatatatatatatatatatatatatatatatatatatatatatatatatattcattttcacaattcattgtaacttaagtttcactatttttattttatcttttaacgatgtcttattttaattttgttttggtcaaaaacatatagtatgtgagttttaagttggataatgacacaacgatttcactaacaccaacattagattgcatattcttatatattttaaatttcagatttttgttattattaaatgtataatgttttggatggaagattttgcatagttggaggtcgatctactctttttctctcagcctttgactttcttgtgaatggattttgagttagttgtctggataacctcaaaaagctagaagactcacgattgacgcatgctttccaaattgtattaaaattagataaaaattgtatttatcattatataatatttttatccgttaaatgaaaacacaaaatatttgaaagagaataactttataaaactgaatttttgaatacctgatgagaatattattagatttatatttatgttttattttaagaattttaatctatataatcataagtaaaaccaccaaaaatttggaaaagtggcatatagaaattatattgtctgttttatttagtatatattgtctgttttatttattaaacttaagtcatttaaaattaaactgaaatgaggtaaacttaacttacaagattaggtaatataaaaaactataatttaaacaatgtttgttgttaattatgttttgttatatgttaaatttttaaatattaactaagatataaatttgatatgatatacgtattgttttgataaaatcatagcacttatccattaagataaaattcgtagaatcaaaacaaactttattatgataaaatagatagttaaatagtattgtaaaattgaatgtataagactaaaatttggttttaaaaaatatactaaattaaatatagaaatagagtgtagattactttaatatgatggagtgtgtataattattatgaaatagattgataaagtttttagaaaattgaaggaaaaacgtgtataacaaaatagaatggtaataattgaaatttgatttttaaaaaaataactaactaaaatattaagaaaagtatgaattactatttagaattcaaatatcatcaaataaatttatatttaattcttacaaacgcctaattagacgaaccttatctaattttaaccgtttgagatattgttttcattgtttttgtggtttctaatgaaactttttattcttttgtagatagtttatatttaatagtttctcatatgaaaaaaatcatatgttttatggtatctaattaaattgtttttctataatatatagtttctagtgaaattttctctccctctccctctctatgtaaagtatctaattgaatttttcctttactcgtagatatttagtactatatgaaattgatacttaacttaatgtttttgttcatcattttttgatataagaactcgtctcccgcactaaattctggaataatgggtgctcaagcggtgtctctaaaggttgtaggagacaaagccgcgttctatggatgtgggttatatggaaaacaagacacacttttggaccaagaaatatgactttcttcaaaaagagttttttcaaatcatcgattacttcatatctggtaattggagatcgttttgcaaggttaaaaaaaagggtattatcaatatgtatacatagaaaattacaaaattaagtgtcagaaaaagctactgttgagccttctctctccatcatgaaaatacctttatacctctatatcttatttgcttttgacattaaatattttgttaccttttaataataatgttatcatcttctcataattatacaatctttgaaatcaaatcgttggttcaatagctggtaatttgtttatatcgtcaactgtattattaacatgttaagtaggtttgtatcttaagttttttcatccatatatcaaaaccccatccatatttcgctagcaatattatcctgataatacattatctgctaactattctgatgcatgtattttttttacatgattattcagtcgtaagttattttgtttttgctcttcatgctaaatattttgttaccttttaatagtaatgttatcgtcttcgcatacatatgtgtctttgaaatctaaacattggttcaataactgaaaatttgtttatatcgtcaaatatattattaacatattaagttggtttgtattccatgtcatttcatccatgcatcaaaccccatccatatttcgctaacaatattatctcgataatttgttatctgctaactatcctgatttttatcatatctctttgtagggatatatttgtcatataaattttagttgaaaaaattacctaaataaatgatcttcatgtatagatttttaattatttgatggtgcatatatagatttttaactcaccctaaaaaaaaaattgtcgttattaatgttttgcatatagacttcttacatgtaaataaacaaatccaaaccattgcaagattgcacaatttattatgtagcaaagaaatatataatcagacgtattacaacaaatacaaaggaagtattaatagagtgaaaactatttggttttgtgaattgcaagataaataaaactatttgtttttgcgaattacaagatatatgaaagcgcaagagtgtagctcggacgtgcatggaaactttatacaagtgttatcttttctaaaacatacatgtctagagttatttttagatgtttttaagcaaatgttaagcatcttttgtgcaaatttcttagaaaatctatgaatacttaaaccatgttaataattgataatgcaaaataacttacaaatatatttaattcagaaatataagaagaaatgtggcttatcaaaaatgaaagaactttatgattaaaatacaaagagaatttgtatggttttaagctttcacacaaaattgattagatgtttatgaaatcttaattttcatagcacttaggttactaaaatatattcttattgtgttaattagaatttattttgaaggctctttattatagaaaatatgaatgaaatttacctaattataggaaagttctttcaccaaaatttgcattatatgcaaaaatgaacttcaccacatagcaacttaatgaaatgattatgactagttttaataggaatattggtgtttatgtagcaaacacacaattattctcatctttttattatttgtttataaatatatttaattctactatctttatttttaatattctgaaatataaccaaacacatagatactgaatatatttaccatacatattcttttaaaaatttcaaataattaatcttcagtataaatatttaaatgcttgagttaaaaaaaaagattgaaatcttttaatttttgcgaaattgttaagaacgcctttccaaaactacccttttttaactatgccctctcatttatactatcttttaatttttaataactattttacccctatttgaaaatattttacgttaacaaaatgaaatattaatttttcctccaaaaatattttgaagataatttttccgtcaaaacaattttctctcaaaaaacaatttgacggaaaatagatttacacagatttttaaaagatttacaagggttttagaatcttttaaaccttcgtaattctttttaaaaccctttaaaaacattttgtaggggtacacaagagtattaaaatgattcaagaaagttacaaatgatttaaaatatttataaattattttagagttaaaaaataatttactaatgttttcaaagacgttaaaagtgttttaaaagaaatttaaatggatttaaaaaaggttttaaaatccttgtaaatattttaaaatcattacaaatctttaaaaaccattgtaaaaagttttaaaatagtttatcagtgtttttaacatctttacaaagtatttcaaaacttaaaaataaatttacaaagattttttaagagttttaaaagaatttaaaagggttttatccatatctaattatgccaaataagaaaattaattataatttgaaatcatcatggtaaattggtaatataattgcgttaaacatccatcagttgcttatattagttttaatattaaatttttactatgtttgaaactttggagattgtgcgctaaatttggtaacaacagttatttttgattctcataaataacacaaaatttagttttgttaccacattaggcatttagcacataatctccaaaatttcaaaatagcagaaacttaatactaaaaaaactaatataaacatttaattgatgtttcacgcgatcacattctaaatttctaaaattatgattttaaataagaattaacttacttatttctttttttttataactttcttattttacataattatataagggtaaaataattattgtaaccttattgatgctacaaatttgtgaaatacatatgctattaccgttcataaaatttgttttagtggtattctagagtatatatgtgtagaaaatctaacaaaatatttggccctaagaagaaaaatctttttgaaaatagtatcttacgatcaacaacaacacaactattaacttcttattttctgacaatttgctttacttacagctaaacgacaccggttcagttctggtcgtaataacgacacaactatccgaaaccgtactttgatttccgcgatagttcttctaatttgactaatatagcctcattagtcagctatatttacaatcaagcccctgagccgtgttgttttgacttttgaacctctgtgcgcttcttgtcactaatccaccagacacgaccaaatatttttagtattttgttttatcataaactgaaataatgattgttaatgacgataaattaatattttaaaacttgtcaacaaactacgtaatcataattaacacgcaaagatttaaaagtgacacgtattagtaaacttcatccacgacatcatccttatagtttagaagctcgccacgtaaattaaacgatcttggaataatcattacttgaaaagtcaaaaccccaaatttttcttctaaattttcgaatcggtttcagcaaaatacaaagttaataaattgtaataatgtttttgataaatcaaacctggttgataagtaataattaatgttattacagctcacaagttgactaagcaataaaagaaaatgtttagttttaaatttaaatagatgataaagacggaacataaaaacgaggattctcttttattattttcttgggtataagaatcatgaattgcatggttggtccgtaataaagataaagttttgttggcttttattttgcttgtaagcataagcatgtggtcctaagaaatataagaactaataattaatgggatttaattgaaaataaaaactctaaacagcttactcttgtttatgtctttccgttaactaatgtttattgttggtgcaaaagaaccaaaaataatgtttattttgtataaatttcataatttttatatatattttattaattgatttggttagtttaagtaggaatatgtcgatatgttatataatcgatttttcccgatttaagtagaattagaccattacaccgtccaattcgaatttgaatgttttctgattaatgttatgggttagtcagtccgcttgcacttctaactagtaggtaaactagttggaccaaaacccaattgataaatcatacaaacgcacttttgtttctatgaagaatcgaactcggatttggaaatttcacctttcaccaaagcttcctctgccactaaatcacaaaggctttgacaaaaaatattgaataacattttatttacggtgaattatgttcattaaatacttacgatttaatttatgacaatagataaataaaaaacaaaaccttttttacggttttccatttttaacgtgaaagtaaccgaacatataaactataacgaatacatttaaattttgaatggtaacagttttttttttttaatacgaaatttagattttgagagttttaaatttcaaaaataagaagaatttgagaat

SEQ ID NO: 1315 - DNA, 15145 bp, Arabidopsis thaliana
cagtagaaaataatggcccatgtttgttttggtttactcataaccaaacattgtatggtttctttggcttattaataatactgaaacatcagtgacaaaaaaaatagtaggaaaaactgagaacccaacgattttataggtaattcagttatcaaaaattcatccaaaataaactgattaaataatcgtgtttccctggtaatcgggtgatttaatatcaaaaattcatttgaaataaaccaaacaaataattgggtcggatcagattttggtttatttcagtttttgaatttctgccgaactgaaccaattttttgggtttctcgggctaaaaccaattatactcggttaaaatcagtttaattttggttaatttcggtaaaaattttgtctaaaaaaaaataattcggataaccaattggtaaattttgtcggttttttgaacataaatctcaatctttcctaattgaacggaatgtcaaaccaatttctaccgataactaaaaaactcggtttggttcgggttggtacaatcgagtaaacggcatgcctacgatgaaccaaagtttatattcaaatcaaattttgtaataatctgaatgtacataggttttttcaatagaaaactatctaaactgaattttggcctaatgcaaatctagctcaaattttgtgaaatttaattattaactaaaattcattaaaaattaatagtttgggtaattacattgatgttatcattttttatcgctttgaatctattgctcttgtttggtttcttcttgtgtttttttttcccttttatttacattcatttagcctttgtacatcttatgtttcatggcgagaaagtataactttagtcatttttaggtgtgaaagtgcattggaccgagatagatgcgtagaattgaaagaagagtgaatggaagcacgatgccgaccaagatctcatccaatgattggccactcattataaagtatgggagattggaagtggtcatggaaagaatgtatgtgaatttgaaggttatattgagctacaagaatctcagaccagctacatcattatagagggatttagttgttggttgaagagagatttaatccgtgaagtaatcccaaacgaaaacgactggtcccatccaacccaactaaacgactgattaatatatcagcgaaaggtgtcagggataaattagtttgaatgaccacccttgaagctttttttggcaggctggtcaatatccaatttgtcatattagttagtccaatctgatttggccaacttttcatgtgaatacttttttttagcaacttttaaaccttgatttggcgtttatgcttttattcgttggttttttaagaaaacatttgaaacacttcatgagttttgcttatttttcattcatgcttgttcatccattatgtgtgattagtttctttagttggtaataggttagataaaatcataaaataggatgtttaatggttgattcttgatgcttatagctaactattaatttctcatttttaaagtgtacccatagctaaatttgacttgatctctcttagatatatagatcttctagggttaaatataatttaatttctcatgtttagtggttaattgatgtttatgctcattgttctcttcatccaaatggacgaaagaaagaaatctttatttattattgttagtatcgagagccgaacttaacaaaaacaataaaacaagattgaaaacaaaaccaacgagctattggcctagtgataaatctctcaagtggaggtgttgtgttcgaggcacgttggaagggatttcttctccaaagaagatgaatttaatctggtttgtgtcctacctctgaaaaatgtagggcttttaaatttgaacttccagatatataaaaaaaaagattgaaaacaaaagatctttattcaacaactcaacattcgaccgttacaaaaatttgccgagcttacaaattgctaaaaactaaattataccaaaataagtcggaatgccgagcttgattacactctcaattatcagatatcctttattgacaccattctacctttatttatagtataatgtgatgagtctaggtcttattctcgatcaatgtaagatctctctttaaggaggctatgctcatctccttctagaagataggcccatctttgctcttttatgcgatggaccgaacctcattgacttctttttacttttggttgactttccatgcccaccaattttatttttttatatatttttttctctaaaactaaactaaatcagacccaaaccaaaaattctgaactgaattagactatttataatggcctattgaaaaaattaattcaatagttaaatgcttacaatgggatattgaataaagaaatgaattctaactagatttaatggtgttgaaccgattctgttgaattgttaacaatgaatccctcattgccacttgtcattaaataattggagacagaaattgtggagagagttaaatatagataggacatgtgttattcttttatttgttactgaaatttttgatatatttttttttgaattattagagatcaattatcttataaaatatttatttgttttaaattattttaacactaaaatttatcatttttcaaactctataaataaagacttgtttcatttgatttggacacaaaaaaaaatacatctattttcactataaagttttgtaattttatttgttttgataatgactatctctatttcgtctttatttttcatttttaattaataatataaaataaaaagtaaaacaaaaaataatttaactcgtaattattttaatttattttcaatcggtaattaatcttaatatgttatcacaaatttaaaacataaaagaaaagaaaaataataaaataaaaatggtggggtagggtgttgaattttattaaacaaactattctaaaggtataaactttgaatgaatattgaattattatgtggaagagagagaaaaagatgtggaagagagagaaaataatgtagagggtgctcaatgaaaagaaccattgttttatatacatgggtttcctgaattttccaacctaactatttaaaactcatcgttcccccatacttttttcctctgaaaaaacaaccatcaactttaatatttctgaaaaaacaaatttctcactaaaccgtgtcaaaccacaaattcgcgttacgattatccacataattacccacgacccgtttcgatatgacgtcgtttccttcattggttttattcccaaaattacccaaaaacaacgtcgttttcttgagaggtgatttgagaagatccagcagcctacaatagaaggagaaagataaacatatgacatttacaatgagaaagtaagacatcaataatattagaaaatatacatacctctacaccaatttcttcttgattatttgtctttttaccgttaccattcttctcacccttcttctctttagggaacttcttacatcttgctgcattgtgtccagcctccttacatgatttgcaatgaattgtcgccgctttcctgcttagcttgcgtacttctagttcacccgacttcttcttctttggtgattcatgtttacctttgacccggtcgaaattcttcttctcacctttctttctgccaggtggaataggtgcttctggtacggttatcagagcatagccagtaggccagtacatttggtctctaacaggttcaggcgttgtatcatactgctctttccaaataaacgtacaaaacaatggtataacataatcttcaacattcttcttctcatacatgactgctgcataagcatgttcagatggaatgcctgtgattggccacttgcagcatgagcaatcccatgagattgctcagtcgtcaagttcacatggttagaactaccatcaacccaaacctcatacttgccatgtgttcttttgtaacttcacacctcatagcatcctcttcttccttggccagaatatctgatacatacttagagacagatttcttccatcttctaatcttttcctttctcttacttatatgtgtcatagattttcttcttattgtttccatcattggaaccaatgccttggccctagctttgacaattgtggcattaaacgattcagttgcattgttgtccacattctcacaaaaactctcgtgcataaaccaagctctacaccaattctttggttcctcacgcatgacatcttcatacaaaggcagatcataagctctctgatgattcaagtttgctcgatattcagcctcactgtaactccaaactaagtgccacacatgcttcttcaactcgtctttatttggatgccgctttttaaggttcttaactatatgcttgacacaaggtctgtgttcatttggtaatacattcttgacaaaacttataattccctacaaaaaaagccacaaaaaaactcaggttcaagtctaacacgtactaacaagcactataataacatattccaattcaaaagacactttaactaacacgtaccttgcacctatctgatataacctcatagtcactgccatctttcaggttcaagtcttgcttcacctgattcaagaaccaaagccaattttctgcattctcggattgaacagttgcccacgccacagggtatatttggttgtttgcatcatgaccaatagcagtaaaaaggcaacctttaactgcatgcttcaagaaggttccatctatccctatgagtggcctacaaaggtagaatgcattcttcattgctccaagacatacgtagatccggttgaatacatgattccctttggcatcagtaattgtatcaacaattgcagttgatcccttatttgagctcatgatttcagcaacataccctcgaagatgagcaaattgttgctcatattcgtctttcagccacttcagagccagacatctccctgtctgaacttgtcctatactactcaccaacttccactattctttgatatgcctttgaatgttaagagacatgtaattaggctgcaacctcagcttgtccataaacaatcttccaatcactcgactcttcttttcttttttttcgcaaacaccatttatattaaattatcgggaagagagtctccgctagagaaagccattcaggaaccgatgtgcttacatgggaaaaagactatttcgagcctgagcttttttagctagacaatgtgctcaagtattagaactacgaggaagaaatctaatatgaaaagaaggaaaaaaacaaactaaagatcgataggaagccaattccgctgcgaatgtcggccaatcatcttggttgtcaatgataaaaatcaggtctgaacaatctgaagcaaaagtacaagaggtatcgccaatagagatcatgcatcccatagtccataacaaagagtcaaatttcgcatgaagcggtgataagcttcgacgagcactcttgagaccaagatggaggactaagtcttgtcgaacaagatcccatccatgcccgcttaaagggtcatcggcatgccaggaggcatcaagttgacattcagggagcagggtgagcggggtctgagaagaacctaggaaagggattatggtataggtacatcttcttttagagttgcttgtttccaaacagttgcctcttgaagtgccaaagccaaagtttcagggggaggttccctgaagttcttaaaaataaaacgatttctacttttccagatataccaaagtatccgtggaaagagttccaacacctcctctccgattccaaattctcggccgcgccagaaaaagaaagtcaaaattatagaagatggaatttctagggaagatattccctgaggaaagaataggcgataatgcccaaatatgtcaggaagatggacaatgaaaaaggagatggttgattgtctcttctgtttctccgtaacgagggcaccctctattcgtacccatatgacgataagtcaaattttgacaagtggctagacaaccaaaaatacattgccaggcgaaatgcataagcttccgcgtagttttaagcttacatacttgtgcctgaagtaccgaaacacctggtccctgaaaaggagggtcacaagtaggacgagatagatctctcgtgacccaatatcctgacttaacagtataattaccgaatttagtgtgagactagctaaaaccatcactcaagtaggtacgacttgggcgaatccataaaatgagtagaatatcaaagggatcgatcaaggcttggagacggtccagtttccacatctttgtgtgtttggtcgattaaatcattgacatagagtattgacgtagagtagaggatctcttatgtcaagaatgctcttagctggccgtgcagaaattgtgagaatccatggatctttccaaactcgagtcagcattccagatcctatagtcctccgaagcctcgagacaagaagcggtttagctaccattatactcctccattcaaaagacggtcgatttgatgctcctacatgcaaagagtcgctataacgaaaatatcttccctcaacaccctacttagaagagagttcgggaatcggattagtcgccagagttgcttagctagtaaggctagattaaattcttcaagtgttctaaaaccaagaccaccttcagagtgtggggtacaaaatttttctcatgctatccaacgaatgccattactattttcattaattttccaccagaaattagcaatggcactactcagcttggaacggatagctttaggaagtaaaaaatacgacataacatatgtcgaaagagctcgcactacaaaatttatgaggatctctttgccacttaagacaagaatttggctgaccatgtatttagccgtttttgaagtctatctcgtacaaatgattacacttaagttttagaaccatgaattttctgaggtaaacccaagtaagtccccatacctgacagtattgtccacgtcatggccaaacattacagatgacttagcagcattgagctgttgtcttgaagcctcgccataaatgctgagaatattgataatctcttgaccctgagatggatctactttgtagaaaaaaggactatcatctgcaaacagtaaatgggatgtagatggacttgcacgagatatttgaaggccttgaatccgcccattccactctgcatctttaaggtttgctactaaaacttccgtacataagataaataggaaaggggaaataggatcgccttgtcggatttccctcgttggtttaatgaaaccccttggtgccccatttaggaggactctatacgaaacttaggagatgcaaaaaattatcatgtttacccatttctgcacaaaccccatctttaacatgagtgcacgtaaaaatgaccactccactcagtcataagctttactcatatcagtctttatacccataaacttatttctgcatgccggattggtccgtagagcatggaagttttcttgggctataaaaatattatctgtgataagtctccctgccacaaaggctgattgagtctcgaatattaaatccggaagaatttcttgagacagcaacttaatacttttgaaataaccttgtagcttacattacaaaggctcactcggctctttagtagactacattgtccattaggaatacaactatgatcaagacatatggtcttcaaaacccacatctgcagatccgaattatatgatcagtagacataccagtcacaacccttcttttgagcacacctaaaacttattttatccttctcccacctattttgcttaatgtttagcctattcttcatagcataatgtaacataacctctttgaactcaaacccagtgaaaaatgttttacctataactaacttatcacctgatgccaacctaattttcctatctttagtgaccacgggatcctaatctgcatcacaactctctggtatttcatcacgccgaatctgaaactcatcaaaccaatttgccacggcttcctctatctcgaactcgaacctctccattatgtcttcttcacacagatctttcgtctcttttctccccgatttcttctctctttgccttacttcagaatcaacatcgtccttctcgccttcatgtcgtttcctgttccttcggctttcatctccatctttctcacccttactttcattgtcggagtcgtctcctccatcattgtcactatcgccgtctccctcatcgccgctttcactttcactgtccgccgtttcgacctcattccactctccggaccctcaaaatcaggatcatctggatcgctctgatacactaaatcttcctcgtgttcataactcgacgaagccccataccagaatgacataatttcaaagaaaacccataaatctcaaaaatccccctttctctctagaaccctaatttttcaatcgatcgaacaatcgattgggtttggttttttttgggaaaacaaaacaaaggtgaaacgacgtcgtttcaagaagaatcatgattacttatgtgggtaatcgtaattgtggaacagtaaacgcgattttgtggttaaacccgctttaataactagtttaattggaggcatattttctcggatgaatccaaaaatatacaatatttgtttcagaaatattaaagttgatgattgtatttcacgaagaatatacatcagtttataaataatttaggttggaaaattcaaaaaaccttatatacatcagttttacatttttttttttcgtccagttttaccgaacttactgctatgactgtaattaggcaattattaatttactcatataattatcaaataataaattacgcttttttaaaaaaaaatcgttttggtaattttgcaattaataaaacccaaagataatcttctctcccctgactctcgtttcctctctctttctctcttcctttacagagaaagcagagagagagacaaagggaaagctaaatccgtgacccggatccgaaataatcgggttttcaaaatctaattcctcttatcttctctcttcttcttcttcctgggttcttcccaaaattcaatttcattaaaagggcactgccctttatcatgcctaaaattctcaggtacctaatcaagattcttctttaaattcctccacattgtgttcggatctattctaattccgctacgtatgaaacatgatcgtcatagattcgtaaagtttgagtcttttttttttggtagtgtctgattatttgaataaagttttgatttttatttgatgattctgtttcctgttttcaacgtttttttctcattgatgatgttgacgttatgaagtcatatttttatgtttaagatttgtatctgaaagtgattgaattttaccaattagtgttggttttgttatttgagaattctctgtttgagatttttcttatgagtatagtttttaatattgagatttgttgttgttgttgttgttgttgttgttacatgttattgtgtcccacttactcttttaattgggtacactttttgagctggctacattattttatagttgagagattgttttattgtatttgacttggttgttgattcttcaaaacttggtcccaatgttagtaataagacagaatgaaacaactagtttctctatgtgggtcttaactatctttatttgaaagctgtgtttatatgttgcagatttcttattcttatacttacattacatgtttttgttgaacaggatctaaataaaagtatagaacaatgggtggatgtgtgtcaacccattcaaaagcgattaggcctaggaggaaaggccgtcgtagatcttccaaacacttttctaaagtgtctgatattgttcctcatgctaatattagaaggcctagtgacgttgggagccgagtttcttttggtgagtgtttctgtaatggcttatggtagatcatataatggtgattctgttgatgattagagtagattttttacctttataagttgttttgttgcagctatctcgcaagatgatgcatggtttgactctgtcagtgttcttgattcggatgaggatgaggactttatcagcttacctgaaggtaaatgttaatctacattcttttcagtattcatggagtttaaaagatcatttgaagtcatatacaataagaggaacaattttggtaatgttgatgtggatgtgaatctcttttacaatctctcctagcagaaaacgtaccatcaacgccatcagcgggtggtgcgactggtaacaatataccaaatggtcaagtagttcagtttgaatcttcttcgtgcttcgtggatggtaaaggaaagtacgaagaataccatgagacttacttgaagatagacgggagtaaagccgagaagtttgtgtcaaaagggatgtacaaggatccgagtggtctctctgttcttactggaaacaacaagaagaaactgatggaccatgcaagctttaaaggcttgaaggatccaaaacgtaactctcaagagaaaaccctgagaaccagcctgagccggttgatgccaacagtcagttttaatgacaagactctaaactcacccacatctcagaaacgaaaatccgctgtttatcggctttctttcaaaaggaggtcgtgtgatggtgaggaagttactgagcaacgtaagttgttgtaccgtccaaaagcgggattcacaattccttcctcgggcagagaaaagcagtctagcggaagttggtctgagataccgccttcaacttttaaactccgtggagaaacctatttcaagtaaacctatcaccactctgttttatgtatctttactatatactgctttgtccgtaactcttgaagaatgatgtttacagagacaaaaagaaatccccagctccaaatcagtgtccatacactcctataggtgttgacttgtttgtctgtccaaggaagattgatcatatcgcccaacacatcgagcttccaaacatcaaagccgaggcaaagctccctgctcttcttgttgtcaacattcaggtaaccaccactcaacattaaccgcttcgtaatctttgtttgtggactaacttttgcttgtgtttttcatcagaagctttattagcgtttgatatacatatatgtgtaaatgatcttgacctttgtacctcactggcagttaccaacctatcctgctgcaatgttccttggggacagtgatggagaaggcatgagcattgtactttattttaaattacgagacaatcacgaaaaagaaacctctcagcaatatcaggagagcatcaaggtagcttgaaaagccattcctttatgacattcatcacatcccatgactgatctaaatgcttaccgagttctttttgttttcggtttcaaaacagaaacttgtcaatgatgagatggagaaggtaaaagggtttgctaaagacagcaacgttgctttccgtgaaaggcttaagatagtagctggacttgttaaccccgaagatctagctctaagctcgactgaaaagaagcttgtacaggcttacaatgaaaaacctgtcctctctcgtcctcaacacaacttctttaaggtttgagcacaccatcactacctcttaaacacacaacagaagtcacctaattaaaatttacttttacctctctccacagggtccaaactacttcgagattgatctggatgtacatcgattcagctacatatctcgaaaaggacttgaagcattcagagatcgactaaaaaacggaactcttgatctcggcttaaccatccaggtaacttgatacaaagtctatatgcaaaccggactagatcctttgttcttgaagaagataaagatcatgaatttggaacatgaaacaggctcaaaaaccggaagagctgccggaacaagtcctatgctgtctgaggctgagcaagattgacttcgtagaccacggtcagatcccaatgcttttgatcccggaggatggggaaactcaagtgtaaaccaatccggaagacaaaaagcaaatcagaaattttccgtctcgccattatttcatcaaaacaatgttgtatattttctatattatgtacatctatctaaatatatatgtataccataacttatataatggtcatattgcaaaacacttgaagtcatcttcttgagtttgccatttgttgtaacttgcaactctgttacctcaattatatcgtgtgttatttatgaatgtgctgaaatatcatttgtttatattatttgttgtttttgacaagtacggtttaaattattgaatgtttcggattttcagtttttttttttttttttggaatttactcaggtatataatttctaatttctaacattttttaagtgttaaaagaatcagcttaatatatataatttggtaaggaacaactttaatgctttaggcattaaaattcaattctcatatagatatcatttttttacccaaccatatatacatttctagatttttttttttctagtaattttgagttttcattaatcaaatttatgatggattaagaaaaagaaagatagatatttgtatatgtttttggtatgttttaggctttttaaatgcactagaatttaacccacgatagcgcggctatatttttctttaaaatgtaatatatattttttaatgtaatattatgttttttaaagattaactgaaaatatatcatattaatttgtatttttaaatgtagatatctatctttgtattatttagtatatgattactattgtttaggtttcaatttttgaagtatagatacgacaaaatatatttttttatacatttaaaatttcaaatattttatccataatatactgtggaccgattttttataactaaagtttttaaatttgaagttatatttgttttgttaatattgaatgtttttttgtgtttaaggttgtataattgtattttgattgttaattttaggatttcatccgtgatatacctttctttattaatatcgatcaaaacccgtcattccatataaattcgtctatattatctcgttagctaaattattagtgttataaaatccaagaaaataaattcttattattataaatccaataattttaggatctcactcgtggtagacggtcccttgaatgattttaaatttatactactaatacatattttaaatttatcataaaaagtatatgatttcaagtttttgtgttttttatttgaataaagaaacggcttaaatgatgatagatttagtttttttcttgtatggatatatgacttttctgtgaatattttaattcttataaattagtatttttgttgctatacaaaatgttaatagaaatatttgctataaattggatttatgcatattttgtggagtaaaattcacagattttattttgaagatatatggaaagattgtgtaaatatttttagaaacaaattaggcaagatattgtttggttaatatcttttttaaattttgtaaaactaaataataaatgttagtggcattctttgtaaataaatccaaactacaagatttatttcataaaatgactgaaaaaatgtatatgtagattaggatcatgttatatgtatcgtgtcttgccggtttggttacttaggaactcattctgaagtagtctcattccactataagggcatctccaatggttatcttcaaatatttcttcaaaatcaaaatttctttaaatttgaaggtaaaaatgaagcaagccttttccaatggtttcattcattttgcactttaaaaaaatttattctaaagtatattctatctctattttattattaattattgatataccctttactttctaaacttatgaactttaacccatttgtttaataaatagcaaatagtccaacaattttatttagagtacattattataaagaaaatcacattacataacattaattaaaaatatatatttatgatacaattatacacatataattctcccacaaatgatctttaatgcgactaggggtagggatggacgtttgggttcagatcgagtatttcggattcttggtttttcggatttaaaggtatacaacccgttcagataattttaccgactcggatcagatattttggtttatgattcggattacccgaaattcaaaaataaccaaatctatccaaaatactcaaagtacacaaaatatctaaaaaccttgaacatttactacccaaatttactcaaaaatagattaaatacccaaaaatatctaaaatatccaaaaaatcctaatattttttgaaactaaaattattacaaatataaatattaataatatattattattatgtacttaacttatgggtatgttcatatatccgttcaaatacgattcagatcagattcagattcgaatttttggatttgaaattatagaactcgttcggatatattaaaatttcttgtttgggttttgcatcaggtttttcggatctagttcggattcgcatattataccaagaataacgtagaaaatgccttatttattttatttaataaaaaaaattagatataaaagcccaaactaagaaacatctgaaaagaccaaaatgtttttaaaaagcaaactgaaacttggggccggagatgtccagattgaacattgaaacattgtaactgtgtaggggtgaataacgaaagaagagataaatacatggctcaaaatgtaaaaacagataaataaaggggtggattcagaaataagggaaagaagaaggtgtatataaaaccaagaaaccctagaagaagaaaaaacaaattagtgcctgaggccgagcgcttccctctttagtgaggggtggcgtggtataccacgagaagggattactgtggcgtaccctaaggggtgcgtaggcgcatatcagagaatcagggctctttctctgctttgctgtttcctttaagctttaggctgtcaaagcagagacgttctttgccctacattttttgtttttc

SEQ ID NO: 1316 - DNA, 19652 bp, Arabidopsis thaliana
ttattgagaatctcgacctcttgaatctatcttgagcctggatatacctcaaattttgcccaatgatgaacaaaaaggaagcaagcatttcttcaactgaaacattcattgtatctcttaaacccatcttcacttaaaatatactgcataatttcaggaattcttctggatacatgcgatacaaatgtcgaaaatgatcgcgatcttcaacaaacatattttgtatgtattcatgcccaagtctagtagttggaaacttgtgaagcaaaatatcggattttcgcaaggatagacaaaaccagtaataaaaccaaaattttttgaaaatcacagtttcaatacaccccccttattgtttctatggataatttttatcaccatatttcatttaatactctacttcacagttttaacatggatgattttaatcaccatattttatttaatattttattcaccatagttttactaatgttgagatacatttggagtcccttgggataacggagactataaaggagaataattcttcgacggcccaagaaaagacaaaatcggtgatcttccttataagacaaatggatgaaagtgtcatatatgactatgcacacatgagagatcctaaagaattccggaaatatttgaaagatcgtttcgatcaccaaagggacatcactctcccacttgcccgagacgaatggcaaagtctaaggtttcaagactttgacaaggtaatgaactacaattttgccaagttgggaattgtcgccaaactgagatattgtggtgaaactatcactaaatctcagatgcttgagaaaacgtacaccacgtttcacaaaaaccacattactttgcaacaacaatataggttgcgtggatataccaaattctcaaatttgattgtggcactcttaatagctgaaaaaaacagtgagctcctaatcaagaatcacatgtcccgacctaccggatcaaaggcattccctgaggttaatgcattggatgttaaaaatccgcttagagaaaacaaaattttttggggacggggcgccgaagctatcacagacgtggaagaggctttaatccacaaaccaggaagtcataccaaaagattcgtcctgagcatgaatcgaaaggaaaagaaatccaagcaaatacttttcaaaaatgtgacagtgcttgtttcagatgtgaccctaaggcacatcggtatcaggtatgccgaactccagcacacctttgtgctctgtacaaaaaatctgttaagggaaaaggaaaggaagtgaaccttgcggaacattctgagggtacaacccaccttgatgcttctgactttgctaatgatctcgatgaggttgtccttgtggaaaactgaaatttctatcgtgtggggctcgaattaatatgtcataaataaatcgacgcttgcttgaaatttcctaagtttgtgtgtttgtattacctatcatgtgtaattattgtgtgcttgtgttacctatcatgtataattatcgggtgttatatgcttgattaataaatttattttctacttaccttaatcgattatgtttatttcagaaatggatcacattacaaatggaatggtatccaaggcaaaccttagagatatttgcataccgaatagtggaacaacacacactattctaaaacaaaaaaaaaaattctctcatttgaaatcaacaaaagttattgttaacacaatatcaggtcccatagacttaattgaatggaccggtaaaacaaattttgcattacttaacgggacaaagttctcgataaataatgcattatttttaccaaattcaaaaagaaatttgttgagtttcaaagatatataccttcatggatatgacactcagtgtgcaagtgagaatgaaaaaaagtacatgtatatcacttctgaaaaattgggaaaaagacacgttttggaaaaattaccaagactcccatcaggattgcatcatacatacattaattcaataggatcacatcttgttatcaaaagagatcatgatgatttcacattgtggcacgatcgccttggtcacccaggcaccacgatgatgcaaaaaattataaaaagctcacatggacattcaatgaaaccctaagagttttatcaagaaaataaaaggacatgtgttacgttttctcttggaaaattgattataaggccatcgacaagcaaaatcgataaagaattaccaaaattccttgaacgagtcaaatgcgacatttgtgaacctatacacccaccatgtataccattatattatttcatggtaatgatagacatgtctagtagatggtcacatgtttgtttgttatcatcttgaaatgtggtatttgcgagatttctaactcagataatcaaaactaagagctgagtttcctgattatccaatcaaaggagttagattagataacgttggtgaatttacgtctcaagcattcaatgattattacatggtaacaagaaaaaatgtcgaacatcctgcaccccatgtccatagtcattcgagggagagcttgtatgattatacttttttaccttactgtggtttctaccaatggattttattagaaaagttttaacgagacaacatgaaagatatcgcaaagagataaatgacaaatgaactctggacgagaagaatgttgcaaaaattaaagaaatatttacatattaagtccatttgcattttatctatatacactcatatagataaaaaaaaaacaacgtaaagtttcttttattattatttttctttcgtgattgttctttttctcatatttcttctttttaatatatttattattattctttttaaaatattaaaaaaattgaattgataaataacttataatacaaaattctattaaattatattaataaaattaaccgctctgtgttttattttttcagaggtttacttaatcttcaataagcgtaaatgttttggttggtaatgttattatgtttataaaaaaacaactaaccaagtttttacgttagaaaatatcaaaaacacttttggaaggaaaacttgggtacacgattgaaacgacgtcgtttatgaaagcaaaacaaaacccagaaagtttaggtctcgccggaaaaatcgaatcaagcatcttcttctttcacgtacgaaacaaaaagctcagagcagagtcgaatcggtacgaatctttatctaaatcactctgatttagtttcggttattgtgaaccatttgattgctctgtcctttcaattatctatctaggttcgattacttcgttagctgcttaattctgtgatcaattatctcatttagtgattttgattttagggttttctctttcttcctttaatcttatattgggatcttctgtatcggataaagtcataacctttgagataaaggaatcatctttattgctgaaaatgattgagctttaggtctaatacaagtctgagagtctgatttcgattctgagtataaaaattgaaactttctatttagggttttcttaatcatttgtgttgctatggttgcttaatgtatcactaaatcttggtcttattagttggttgctactgatatagaattgcatctgtgagtaaatttagctcaaagataaaagagtcccctttatcgctgaaatgatcgagctttgagctctaatacaagttaaagcgttcgaataatcgattctgatcataaaaattgaatcttgctatatagtagttgcttaatcatttgtgttgccatggttgctcaatgtagcacttaatcttagttgattcttagttagaattgcatcggtgagtaaacttggctcaaagataaaagagtcccctttatcgatgaaattgtcgagctttgagctctaatacaagttaaagcgttcgaatatcgattctgatcataaaaattgaatcttgctgtatagtaggttcttaatgatttgtgttaccatggttgctcaatgtagcacttaatcttattagttgattcttagttggaattgcatcggtgtgtcgttgggattgtctttgaaggattaatatgtgttttctctttgcttatgaagcgatgaagcatcgagttcggtgttcatgaaggtcagagagttaagtattagcagaactggttaggtcttagtgacaaacaaggtattcatgttatccatccctgatactagaatgtggaatctagcatcgagttatcttacgggaaacattggaccgaaaaacgatatcagaagaccggtccatgctcatgcggagtgttcagatgacgatgtatcttctgtaggtagtaaagacgaaggtctcgagtgtcctatatgctgggaatcatttaatatagttgaaaacgttccgtatgtgttatggtgtggacatacgatgtgtaaaaactgcattttgggacttcaatgggctattgtgaaattgcctactcacccggttcagcttcctctcttcatttcatgcccctggtgcaaccttttgtctttccgtctggtcttcagaggaacactcagattccctcacaagaactactttgtgctttggatggtcgagaggatgaatggagagagacgtaactcacctggtggagctcaaacagatggaaacaatgatcatacaagggaaactccatctccatgtctccacaatcgccatcatcgcagtcaacctgaaccatcacgttctgttaatgatcatcgcattccaagggacaacatacaaacttcactgaggaagtctctggttttctttgtccagttgacagcaaagttcccattagttgtcatatttctgctgataatactctatgcaataccgaccagtgcagccatattggcgatgtacattctagtcactctcttgctggctctaccgtcgtttctcatcctctacttcgcttatccttgtctcgactggcttgttcgagagattgtcacatgaactttctaaggatgcgttcagaaacttcccattcctaatttgacgacttttcttcaacaactgagacccaagatcggtcatgtaagtataacaatttcgtaattaccgtcttctttatctatatatggatgtagttttggattgcattgttgctctacgaagctggacgtatgtgttgtaagggctcttgcagaaacttattagtatttgtggatttgtttgtgagtgtttgagtgtctcaataagatttatgtatataaagtttatgcaatgttatttaggaattgcgtaactaaatgcattgatttttcttatatataatgactaaattgtatgggtttttttttcttttgtttgtttgttccacccatttccatagaagaaagcaaaagatgacacccaaaattaggggtgggtgtacggcttttcggtttggtttcggttcggttatttctcttttatgttttctatgagttctagtctagatcatttgagcttaaagcgttaattgtgttctacgatatgaaacaaagactcaaagagcattcaaatatgatgtatacacaaaaagaaagagttaagctgtcttagtttatgtgtccctcttccaccgcagcaaaatcaagcccggaaatcttcatcggtccaatgttaactggcaaaaaccccggtgtgttgattcaacaaaacaagacaacataaatgtaatgagaatggcacaagaataaagtgttggttttacttactaacagcatcaagtccagctaatttgggcataaactgtctgatatggtcctctgctgcttcatctgccttcaatgtctcacactcgaacgaaaccgatactttcttcttcccgtgtttttcttcgactaatcctatcacatcttcctcccacctttccaaagacaagtagtcatattcactaaacataggacagtaaaagactctcacaaaaaggttttcaaattcaactcattcgaatgttttctccgaaaagctaagagcataacagatacgagaacaaggacaacttacccgtgagcatgctcgacatcattaattcgagcagcatcatggcctttgcactccactacaactgtttgttccttctttctctttttcaccaaaagaaaccaaggaacaaactcaatatcatggttttggaaattaagagttaagaatcacaaaaggaagtgagaaaatcatacattgtagtctatgatagtgagtttgatcaaccgataatcctcaccgcggctacactcagtctcacaagctagttctttaaacagagaaaagcaacatcaataatacaacaaattgcagtgaaatcaagcaatgtcatgtcaaaattgccacagtaactaagccattggatctttatcaatcattccagtatcaatagatgtaactagtgcaagattaagtctttaatctgaatcatttacatgcttgagaaccaaacatttctatcaaatccaagcaagaacacaaaacatctaattgcaaaacagaatcaaactcaacaaagagaaaagaccacatttttttggtttgccctagtaagaagagatttgaagttaccagtgccatggaggccataacagatagagctaggcatctgaatgaaatgaccagagatagtcccacatggtaacaaagctattgatgctactccttccttcacttctccttcttcatctttcttcttcttcttctctatctctccttctcttccttcatctgcaattacaccaattcctttacaacaacatcattcaacaaaaaagaaacagtttcgaaataaagccagaaacttttacccattgttgcttgagagagagagaaatcgattctttaattcactaccaaagtgttcggctttagggtgttttcaactacttaaaatcgagaacgttttaagatccttaagcgacgtcgtttctcttttcaaagcttaaaactacgtcgtttactctctgtctctgatgtatcttcttctccttcctcagccacagaacaagctttgattcatcatttctgcgaaaagaacagagctttggcttggtttcgtgtcttaggtactggttcttacgtagcttatgttctttgtttaaggaaatttaggggttgtttgcttagacttgaagtgggtattactaaagttgtcaactttttgttgaataggaaatggtttctcagatttcgtctgaattatgctaaaagatcaagttctctctgctcggtgttgaaattggaggtgttagagattgctgcgtttagctcttcactgtattatcatgggagctgtctggttgagtcatgtctctcaattggtttgtggatgttatttaattgagcagagctcttgtgttttgagaacttttcattggtctttgagtcactcattgaactttacattgaccatgaagcctaaacgaaggcgtctaggtgtaaaaatggagtctttttctttggcaacaccaaacatgtgtttcaggaaggtgagtagtgaattagacagttctttcaacggtgaaaatgtggtttgtggtttggaactggaggagaagactgcaggggataggaataggatacattttctagaggagcggaacgaagaaactttatcgaagaggcttcggaaacttagcaggttggataaagtcagaagcgcattggagttgtttgattctatgagattcttgggtttacaacctaatgctcatgcctgtaactcttttctctcgtgcctcttgaggaatggagatattcagaaagcttttaccgtctttgagttcatgaggaaaaaggagaatgttacagggcacacgtatagtttgatgttgaaagctgttgcagaagttaagggttgcgagtctgcattaagaatgtttagagaactagaaagggagccgaaacgtaggagttgttttgatgtggttctatataatactgcgatttctctatgtggacggataaataatgtgtatgagacagagagaatatggagagttatgaaaggtgatggtcatattggaacagagattacatattctctgcttgttagcatttttgttcggtgtgggagaagtgaattggcccttgatgtgtatgatgagatggttaacaacaagatatctctgagagaggatgcaatgtatgcgatgataagtgcgtgtacaaaggaggaaaaatgggatttggccttaaagatatttcagagtatgttaaagaaagggatgaagcctaatcttgtagcttgcaatactttgataaactcgctgggaaaggcgggtaaagtcggattggtgtttaaggtttacagtgttttaaaatccttggggcataaaccagacgagtacacgtggaatgcgctgctcacggctttatacaaagcaaaccgatatgaagatgttcttcagctgtttgatatgataagaagcgaaaacctgtgttgtctaaatgaatatttgtacaacacagctatggtgtcatgccaaaagcttggttattgggagaaagctgtgaagcttttgtatgaaatggaaggttcgggtttaacagtttcaacttcatcatataatctagtgataagcgcttgcgaaaaatcaagaaaatcgaaagttgcattgctagtatatgagcacatggctcaaagggattgtaagccaaacacgtttacttatctttcgcttgtaaggagttgtatttggggttccctttgggacgaggttgaagatatccttaaggtacgagttttctttatgtttgttactcaaatgtgtggtggtttggaagaggtagtctaatgttgtttgttttcttgaacagaaagtggaacccgatgtatcgctttacaatgcagctatacatgggatgtgtttgagacgcgagttcaagtttgcaaaagagctgtatgtcaaaatgagagagatgggtttagaaccggatggcaaaacccgagctatgatgttacagaatttgaagaaacaccaaaaataaggttataattgtacgttatctactcatacttatttgcatttgccaactgccaagtatcataagtcaaaattcactaaaacaattggtctgtaattaggcattgtatgcatactcactgtgatgaatgttctggtgatggtgatgtttgtttgataaatgaggttgtggacatagatcaaaggttttggcgatgacatagctcgtgcccagtttctaacattggatacagatgtttggatccatagatataaggctgctgccccggcactacactagaaagctagatctcattctcaggcagtgaggtttgtgtgctgataattttgtcctcccgtcatggcacgctcaagtagcgattttgaaacactagaaaacagaatgtgaactgaatcagtgtaaaactgtaaaagaaaacatgaatctgtctttcttttgaaaggatgttttgttcaagaaacagatgataacttttgtcacaagcaaatcaagtttaatttaagcttcttggcttatgcaacacagatgctaatcctcctaactagcttttagattcctcctctcttctcatctttaattaacttcaagctcgtaaaacagagaacacttctcttcctcttatgttctgcgcgtacactaccaccccacggagagagttacaagatgagtagcttgtcgaaggtgataatggcaacatcaacggtagtggtagtgagcttagttatggttttaagcttaataatcttagtcctactagccgaactctactcaacatccgcatcaccacaaacatcaaccaagtcatttccaccatagacacaacgcccttgattggtgacttacaaatcggtttccaatgccgttgcaagttgcgagttgctttcttcactaggttcattgaaaagaaaacagaaaaactccttcgacactagaaatgcgggaaaacggtcaaaatcaaccctaactatttccatgcatcctttttcaatctaaactctgactccatgcatttattaacgagaaaaatgtcgaaaaaagcgccaactttcaaatttgggacgaaaaaaacatgaactttcgaaatgtcatttaaatcctaaactttggtttgactttataaaaaaatggttaagtttcgtcgactgggacattttatgcataccgtgaaattttcgttaacagagataacggagttaacaaacctgtaatcattagccaaacccgaactagttaaactcaaaacccaacaactttgtaatcccagttagtttttattttctttgtcgagaataagaattagggcaaatcgcttataaaactaattaaaaccctactttagactattgaatcattttctctgccgtgacagaagattagagaaaagaaagaccatgcgtttgcaaagttataactcaaacgaattggtaagttctataaattttcttataattttcagtagttttatttgtttgtagttctttttaaaaaataagttcttaagctaattgcacaagtttagggtttctgttcttgtttagaagttgatgaagaacatgttcgtttccaattgtaagaatgaaacgaccattgattttcttataataatcgatgatcatagttgctacattgatttatgatttgtcaaaagaaactcaagatcgttttctactatgataattaaatcaaaaacgataattatgcttgtttgattctctaatacttcagatcgttttctgctatgataattagaaggttgattggtgttttccatgtaactaatatatgtatttttggtaatcgtgactttatttagatgtttttataatctatgattatacttttatattataaaataaaatcagactcctgataataatttgtatgatttattataggatcttggacaacaatattggaccactattcaaatcggagataaggtaagacgtaaatatttaactagaagtttatgttaattttatggtcatattcttccttagacaaaaattagaaatgcaatgaagtgatttaacccatcttagtttaaaaagtatggcaattgtttagagtatagtattatatgaacagacaaaaatatcttttcgcggttatgatgagtcgaaagaatttctaacagaaaaaaaaattagaactagtgaaatctacatgagaacataatttttttagaaagcttcgaaaaataacaagattgtttttctcgtgatttacaaagatattataaattatgatggtgaggaagtagtgcaatccatcataaaagatattgatcatggtgtgtggtatgttggttgatgagtttgtttatgtttctagcaaagaacaaatgattgttatgtttcgatttggagataaaagtggaatctgtcaaatgaaattttattggagtcacccatgcaaaaaaaaaaaagaagtcttttttatttgtgaagttttttattatcattaacaatttgtttgcaaattaaacttgaaaacagtgagagaaaaagttataatagtgcaagtactatgaaaaatgagtataaagggttatgatcattggttgttagtgaagataattcagtttattatatctattgttttggtcatctattctaattggttgtagtggcacaaaagtgatttttcacttctatcatcacaactaactggatgggcaaaataatgaatatactaagctgagctgttttatgtgacaacaaattatcttaaccttttaacccacttttcatattacttgctccattataaccttgttccttcatttttttcatgctcaatctatgttttgcaaaaaatcgtcaatgacaaactttagagataaatagttcattttatatggatgactccaataaatctttctttgactattccacttttgttaagaaaaaaaaaatagccattaattcatgcaagaaacatcagcaaattcatctacccatggcaaacacatacttcaccaccaaaaactatctttctaaataactaaagaaacaagcattttccaaaataaccttacttagcatacttatgttctcttgtgggattgactagctagttctaaaaaagtcctctatttgcaaactctttcggatcatcatgactatgcatcatttccaccttgtttagttatatctaaataggaacacaaatagatgactttatctacttatatattatacccttgttagttaccatactgtttaaaccaagctcgattaaatcacctcattgcatttttcaaattctttctgaggaaaaacatgtctacagtattaacatagatctcttgttaaatgtttgcatcttacatcatttttctggtttaagtggtagtccaatattattaactagattctgacccgcacatacgtgcggggtttcatattttaagaaatgtgttggaataaatttttagtgaaagatataatagtatataaattataatgtatacagaaaaatgtatagtgttatttataacacaatagctaatgttgtgaatctgcatattacgcggttgtaagtattatcatatggttttgataaaagtttgtatttttttttgtgttagtgaattatataatagtatatatctcataaacttatcacttatcataatatttgaaaataagatcatgtgtggaagataatgtaaaaaattggcaaaaagttttatttaagattttttattttttttggggttagtgaattatataatagcatagatatcataatagtaacatttcattggaaatttttcttttgtccttagaattactttggtacacacgtttattttatgttttattagttataaaacttgaatagaaatttaagttatttaaagatttaacaatttttgcatcatttattagtattttatttatcataaatagtttggttttgctgcataacaaaataattttaacagtttcagaagtctaatagttataaacttataatagaaatatatatttgtgaaaattagattttaaatgtgtaaaatttctatgcaaaattatagtttatcatgacccggacgtacgtgcggagtttcatattttcaaaaaaatattgtaataaagttttattaaatatagattattttgttattttgtgatatatatagtagtgtataaattataatgtacattgaaaagtataaaatattatttatgacacaatatctaatgttgtgaaccgtacaatatctatagtctaataataaaaaatatacaacacagttaaattggtgctcgcaaagaagaaaaacatcttcgaaaaatgatcgcttgaatggttttcacaatttctgaaatttgagtgaatatcatggaagcgtcttcaactattttttatgaaaacaaaaaaggtaataagagtgagttaaaaatctatacatgcactatcaaataattaagaatctatacatgaagatcatttatttaggtaatttttttcaacaaaaaactatatgacaaatatacccctacaaagagatatgataaaaatcaggatagttagcacataatgcattatcgagataatatcgttagcgaaatatggatggggtttgatgtatggatgaaatgacatggagtacaaaccaacttaatatgttaataatatatttgacgatataaacaaatttccagttattgaaccaatgtttagatttcaaagacatatatatgcgaagacgataacattattattaaaaggtaacaaaatatttagcatgaagagcaaaaaaaaattgacttgcgactgaataatcatgtagaaaaaatacatgcatcagaatagttagcagataacgtattatcaggataatattgttagcaaaatatggatggggttttgatatatggatgaaaaaacttaatatacaaacctacttaacatgttaataatagagttgacgatataaacaaattaccacttattgaaccaacgatttgatttcaaagatcgtataattatggaaagatgataacattattattaaaaggtaacaaaatatttaacgtcaagagcaaatatgatataggggtataaatatattttcatgatggagagagaaggttcaatagttttttttctgacacttaattttgtaatcttccatgtatacagattgataatacctaggtaatatttcatgggaaaagaataacgtgtaaaatgatcacatcagaaaccaaaaagaaaaaaaaaattatttcaagaaatctgcaaaagtgtaataggataagaccgttatgtgattttatgtataacatgaacataatctgcaaaagagtgatatctcaatgaaaaggtttccaatagattctaaaaaaagtagaaactaacaaattatatgaaaatggaaaagacatgaagaagagtacaaaagtaaatatagagatatggttcatcttttagtttgcgaaagaagtagagaaaaatagttttatagttaagtatattagagtgataaggttttgtttagatttttctaaaagttatactcataaaagtttgctcatctaaaaccataaagactatgaaatcaagtttattaattaattataatttttcttttctattaaaaacgttaataagcaatttacgattttcaaaataaggataaaaaaacatcaatgatatatctttaaaagaaagtaagatacaaaaaactgatattgcaaaaaagaaaaaactatttgagttatcttaaataattttaaattctttgacatatattacaatagtgttgattttactatatatatatatgtgcatttgttaggtttgatatattaaggattctttaattatataaagcaatgaattggtttttttcaatttcatctagcaatctattattttaaacatgaagatcatgactattgagtactatttttatttgatctaattatcttttacaataatgaataatatatatatatatatatatatatatatatatatatatattcgttagaatattattggtttattaggtattgtcgtattgataagaaaaaaatattagaatatcttataaattaatttatttttaatatgttaactctaaaattaggaaatttttattaattcacagatttattatgtggacattaagagattgaaaggtacctttttaaatgttttaaaaattattagtgtagtttaaggaaatatattaaaatctaaaatatatgatgatattaaattgattttttcgtttccggaaatatctaaaaatatattaccaaaattgaataagtttctatatatacaatttcgaaattaatagcttaatttttatgaaaactaaattcatttaattagtaatagttaatttactaaattacccatgtaaaaattcatttagttagtcttaaattacctttacaatgttgtagttcacaaaatgcttcccaattaatagtatagatgtaagacaaaaacgctatctatgttttgttcttgaaacaaatgattactttcttcacaaggtaaccaagtttaatgtaaccttcttgctcaatgcaacacaagatgctagtatcatttacatgctttgagattccttcactcacttaaccttctctgaaattacaataataccctcctcatcaattgtgcaaattctctttttcaaagctcgtaaaacagagaacctcgtgttcctcgtatccaatccttctctctctgcaacaggtccacatactctgaaaaagcaccaattttcccgccaataaacaaaacctgcttctttagttcttacacctaaaccactcttctccttctcctctatgttctgctcacacatccccacacaaagagttaaagatgaatagctcctcaaaggtgataatggcagcaacattggtaatggtagtgagcttagtcatggtcttaagcttagtcttagtcctactagctgaactctactgctctctcttactccgccgccgccgccacaactccctcaacctccccatcaccaccaccgtctccaccgccgcaagaaccaccacaactctaaaccaagccatctccacaacaagcaacgacaacacttcaccatctaacatcaattcttcttctcctaatcctctctacacaggcgttattcaaactccaaccaaaacccattataaccatgaaccatatttacaagcttctcttgatctgattcaagaaaccattgttaacgattctgtagacaacttcatctacatatcaaacccaatgtactcgaacgacgctacaagtaaaccaaccacaccatttgaaacccctgagtcttcaccgtcacgtcttgagaccggtgagtcatcatcctcttcttccggcgaagaagataacgatcatataatcgaagtttcaacgccaacattaactccaatgaaggatctacctgaaaaggcatgctctgtttcactaaaaaatgtggaaacttctgctagtgaatcaaactcgtctggttcgccgtatacttcaccgtcgtggtagggtttattgtaatttttggggatttttttgtctttaaaacatttatgttttgtttggagtgttcttggaatgtgtttggtttgtggacaaatggctcgatgaccaaagccacgcttgttttcacagagtttcctctatctgtcgttttctatgttctgattctctgtcctttatggtataaaagctgttttacaccttaagttagtattataatgataactcaaaagtaggataaagctacaaactttagctagttgtgaaattttctttatggtttgttcgaagtttaattctttgttgttgactccttaattatgcacattgcacataacactcatattaattagttaaaaaatattgcaagatcaactttcatctataaaaactgctaaaaaaacatcaatactagtatgtttgaaatacattttgtacaggatggcttaaaatatcattctagatttttggtaaccgacccgttaccaaatatacttcacaatttctttttggatcagatcataatatatccaaaattatgaagtggatatttcatatttaataatataaaaagttagaagttttggtttcgatttggttttgaattatcatatgatacataaagtcaagaaaaatgtgatttttttgtatacaatagacatatattactcaattaataaaaaaaagtgtgtaatcaacgtctcatatcggctaaactgtttaaaaatatattcaaaattatattatataagatcaaaatgaatccaaattcgaataagcatgaagcttaacttaacaaacatctaaataacaaacatttaaatttaaaagtttgtatacgagttaattcggtttttaattaaacaatttaattttaccataaaccacatatggctctaccgatgtattgtcccatgcctagcaaccatacacactgggtttgaacctttccctgccagatccgaccatcactaagaacctggagcaagaagaccatcaattcggtttgatggaagcttaaactttcagtgtttccgaggagtcatgaagctcaaccacatctccgagaaacaatctccacgagcaccatctaagtacccgagagtactatagttaaccaccgtgacttgcaacgaaacccaccaatcccctcaccatctttttcgccgcaactacaacaactatcttgttggttaagctacgagaaaaaccgacatggactcaccttctggcttctggcgtcctcaatcacatgcagtccaaacaagggttctcctcacaccacctgaacaaacaaggccacgactgcatcaaatgaagggacaaccacacctccgctatcggagatgataaacttgctcacttctgccttcacttagcaaagccacaacttgcatattgagcataatcccaaccctacttgtcacccgaaccagattccaagctacatgaatcgaccttaaggaaaaggccagcacatcagagaagatttaccagaaatcgaccactggagcatcatcgaagggacgcgcccgaattccaaactcaccaaaggcaacaaaccaccggagaacaacaagcaccataaaaaattgcaaacccagcggaaacagccacggatcaatgctgtgaaaaagcaaaatgtttgaattgattttagccgttttctcgtggttacgcttttctttgtttgaaattttaaattgctttactttcatgcttttaaccggttttaatttgactaaactcttgtaattatttttttatttttttgttagttaattagtttaatatttccaaaaatgaaaacctcattaagcattttgcttgggttgatttagccatttttcattttttttgtagcataacactcgtgcagaacacatccggtttggttcgaccagtcaataagacgaaatgcgtgccgtgtcgtaataaacaatgagcactacgtgacgtttctttgtcttcttcttctaaaaaggtttcttattcacgggaccgatttggtcaaagccattttatacattcgatctagtagtcacgcgactccgccgtcgattacatggcttctcaccaccaccacaaccataaccacgtgtgctcacgccaccaaaaccaccacaataacacccctcaattcgccacgtcaccaaactgctgcaacaaatccaaccacccttctccgccgccagcggaggataatcttctccatctcgtcgctacttacctccaaaatcatcaacaagaaactcaatgctcctgcgagacttcttgtcaaaacttcaatgttattagaagtcagaaccgtgttttgcgtcagcataagaatgttccacgagaatacgaccaagttgttctgtcttgtcttctccgcaaaatcgatgatcttgaatcttcactcaacaagttttcatctttctatgacaaacgtcgagatcgacactcaacactaagagattcggcggcgcgtgttattcaaacccatttccgctcttaccttgttcacagatccatatcctttagacaactcaaggagcttgcaatgataaaagctagcttcttgtctcttaaatcttcggtttcggggaaactcattttccctttcaaagttgtttctcggaaagctacagacttgcttcttcaactggattcaattcaggtattaaactctttgtgaatccttagaatgttctgtttatttagtttctcagatctttgatttagtatcattttgtctctgttagggtaggattgatccaatgataagaagtagtaagagatcattgagcagagatttggtgaggtttgtgcaatatgttgatgattgtgttgttaaaaggtatggttttgttgttaagtctggtagtggcatcaaacttaatggcaaaaagcctcagggttttggtacttctagtgaggatgaagataacaatgcagacatgagtgatgatagtgaagaagttccagtgagttctattgataagagaaaggttgctagttctaagtctagaaccggggttgtgatagaaggtgatgtagtgaagcctccggttatgaaatttgttgtattggacaagaacaggaatgtgtgtcaggtatatggaaataggcatgatctaacttcgagtgcagagga

SEQ ID NO: 1317 - DNA, 77589 bp, Arabidopsis thaliana
gatctttgatttagtatcattttgtctctgttagggtaggattgatccaatgataagaagtagtaagagatcattgagcagagatttggtgaggtttgtgcaatatgttgatgattgtgttgttaaaaggtatggttttgttgttaagtctggtagtggcatcaaacttaatggcaaaaagcctcagggttttggtacttctagtgaggatgaagataacaatgcagacatgagtgatgatagtgaagaagttccagtgagttctattgataagagaaaggttgctagttctaagtctagaaccggggttgtgatagaaggtgatgtagtgaagcctccggttatgaaatttgttgtattggacaagaacaggaatgtgtgtcaggtatatggaaataggcatgatctaacttcgagtgcagaggatgattcagttgatggtgacgaggaaacccttgtgatgtccagggataatggaaggaagcagagtttgaaagctaggaacggggtttcggtgaaaggaggtggagggaagacaactcgggtggtgaaaactgtgagttttgatgagaatgggaatgtatgtaaggtttatggagatacacatgacctaacttctagtgcagaggatgatgattcagttgacgttggagaggaaaccctcgtgatgtgtagggatgagggaaagaggcgtagttcgaaaactgggagcagggttttggtgaaaggaagtggaggaaaaacaaaccgtgtggtgaaaactgtgagctttgacgagaatgggaacgtctataaggcttatggagatacgccagagtcaagtattataagtgaggaagatgactcgacaagcggatcaaatgaaggaaatggagaagagaaagggaatgtgaatgaggttgaggaaatcaaatacgttcccaaggaaaacgagagctttgaagaagaagaagaaaaagaaactgattctgaaaatgaagtttcttcttcagagggcagtgaaggggacaaaagagttactaaaaaggaggtccagcatcaaaaaggaagcttaatgttctctcctccattgccactaaaaatggagccttgaccagtgagtcatgaaagaatccaagtcttctaaagttctttgcttatgactagactagtttaattccaaaacctgcattttggcatgttctgtgaacccaataagataacctttttttagttgtagaacttgtaacataactgcattgtgagtgttttcttggtttgatcattctgtttctgtttatctctactctctaggccattttcgagtcaagtcttcgtcatagataaatgctattctttgagtgatggttgctctgtttctgtagaaaccagtttgactaggtagatcaattggagtgtaatcttgtttttgttcttgtacctttccttaaaactcaataaaaaggttatgtttttttttgcattactctttagtgtaatcacgaagttacatcaatcgaatctttttacttatgttaggagtagcaatgtcaatgggatctgtacagatcattatatggtcacattgttaaatgttaagtaacataaaggattgttcttggattttgacggcaatgtgtttatgttattatgcaaatgttttttttaactaatatagtaataaaacccgatccgaacccgaatggatcttaaagttcaaaatccgaaaatctgaccccgaatccgatccaaacttaaactcgaacatatcaagtaatttattagaaataattatatttacgacaagttaagtgtcaaaaatatttggattttaaattattttgtatatttttgggtactttacctacttttagatagatttggatagaaaatattcaagttttcaaaaaaaaaatttgtgtattttcaactaatttgaatatattttgatacaaaatcttgagttttgaatattccgggtaaatccgaatccgaacccgaaaaacccgatcgaacccaaaccgaactcaaagtcttaaaatatccgaacggatcttagatttccaaatccgaaatatccgaactcgaaaaacccaatacgaatctgacccgaatacccgaatgcccaggcctgtgatacacagtcaaaatagtatatcttcatctcaccgcattgaaccgaaacaagtactattctaaattttcaccagtgagcactaaactcttgagtattattataacgagtcactaaattaacgatgaagaaaccttacacgtgtacggtgctcataacttctattgtcactttctctcagaaatatcttcttcctcttaaacccagtgagaaatgtcacggatagtacactcccaacatccaataacaccatgacacgtggatatcaacgtcacgtggcataatcaatcacagatcacttacaactgatcactcactgataagatttgcttcgtgaaactgaaaaaaagcttgaacactccattgttctctactctaccactatctcacagagattcatggatacgatgcgaatctccggtgtatcaaccggagctgaggttttaatacaatgcaattccttatcaagcctcgtttctcgtcgttgcgacgacggaaaatggcgaacgagaatgtttccggcgagaaacagagacttgcgtccatcgccgacgagaagatcctttttgtcggtgaaatctatctctagcgaaccgaaagccaaagtaaccgacgcagttctcgattccgaacaaggtctcattctaatacttgctttctaataagaattagggtacggaatttgaattttatagtgaatgttgtgaagtaactgattcgtattccttgggattttgtttttgtgttgattgattttcagaagtgtttattagctcgatgaatccgtttgcgccagatgctgcttcggtagcttcgagtatcaagtaccacgcggagtttacgccattgttttcaccggagaagtttgagttgccaaaggcgttctttgcgactgcgcaaagtgttagagatgctttgatcatgaattggaatgcaacttatgagtattacaacagagtgaatgtgaaacaagcgtattatttgtcaatggagtttttgcaggttttggtttttactcatttctttgagtgattttgttcttggttgttatctaactattttacattgtagggtagagccttatcgaatgccgtgggtaaccttgggcttaatagcgcttatggtgatgctttgaagaggcttggttttgatttggaaagcgtggctagtcaggtgagttgttaaccatgttgattattatgcattaaccgatgtttattactaacagacgtcttagagatgatcgtctttgcgagtctattgtttggttttacagagctgttatcttctttatatgtactgagatgctagatacttcacttccattttgtaggagccagatcctgcacttgggaatggtggactcgggagacttgcctcgtgttttttggattccatggcaactttgaattatccggcttggggttatggacttagatacaagtatggcttgttcaaacagagaattacaaaagatggacaggaggaagctgcagaagattggcttgaggtcttattctcttattcttttctcatacagcgtttgctattgaacagtatttcctaatttgtactctcttgtagcaatgctgagcagtggacatgtttattggcttacctgtttctttcagctaagcaatccttgggaaatagtcagaaatgatgtctcatatcctattaagttctatgggaaagtggtttttggatcagatggtaagaaacggtggattggtggagaagacattgttgctgttgcttatgatgttcctatacctggttataaaactaagacaactatcaatctgcggctctggtcaacaaaagctccttccgaagattttgatttatcttcatataactctgggaagcatactgaggcagcagaagctctattcaacgctgaaaaggtttgtatcttcattaagtttcatttaaagttgctttcacaattttgttttttcgaccatgatctatttacaagatccttctagtaattggaatagtgcatatatctttaaaattgagtgagaaccagcagaaatgaatatgttatcacagagagattagtcttgcgtcacttgtgcttgtttatataacgagcttttgatgtgtatatactgaaaagtggttgttttcttcccttccctcctgatggaattagatttgcttcgtgctttaccccggagatgagtcaactgaaggaaaggctcttcgtctgaagcaacaatacactctgtgctcagcctcgctacaagatatcgtagcacgttttgagacaaggtctggaggaaacgtcaactgggaagaatttccagagaaggttgcagtgcagatgaatgacactcaccctaccctatgcattcctgagctaatgaggattctaatggatttaaaaggactaagctgggaagacgcttggaaaatcacacaaaggtactaaaaatgactgaactaattgtcgggcatgctacatatgtgtctatttgttcctatatttagtctctggtgcttgtcccaaataaaagatagtttacaagaatgaaacctgcaacgtgtttctcaaaagttaataatttttttaggactgtggcatacacaaaccatacagtcttgcctgaggcactggagaagtggagtttagaactcatggagaaattgcttcctcgtcatgtggagattatcgaaaagattgatgaggaggtcatccctgaacaacatatcaaatgtctcttctatttttttcatatcgggtctaatttgtactttcatgtattgcagctagttcgcacaattgtttcagagtatggcaccgcggatcctgacttacttgaagaaaaactgaaggcaatgaggatcttggaaaatgtcgagttgccttctgcctttgcagatgtgatcgtgaagccggtgaacaaaccagttactgcaaaagatgctcaaaatggcgtgaaaacggaacaagaagaggaaaaaactgctggagaggaagaggaagacgaagttatcccagaaccaacagtagaaccccccaagatggtccgtatggccaaccttgctgttgtgggtggtcatgctgtaaatggcgttgcagagatacacagtgaaatagtgaagcaggacgtgtttaatgatttcgtacaggtaaacattctaactagtgaagcatgatgctataaaatgctctacagggaagaacacaactctcatcgttcaatattctatattttttgcagttgtggccagaaaaatttcagaacaaaacaaatggagtaacaccaaggcgatggattcgtttttgcaacccatatttaagtgatattataactaactggataggcacagaagactgggtcttaaataccgaaaaggttgcggaactaagaaaggtatgtactttatcagattcaatgttgtttcacatgctgttatctttattgggcgacattggttatcattgtttggtctttctccagtttgcagataatgaagatctccaatctgagtggagggcagcaaagaagaagaacaagttgaaggttgtatcacttatcaaggaaagaactggatatactgtcagccccgatgcaatgttcgacattcaggtcagttccaatggatcttggttacttttagattgatgagttgtttgcttgggtttttcggtttgagaagtcctttacgcaactctgagtagcttatgtagattcttttctttttgcattgaaaactttttgcagatcaagcgtatacatgagtacaagcgacaactgctaaatatcttgggaattgtttaccgctacaaaaagatgaaggaaatgagtgctagtgagagagagaaagcatttgttccaagagtttgcatatttgggggaaaagcatttgccacatatgtgcaagctaagagaattgttaaatttatcacagatgttgcgtctacaattaaccatgatccagaaataggtgacctccttaaggtatatatctacttacgttcttgtattagtcgtattctcaagcgtataacggaaaatctgcaataattatctggtttttgcatctgtggagattggcacttactaattagaagtgttaactaaacatgtaggttatctttgttcctgattacaatgtcagtgttgctgaattgctcattccagcaagtgagctttctcagcacatcaggtaaaaacttctttggcttagtcacattatagtttttggtcacaactccatgaagttaaaatattgaaattgagataaccggtaaaccatgaactggactagtttctctttttttcataagaactttagaaacaaatcctgacacaaggaacaatatgtttcggttacatttatgaaaggttataatcaatggcactcatactttttgctggagactaagagtttctctctgcagtactgctgggatggaagctagtgggacaagcaacatgaaattttcgatgaacggttgcgttttgattggaaccttggatggggcgaatgtcgagattagagaagaagttggagaagaaaatttcttcctctttggtgccaaagctgatcagattgtgaacctcaggaaggagagagcagagggaaaggtatatactatttgaagagttaaccttaccatgcttctgttttagcatcaacaagaatttgatttttgacctggctcttggcattccagtttgttcccgatcctacttttgaagaagtcaagaagttcgttggaagcggcgtctttggctcaaatagctatgatgaactaatcggctctttggaaggaaacgaaggctttggacgagcggattacttcctagttggcaaagactttcctagttacatcgaatgccaagaaaaagtcgacgaggcataccgagaccagaaagtaagtactaatgcattttctttgaacatcaagctaataatgttgactaaaatatgaaacttactcaaatatcaaaccttgaaattgctgttaaatgattacagagatggacgagaatgtcaataatgaacacagcaggttcattcaagtttagcagtgaccggacgatccacgaatacgccaaagacatatggaatattaagcaagtggaacttccatgagccttgagacaagtctaccttaagaactcttttgtacgtcccatgtttctaatgtaatcaaggtaataaggaaatcatgtaatgatgcaatacaatgaacgtaagaaataagattcacgagtcaatgtaatttacaagggccttcgctgccttagcggcgtgcttctgaccggctaaatgatcgttgtaaacaatgtcgctattacaaactacgttgcatattctacacaatctaattgactcatttgacaccccgcattccacgactctccgtctctttgattctagatcttctgttgttgaatccgcacctctcttcctagccttgcttgtacacggattttcttgtggtcctattaaaggggctgtaacggttggtccagacaaagaggaacccttgttagacgacagtaaacagaccattacagtcaaccttacaaacttcacagtgagcagagcgaacaacctttcccttcttcgttccaggaagttgagcttgaactatgtggccggtccaagagaaatcaggcgggtatatgctatgagactgctctataagatcctgattcatcctcaattacaaaagttcaagaaaatatcaaattgagcacaccaggaaggtagtaaatattgcataagaaaacaaaatttcgaaaatatttcttcagatcttatgtagttttgtaacctagtctacatgatgcctttctagaacaaatttgaagtataaactgatcctttgcacaccgagagaagcaaacagatcaatctcaagagagcaaaacagagcaatcacaaagcaaacattgtatgacatacataaaagacagactcttagactttatacacagatcataatgaattggtaagatatacataaaataatcattgatttcacagatcgaaggatctaaacattgagatttgtgcaaacaaaaattactagagactaaaacttgatgactaagcaaaacagagcaatctcacaaagcaactgaaattcactaatgcatcaagaacttgttgcaaaggacctgactttacacacagatcctaacgaatcactgagaaatctataaaagacatcatcttgaccacattcccacaacttaacggagaaaaattcatagcttcctcatcaaagcattcatatttctgaaacaacttacaggccaagccgagttctgctgagcattcatatctaaagtataatacggcgtcgtatccacagtcacatatgatgtcgtcgcaatcacagccgccgtagaatcaacaactccaggcggtggtggaattgcaatagctgaggattcataagtttggagatcggagatggaactagggtttggatttgcgtagtaaccataataggaagcgtaatacgcatcaaccgccgtcgactgattcatttccggtggctgtatcgccggtgccggcggttgttgccactgactgttgtaatccatggaaaacaaaatcaaagttttgatcttttcttagttcttgcagttctattgaaaaccggacaaaagaccagaccggtcggaccggtttgatcgaaaaaatctgtccttttggattaagtggaccaataaataatcaatttcactttggattggacaaaataccagaccggtcggaccggtttaatcgaaaaaattgtccttttggattaagtggaccaataaataatcaatttcactttggattggttctgtatctcagacatgaaggtggaattgagactgagctcaatgatagtttcagactaataacaaaacctggtttttttccttctgtttcatgtctgtaacactagcaataaagtagaaacaatagagaggaaaatgtcacaactatacacattccttattattcaactaatctgaagattctatatagatgaacacatatctatcctttctctgtagtatatttggtataatgtgaaacctcaaaacctttggttagacttggaaacatcaaagcactgacatttttatatcccctgagacttgtagcttgatggttgtgcaacaatcttgctagcttctgagtcagtcacagagagtgaattaccatcttcagtacccgctaattggcctttaatcgatctgtgaagtgtttggtgaccacctaatgcttgtgaacacacaaaactcttgccacatattatgcttctatagctactagaattgtcgaaacacgagtgagcaagcggttcgctgaagtttagttttggctcagcacgatataagatcttttcatccacagagacttcaaagcttggtggttgtgaaacaatcttcttagcttctggaggagaaggtaatgcactgaacctgattttactgcaagtatcaaacttgtcgaaacccgagtgagcaagctgttcgtggaactctagtttcggctcaacacattgtaagatcttctcctcctgagcatgttcaaagcttgatggttttgaaacaatcttcttagcttctgatgagtctaacagtgaactatcatcttcaatgtactcaggtttaggcactagtttccatctgtgaagtctctggtgactaccaagagcttgagaacacacaaaactcttctcacatatactgcatttataactggagcgagattttttctgtagtttccttctcaaaggacaaggtttaagctctaaatccatgaaaccatcacctagaggcaaattactgatagaagcaaagtcataaactccttgacacaacataaccaagttcaatgcagcttcaatcacctcatgtttctcaatctcagccataaaagaagatcctttgaatcgatcaaaagctgaaacagagcaaaccctagacttcttcttaagaccccaaatcctttccaaaccattctcatcttcgattctattgtgattaccagaatgcatcctctggtgaccatacacaccttttaaagttccaaactttctcccgcatgttttgcaaccatgaagtctctgagacatttcgccgacaaaaacctgaaaattgaaacaaagctcatagcttttccgtttgattttctcgagaaaacagagaagaagacaaagatcgcgaagaaacacacaaaatcagacatttctaagaagagagtgatcatgtttcgctagaaacttgaaaaagtctaaagctttttccagtttattttctcgggaaaatgtggaagaaaacgaaagaataatcgcaaagcagagagcttgattagcttaccagaacaaaatcttcacttgattttatgactcaggaagagaaagaacacgttttgacctaatccgaagagctgaagaccttaaagaacactttttttttacttatcgcagagtttgtagtatcgctttcgatctaagctattgacagacaacaatggagaaatttacttgttgtggaagctaatgagtctattatgcaaaagaaagaagacagaggatagttatatcctacactcacgcgtatcataaacttggtgctccctaatcgctaaaccaattaattggtttaagtaatcaattttgaactttggattggttctgtatctgaaaacatgagttaaccaaagaaactgtatttgaaccaagcaagaggaaaatgttaagtatacatctgcaacttctgtacttagaagagaaaaagattcaactagtagactagcgagaaaacagttcactgaagtcttgttttgactcaacacaatggaaggtcttctcatgatagatttcaatgcttgatggtagtgaagcaaacttgctagcttctgagtcaatcacgccaaacagtgaagtactatcttcagttttctcatttttacgcgctacttttttcactttgatcgatttgctgcaactaatagacttgtcgaaacccgagtgagcaagcagttcaccgaagtcttgttttaactcaacacaatgtaagatcttctcctcctgagagacttcaaagcttgatggttttttaacaatcttcttagcttttaatgagtcagagaatggattatagtcttcagtgtacttccttttacacgctaatttcccgctaatctctctgtgaactcttttgtgattacctaaaccttgagaacacacaaaactcttgccacatattttgcaatgacagcttgatttccactgagtttttgtctgcaatttacttctcagagtagatggtaatgcacccgaatgagaaagcggttcactgaagtcttgttttaactccacacaatgtaagaacttctcctcctgagagactttaaagcttgatggttgtgaaacaatcttcttagcttctgatgagtctaacagtgaattctcatcttgagtactcgctaattccctcttagtcgatctgtgaagtttcgtgtggccacctagacctcgataacacccaaaaatcttgccacatactttgcattcatagcaggagctactactctcaggtcttttctgcaacttactcttccgaggatatacttcactgaactcttgtttcgactcaaacacaatctaacatcttctcctcttgggagacttcaaattttgatggttttgaaatagcatctaaggactcaaacaatgaattatcaaatttagtatactcccttttacgcactagtttctctttaatcggtctgtgaattctttggtgaccacctagagcttgataacactcaaaactcttgccacatattttgcatttgtgacttgatttactctgcagattacttctcagagcaataacaccactgcaagtagtagacttttcgaaacccgattgagaaaccatttccctcaagtctagtaacaactcaacaccatctaaatccatggaatcatcatcatgaggagacaattcaaagccatactttttctgaaaacaaaaccaagctcattgcagcttcttcttccatctcatgctccacaatagtctcagtcataaaagaagtttcttttagtgacactgaaaccgaacaaagacccccaaatccttagcaaaccgagtaaacaccagaatcaatcctctggtaaccacatacatgaaggttatggattttgccaccaagatgaaaactttcatctgattgaacctgtttcagcatcaaatacgttaaacccacaagaatcaaacacaggagagtgagaagaaaacactgaaattgtaaaaaatcgtgagcttttttcgagaaaataggggaagaatcaaaagaatgtagaaagatgagagctttgatcagcttaccagagcaaaacactaacttgaatttaggtatcagggcctgaatcgctgagcttgatctgcagagagtctagctctcgctcagcttttaactcgtagagactgatgaaaaaagttacttgttgcggaagctatgaaggctattttgcaaagagatagttatctcctacactcgcgtctacaactaactacgtgctccctaatctctaatttttttattggtatcttttatatcggtaatctacgttggtctaaaaccggtttgtgatgtatcccaaaatgattatcacattttcttaaatgtccatttcggaaaaaaaagggtctatttccaaactattaccagagttcaaagtatgactccgatctataattttatatatctctaaaactaaagttctatacctagttttctccctaaaataaaatttctatatacaaatctctccaaattaatagttcaagatatatcaacccacaattattggtttcattggtttattaacgggataaatgtcatttaaatcatcactttaccatttccgttggttttgaagcataaaatctcgatctagtgatttaaatcctcaattttatgttgacgttcaatataatcacgaattcgttgactaagccaattaaggcacatcgttagaaatctttctaatcaaaatttttgattttttctctctttttcttcagaatctctcatcttctttggaatttctcttctttttcgaattcaaagtaatatttcgtcttaaggtcgattgacgacatcgaaaaaaagaatttgtgtctcaatttgcttagtcaacaagaatttgtgattaatttgaaagtcaacataaaattaaagatttaattcaccagatccaaagttcatgatttaaaccaacgaaaatggtaaagtgatgatttaaatgacattttccccgtttattaactacatgctccgtaatctcgtcgaaagcggtttgtgatttatcctgaaagaattaccatattttcttagaatgtccatttcggatatcgaatgggtaatggtttagatttaggttttagggtttacgatattcatattctgataaggagacaggttgtaaaaatttggaaagtcactaccaaacttttactaatttgagtaaaggtcaacttcgagacaaataattcagataattacgaaaacattatgggcaaatttgggaaactaaaagatctaaacacacaatttttagaagcacccactagtcaagacttacttagtaatcactatatcttactcaaaccaaacctttcagaagcaaaccaatatatattatcatcacattcattagtccaatggtttcaattttctcggatgagatcaaacaatacatactactgatttataaacaaccatcacttgtttttgtttctttttgcacatattttattgagtttttgagcaaacaccaaatccaaaataatttagaagagaaactaaagaaagaaagtcatcatcttttttcttcttatggactagtctctttagttaatatccacttgaggaactataccaccagcttgaatgatctgtttctcaagctgaaacaacaacaacaacaacaatgtcaatgatttgttcattactcataaccaaaatgattcattaaaagcagagccaaaaacagagatggattctattcacactcacattgaacatatcttgaagctttgtctttaacgccttgtactcaatatccacttgctgcaaacatctcacacacctgtaacataacatgagactattattactcaaccaatgagtcccaagagaaaaccataactcgcttacccttcgtagttcttagcttcacaacattccttgaagctaacacacaaagttttgaccctcttggcaccaacactacatagaaacaacacaaagcttttcatcaatcaacaacacacaacttctgctacttatataaagcgagacatgatacataccttgagctactacccttcaattgatgcacactagcacctacctgactaaaatctacagttcctgtcgtgtccctgaaatagaagtagccacaatcacactttaagacaacacaagcaatgatgatctagctgagagaatatcaaaaacttacaaagctctagccatgttactgataagcttcacacaatcttcaaagaaaagtgaaagcacttcagacacaaaatcaggacttccatcatcttgtagctttttcaactcagtaaattgatcatccaaaaaccccttcacataaaaaaaacacaaacccatgaatctaaagttccaacctttacacaactcaaatccctaaaaatcataacttgtaaaaatctacataaagattcaatctttcttcacttttgtcatgaatctatgcatataggagtcaatctagtgtgtatatgagctaaattagctaagcaaagagatgaaattgggtttgaagaattgtggaattgaaacctgttggtagagagaaatggtgtaatcacgaaattgtctctgaagctgagcaatgagagcgtccatgagaagagtgaagcggagattgggagaggatttttttgtttggactttgattattgacttggatttctggaaatagccaatcccaagaagaagaaacttgtgttttgtctttctcgcgaattgtaacgctgctaccagatttttttactttaaatgggaaacaataattaaaagagaaacacacaaatatttggacatttttatgtatttatttatttgggtgaaaaaaattaaatagagaattttcataattaacataattttaaagttttttttgataaaaataccattcaaaagttttgtgaacataaataacactcaaataattatttaatttttaattattacaactaacatttaaaaaaatacaaaaattcataccaaaaattttcaacaatatttttctacaaaataatttccgtcaaaatttttccaccaaaaataattacgccgcccacattttacctacaaaaaaaaattcagaattttttttacaaaatataggaaagattttaagcaattcaggaaaggtttcacgaaatttataatttttttcttttgtaacccttcctgaattttgtagaatttttcctgaattcccgaatttttctttttcgaaattcaggaagaattttacgaaaattttttttgtaaaatctttcctgaattccgtgaaatcctcacgaatgtcgtagttagcttcctcaagtttttttacaagaaaaatttgacggaaaattttttttgcgggaaaatttattaccgaattgttttggcagaaaatttgacgaaaaatttttagcggaaaatttttatttttatttatttaaataaaattaattatttatatttaatatttaattaaaattttgaaagctacttgtgaaatttttcaaaaagttgttatttttggaagaaaaaattttgttggtgctatttttgtcaatcccaattaaatattttttttttgggaaacatttggattcaatacaagtttttaagtaaattattggtatttggttaattaataaaaactctttttctgaaaaatataatatgaaacactcatttaataatattaaatctaatttaattttcttatataaaagaaaaatatcaatcttatgtttcgatttacttggaaaaattaaagtatttgacattatattttcttttcaaagacccaaaaaaaaaaaaaaaaaattgcaacttattatttcgatatttttaaattacaattagactaaccatttaaaagaaaattttgtgtataagatttttaatattattcacatatagttttttatggtatcagagctatatgtgatatggtaaactattcacattacagattggaatactcacccaagttatgtagccaacttcggtgtgcgtacctaaaaggttaatatgtggtcactagtactgtaaggaatgcctctacgaatggatttatgcatatttacttaaacaaaaaataccaatcgcaatgagagacatacaaaaacataaagctttaaatatggaatcgttaggtgtcactcagaaatcagaatctccaacctggaaacttttacaagatgcgtttggttcctaatccaccagagaagagatatcatgtgattctctatgaacaatgtgcaaatattcttccgagtcaactctcgcagacaaagctcaataagtggcaaaactttcaacgattaactacaaagtacaaacacattttactccaatataaaccaatatttatttagtttctaaggaaacaacaaaattgaagcgacattgtcgaatacaagtcctcttcgaccaaaaaaatatgaaagtaataccaaaaaaaacaaaacacacaccagagaacataacaaacatattgtaagaaatataacaagtcttaaagacaaaccacaagaagaagaaaagcacaaatgatggaggacgaaagagtcagcaatgaacatcattaggcaacggcaggcatgtccttgagccagtcgtcgagaggcttaccaatggagtaaacaatgaaaccaatctcccttagcttttgcagattcataatgtttcttccatcgaacacgaaagctggtttctgcatgttgtcaaagatcttctggaaatcaaggttcttgaactcatcccactcggtcatgatgcagataccgtgagcgtccttagttgcttcgtatgcgtcccaagtaacggtcacttgtttcactgttgttgggctcattggctgcaaatgtagaggatggtcccagtcgaacttgttcatggataaatccctctggatctgatcctcagtcacttgtgggtcgtaaatgcttagccttgctttgtcttctaaaagacccttgcacacatcgatggctggagtctcccttgtgtcaccggtgtctttcttgaatgcgaaaccgagaaccgcaatcttcttgtttgatacagagttgaacatggaggaaacaacacggttcacgaaccggctcttctggtagtcattgatcttgatgacttgcttccagtactctgccacttccgggagtccgttgcactcacagatgtagacaagattcagaatgtccttctggaaacacgaaccaccgaatccaacactcgagttcaagaacttgggaccaatccttgagtctgtaccaaccgcgtaagacacttgcgtgacatctgcgcctgtggcttcacacagagccgacatagcattcactgatgaaatcctttgagccaagaaagcgtttgccgcaagcttggacagctcagcagaccagagattggttgttatgatttggccttcaggaacccagtgtgcatacacattcttgagagtctgcaccgctttaaacccttctggggtttcccgccctccgataagaacacggtccggattaaataggtccttaatcgcggttccttccgccaaaaactcgggattcgaaagaatctgaaacttaatccctttactgttatgtgtcaaaatcttctcaatagcttcagctgttttaaccggaacagtcgatttctcaacgacaatcttatccgataccgaaacatcagcgatcatacgcgcagcgctctcccagtacgtaagatccgcagctttaccagcaccaagacctctagtcttagtcggtgtgttgacagaaacaaacacaatatcagcttccctaacatgtttctcaacatcagtactaaagaaaaggttcttgccacggcattgcttcacaacatcatcaagaccaggctcgtaaatcggaagcgtgtcactgttccaagcgttgatacgtggtacagagatatcaacaaccgctacttcaacgtctggacatttcaatgcaatcactgccattgttggtccaccaacatacccagctccaatacaacatatcttcaccatctttcacttcttctacatatataaatcaataaagtcaagaacattattcataatcaaaaccaaacatagatcaaaaagaatcaatcattataagcaaaacagagccagatcttaaatcaaaacattactaaacaagatatcattaacgatctaatcacaaatctagcttcatttcataacagcactataaataacggatccattggttttgaatcagaattatgaacttagaaaaagccgatctgagatcgagaatcaccgatcgatgattcagaacgaagatcaggagataattgacgataaatttacgagaaaattagcgatagagatagagatttgcattagcgagattattaccttgtgagattcagacagagatgagcgagtgaaatttgtctgagggacaatgatgatgatcttaagaccaaagtttcgttttataacaagtagatttccgattttgcccctgaccgaccagagagagacttaaaaaaaagcgaacctgcaggttcggtgatggtggagccactgttcattacattttacatctggcattattattctcactttccaagaaatgagggttataaaaaaatcgagtaattactgtgtaaatgacgatagtagcccttgtattttagtgccatacgcgtttgtgtgcatttgaaagattttgctgtcatgcatgagagtgtctacgtaagcctgcgactatggaccgaatgatttgtttcggttcgggtagttagttttttgggtagttcggttatggagtaaaggtacccaaaaaaattcggcttagatctgtttggttagtggttaactcggctcggttatgtattaaaaatctgtacaaaactcagtttggtttggacgatcggttaagttaggatagaacttttaaaaattttggtatattcataaaattggtttatgttggttagaaaaattaaaaaataaacggttaactggtcgattcaatgaacatcaacaaccgaattattaacaaattccaaaccgaaaccctcaaatccggtttgattcggtacagaaaaactgattcaatttttaatatcaggcctaagtctacaagtgaaaattaaaagtgtttttagggtttaaaacagaaaaaaaaaacaaaaaaaaaaacaaatgaagcacacaaaacatgagttcatcttgtagcaaaacttcaaaagcaagaatatgagattgcttacgaattagagaattatctttgattattatttcttatggagtgtttttcacggcaattgaaaatagttgagtaattaagcaccaaaactaaaagctaccagatgtcacaactaatgatgagggatcatgaggaatgacacaaagtaacaaaactgaaagccaaataaattatagatacattaaggttgatagcataaacccattagtttgttcaaatagtctcattttaaaaaataataaataacatgtatttatgattatggtatgcttgagttggtaaaatttcattggtcgagggctaacacacatgtcgtggtgatttaaaaaataaacataaaaccacgaccataaaaaaaatttggatcaattatgggattgacacttaaaagcttatccttttgcatcaaacaaccctttttttatgccttatagctttaggtagttctcccacttctattttaccattttacccttatattccatcaaatcttctccatatctgcaaattttttctcttttgttctaccattcccaaatatcaaattcaaacttattatagtagcagatcttttcttttggaatatagaactcaaatcgatatttttattctgcttttggattttctaactcattaatgttgaattttataaataaaaaatccataaattatcaacaaaattcagcagcaacatacaaacaaattaaatcgaatataaatttcaaaaggagaaaaattaggcaaaaccccaaacaaatttcaaaacccagaaaacgaaccaatcaaatttgaaatttgaaatctcaaaatcaaatttttatcaaaagtctatttgagttttttgcttgggtttcctatatactatcatcattagggtttagttatattgaatcaataggtatttgtataagacttgattttttgggataaatatattaatttcctgggaaaaattagaacgagaagaataggaagaagatgaaagaagaaggaaacaatgagatattccaggggtaaaatcgtcaaacatttgctgagaaatacctattcttataaactcatcatgaatgtaccctttttctagtttttgtcttaaatatgcctatttgaacaaaagcccccaaaaaatttggataaaagttgtgtcttttataaattgtatttattgttctctttaggtttaaggaaaatatcaattcagcatggataatccgatggttatttcaaaaaaaaaagaaaaacagagcaactcaggagaacgaataaaagagtatgcaaaaaataactttcttaaggaaaagaagacaactcatcttgtagcaaaacttcaaaaacactagattcctaaggaaagtcaactatcctattcccaaaccatcaatatttggaaacaaagaaagtcaactaccctattctcaattctcaagccatcgaaatagggaagctaggtccaaccttttttcttaataaatattgtactaaactaaaattagaaaatgtacaaattagaagatttataaattaaaattgaaagaagccacataagaaaacaaagtaaaatataaaacagaaatacatccctgtaaacacaaaaataaaagtacatgagcaaacattgtttttagtaaattgtttttatctatattaatcactaacatggaagtcaatgtcctttagctatctcttgagtgatagaatcacgtacaacttccatcactctatcatcagtcatggtacatgatcaatgtttggaacagttttttctacttcaccattctctactacttcatcaccatgatgttcatattcttccattgcattctaatgtgcaaaatctgcatcctcttgacatataatctttgataaaattatggcgaggcatagttgatgttaaaagtttcatccactttctcaactcatatttagagtgtttgcaatccttgttgagcacatcatccctcagcccgacttacatgaatagcaccatagacttttttccaataaatccatgtttgccactggttatctttaactttttgtagcttttggtcattcctcaaatcaaagaataagaacacatataaatataagagcatagaaggctaatataatgaaaaggccactcaaagagctgatataagaagatatataccttacaacatccattccacgagtcttaactcatgtcgatggatctatttaaactttacgagttctattacgagtcaatttcttgcaagttttatttcatagaacttgtctataattctttgtcttgtagcctcattgcaccgactgttttctaacatttcctttgaatgtctcttccatccagagttgaatctattgcacaattttttttttgggatctagggttaagaaatgtgagaaaagtgtcgattaattattattaagtatagctatgtaatatattagtttaagtaggatgttttagtcatttgtaaattttggctcactctgaagcatatgactgcgcctccgaaacgcatataaaagcatctttaaaaacgcaaagacttcagatgagttttaaatatacatccagatgcattattcaactaatgtatcaaatgtacgttcaacgaacatcaatcctcagattatctgattgatacatctggatgtacaaacgaacaacacctcacttaaatatgaaattttgttagattatacatttgcatatttaagagactaagtttatatatttctgaatcaagggtttcaatttagtttataaaatttataggtaactttctgattatagatgattagctaaatttcaataaattcaagttatatatctagctatataaaatgtgtaactttctgattgtataactttttccgagtatagatgattagaaaaagtttgtgactctttttcaaatctttcaattaaaaatgtgagctaccatgaacttgtttatattgatataataagatattacaatatattaatacgaagccagaacaaattcattcgattaagttattaaatatttaattttatctataaatcaaactaaaatcagtttagttcgtaaatatacagatatgttaatgtaatagttttacaacgataaatatttgcactaaactacatcaatattatatatttcgtataatttaattttattcttggagaaaaaattatctcgctcattcacaggtactaacataatagtatattttttattattactgaacttttaaaaaaattgtaagatattagagtaaaaaaaactatagataaacggccaaatttatatgattcccaaaattaggatttgtcaaagatttggttgactattgtatgattctctaagccgtgctttaaagttttatcactttatgggaacggctttttgcacaaaggccatagaagaagaaaattaacttagaaggacacattttttctatcaacgaggcttatgtattttggtttgatgaatgtgtttggacactacacatattgaccaaaaagagattccaataatattttgtaaatttaatttatagtttccaaaatatttcatggaattccaaattcacatcgatttcaatatctacactgagaatttttataagaaacgtatcattctctcggtgcttactaaggaagtaaataaatacagcgagtatgtagttaatgcccggacaatgaaattccgcaatcaatctcgagggttaataaggcaaaataaaatttctgctgattctcataattaccttaaatataaaaattctatcaaaaaaccataacaccaacgttccatattcttctataaataaatcattcttcttttcactaaaattgctaattaactcggagagaaaacaaaagcatgaaccgatcaataacttttgttgtgttactggcggttcttgtctccgtggctaaccttggcttggctcatgtcggtcttacaaatatcgacccttcgtggtacgacgcacatgcgacgttttacggtgacatgagcggcggagaaaccatgcgttagtatttttgagtatttgattataatgagttttactaatcgtgtcttacaagtgatagtagtaatatttagaattgctatatgcttatgatgttttcgcacgtcgagccatatttttcttcttctaaaacacgttacggtttattataactttataagtaacaaaaacattcagtcacaactagtaaaattacatttttctagtttatttaaacatttggttgatccgtaatgtcacctattgaaacaacaagttttgttttgtttttaatatttggtgtggcagaaggagcatgtggttacggagatctattcaaacaaggttacggcttagagacagctgcactaagcactgctcttttcaacaatggccagacttgtggtgcttgtttcgagctcatgtgtgttagctcaaagtggtgcaaaccaaacgctggttcaatcaaaatcacagccactaatttttgcccaccaaattatcaagaaccggttcagtaccattggtgcaaccctcctaacaagcactttgatctatcaatgaaaatgttttcactacggtggctgagtaccgagcagggatagttccggtgaagttccggcgagtggcctgtcataagagaggtggtgttaggtttgagattaagggcaatccttattatatcatggttttggtttataacgttggaggggcaggagatgtgagtaacgttgaaattagagggcaaaagagtaattggatcgttatgaagagaaattgggggcaaatttgggataccggtttagatttggttggacaaagtctctcgtttatagttcggaccagcgatggtaggagcatgacgttctttaatgttgcgcctccgaattggggtttcggtcaaacttacgaagcaaaatcgaatttttagatgtttttattttattttattttattttagaaaactttagtttctagagtttttatgttggaagctattatttaatttcatcataataataaaaatatttttaaaatttttagttacaaaattcaaacaaatatttagtttaattaagaatattggtatcattgtgtagagtgacaaatattggcatggaataagttagacaaattcttaattaagaattcaaatatccaaatcccatgattttaggtagaatgttataaacatttcatattaatttcctaattcaccaaaataatctcaaaactcatttaaactcaaatcactcaaaattcttttttcaacacacctccctaattctcgttcctacaatagtgttcttttaatagtgaactttaatcgagacaaaggaaacaatcgagcccatcaatgttaggcccaacaacaatagtctatgactattcttctaagtaactcatagtttcttcttaacaactagctcaacatcttcatttcctatctctttgtaagtgtggagaactcaaacaaccaacaatatccactagaactcttttgacaatctttacgatgattacacttaattgatacaccattctaaataatctagtgcatggttcaatgtccaaccgccttaccaatcaaacctttgctttgtatcattgtaacgttgaataacgaggaaagaaagaaaacacaaagtgaatgaaaagatgtttcgtcaacagcctaattcttttgtaaggaaaagaaaacatggaatttgaacctttccatcatattgtctttcacatgcacactcaccaaacaaacaaaaccaaagggaaaccaaaaagttttgtcatccttctctcatatttataagacacacacgttaacatatatatactaattactaagtactcctttggcatttggcgcatgtatataaaagtcaattaagaaaaaggtttatgtacatcaagcttaaattgttaaattttatgtgttagaacttctgtcttaatacattgaagctattctgtgttgagtacgttgtatggtagacttgtgaatcactaaatcttctatataggattaaaatttacaatggatgcgagtgtatatcgtgggatgatacaacttactaatccaaaaaaaaaaatctttaaatagtcaatttagctatcatctacttctcactaaaaaataatcatattttataatgttaaataaaagatagtatctacataaaattataaatattcataaaagcagtgttctgaaaagcagtttaggcggtcgtctatgccctacgctctcacgcgaagcctagacgaacgttttgaccgcctaaaattatatatgcttcgtttcaatatatttttctaaattttaactactcaaatttaaatttgttaagttttatcttcatatacatagttttaaatgtttaacgcctagcattttcttaaacaatccaggttatgggcttatagcatcatccaattattagtcttcattctctcacttattttatgagagaggatgatatatatgtagattattttaacaaaatacatatagatgctaagattttaattagtacatcatgaatcatgatataacatgaaatttaaatttatatagaaaacgaaagccgataatcaatcacgtggagcaacagctaaatataaatgtcacacatgcctatattaacctgaaatatccatgtgaatcaattaaaaaaccaaaccctcttttgtgatgttgttggtaattaatcaaaattaaaaagaggaattaaattgtgtgcatggagagaagaagatagaagtgtatgcagggaatgtggagaacatgctctgtactttttcatatgcttgcttctctgtctccttacccttccacttctcccatgtgcactcacatgctctcttatcctttcccacctaaaccggtttccggtttaattctcggtttatttattacaagtttccttgttgtccaatgagatcttaggtgacccataacatcttcacatgcacaacctaatctacggacaccacacatccttcgatgcaccactttgtccagctatttccttaatttcattacatcccaactcttactctaagttataccaatataattaaccggctcttcaccaaaacactttacttccatagagttagataaaaaaatttgttttgtgattcaatgtacgtaaccgttgattggaatctagtagggtaccgtctcaagctatttgtagtatctatgcaaagtttttattattattgatacatttaatgtgttttaaaaagaatatatatatagtaactttgttgtattgtagagagattggcacgtaatatctatctacctttggccaaaataaagttgacatagtgaccataagttttagattaactattgcgagtttctgattatccataagtttaattttatgttaaccacggaatcacagactccagcctaaatcttcaaaattgaagatgtactacttaatttgtacaatatgactcaatccaattacttaaaaaaaagactaaaggattatatcgaaaatatgatattgaaaaaaagcagaaagtcttattaaattacttcaaaaaaattcaaatgagattatacgttttgattgaatcaaactaatttgtattatctctgtagctagatttctatataaacagaagaaagttaaaaagcaaataaaaattcacaaatagaaatcgaacaaaaagctatgaaaatataaataccataaccttatggaaaaacgatgaaatgcttaacaaaaaaaactttggcaatggcatgcatgtgcctgtaacagaaggcccccataagctgttagtgatatacaacttaagcaaatgtgcactcttcacgcacttcccgcttttctaaatttcaatttatttgtctacatttttgtccaaattattgatataattctaccacgacttcccccacatgtccctccaaagagatccgtactacacagtctaccgacagcacatgcatggattttccaaaccatcttctttaaggataatccttgacatttttaatattaaaaaaataacaaaaaattcaatatataaataacatcctaaatctatgttttggtagaaaacaagttctaaagttcacatttggacagtggttagtacttggtaatcaaaatatttgtttaagaatcttgactacttacttagtctaaaccctaacgtacatggttagacatattagacacaattctattctatagcttcttaacaaacgtttagcataatccgaaattggttttaccaatatttattaccgtacgtgtgtttttttctgtaagaaaggaaaaaaagccaactcatgattcttctgatattgcatgtaatatatttgccaaataagcttacgacacaaacacaatgacactatgacagtaagatatcatttcaaaatacggatatacccccaaattggtggcaatgacaaagaaaaaaagagttcttcacagtggcacattcgtaatacatatgaactttggtggttgtttcgtaatatagatcgtacttaaaacctctaaacaccgttctctttatttgccatcttcttcattatcatcatctccatctctctctctctctctctcattttcttgaaaaagatgagaaccttaaagactcagaccacaaggggaagaagaagagcaaatgtgtcgtcacgtacgagagttttacacacgtgctgtggaaatggtagtagcgacggagggaagacggtgatggagaagcttcttgcgttaaagagccttcttcctccaccggtgaatgtcggtggtggagagacggaggagctgtttcaagagacggcggagtatatcgtgaagcttagaacacaagtcgtggtgttgaagaaactgattgagatttacgataactcttctgatcagaagaaagatgttgttttataatgttcatttatattttctttaatttaaattatttcaggtttttctgtttttttttgttataaacttataattattatattgtgatccgtaatggttttaggttgtccatgtctttaatgtattggtttaaaggaaaaagtattgatgattgataactttcttttctttgttctagtcacacgtagtctaggtgttctgcagtagtattaataagtttatttttttttggttaatcttcttgcattcttttgtttttaatgggaccattaatcacaattgtgaaacaacaatagaaccggagtttagagttctataaaaaggaatacccaaacatctctggtctagtggtgggagaacctttggtttatggtaaaattcttagacccgaattcgatcctctttaaaaacaaaaatcacatttgtctaaaaagtctagtcgaaactgtaggcggtctaactatccagtagcattaactgaaaattattacaaattcgaaatagacagaatagtggtctttcgtggagaagtccaatctgaagcactttggtgcgtttataccggaacttgccggattaaccgatatggtttatcaaaaaaaaaaaaaaaatagaaccggagttaagagttctataaaaagcagagttagacttgcgaggaagtagtttcttcattcttggaaccacaacattagaaaagcaaaataattatgatccatgtttaatttttgaaatatggaagctacatgtatttttttaaaaaatcttttttctcttcaggatcattaaatacactaatttctatggcagtatcttagaattagggaaggtcatgtcttgcggaacaaatcttacaaataaccctatcgaataattctgaaaagattcttaactaggaactaggaagcattttcttttgaaatccggttgtttatttcgatcacgccataaatgattgcatgagccacaacaaaagagagagtcatcacacagttttgttataattttatgacatggctatagatgtccttcgtggaactcataattaaagatttcgttgaaactgtttctatatacttaagaattttggtatttgaaattttatacatataaagttatcaatatgatgagagaaaagaatccaatcattaacctatacacatatgatagtgtcgaattgttgtttctgtccttaaatgtctcctccatttccaaagtcttgggaaacgaagaaacagaaaacaaaagtcgtctcttggtttccatgtatgtacttattgggcttattattgggctgggccgaaatggtttgcaacttacatgtttcatcttcctttttctatttgtatcctttcatttgccgagagaacttcaaacgccggcgaagaagtgtcaacactccggtgagagagagagataacctgcaatgtcggaagtttccgtttggcctatctaactccggtggaagttttcctcccgccatcgtgtcctcgccagctttctccttcaatcaatcctacttcctccgcaactccatcatttgaattcggaaccgttccttcgtctccatcgaccgctccttctacatccctccttttcggatcctcaccgtccatctttggagccaccggttcgtcaccatccagtaagttttgtataggatatgaatttagagaacttatttattaggattagatgctttggtttgcattatctgagtatagtgtatgacatgaatccatagctctcttagagatattgattgatgtgactcaagctatggagttttcttatgaaagaagtatattgttgttcaggtcttccatcttctgcttcaaccactactcatgctactagttctgttactacaacacagccatctcttggtgtcgcttcgagtagtggcacagcgattggttctccgaatatgccatctgaaataactgaggaaattgtaaaggaggtagagatatttgctctcttttgcatttagcttttatggtatgttttgtataatatggtaatgtttttcttttggtgtttgaagattattctcgtggaggggaataatgagtcacaagagcataaatggagatccatgaaacaggaaaatgaagagctcaaaaaaagattgagggtgatgaaagaggagctagaggataaggattctgagttagaacaacgagaaggtttgattaatgccctcttggtgaaagaacgctatgccaatgatgagatacttgaagcacagaaactgttgatcagtgtatgtatagaaatgataagtgtgttcttgactgatttgctttttgtgggtttcacaactctgtttttttgctgcagcaaatgagagatttaacggatgatagaacgacgatcagagtaaagaggatgggacatcttgatgtagagcccttcgtaaaagcaagtaagcggagattaactggcaacgacactgaggtttacgcggaatgggaagaaaacctcagggatcctcattggcaaccattcaaacgggtggagactggaaacatagtgaaggtttgttatctatgtcatcgagattctttctcatcgtctatatcccatttgattagtcttgtttctggtgaatggtgatcttatgcaggaagtggtggatgaagaagatgagaaacttaagaatctcagagaagagtggggagaagaggtgatgaacgcagtaaagacggctctcgaagaagttaacgagtttaacccaagtggccgacatgtagtcccaacactgtggaattccgaacaaggaagagtagctacattgagagaagtgattgctcacatgacacatgagatcaaaactcttaaacggaaaaagaatctgaaacaccgtaagtaatgaaagctctcttgtcattcgtgtttctcattttgtatatcgaagctaagtaatctaaacccttagggttggttctttacttttgaatgaatgtttggtgtattcttactaatttcgtaacgtttttcatatggttggtttggtataatttgtactatgttagcaacaacaactatggtttttgtggatgcgagatctgcattcgatattctgagaatttggtctagctttttattgtaagagctaagcgaagataaagtttggaagaaccgaaacctttatctccaccttgtccttcgaacaactttagaggagaatgaacagtggctaccaaaacattcctcacagtgaacattgatacagtagagattttgttttcccacattgtttactctgaatttatttgatgtctattcggcccataccataaaatgcagtatatcataaagaagattttacataagatgtctaaaatatacttccataaagccaacgactttacatatatgtatgtaatgcatcagaaacgagactacaacaatcccaaagcttcttcttttcacaggtagtgacttccttatactgaaaattttgcagaatcccaggacgtgatgacaccatctaaccttttgatgatgtctgattcacaagcataccagttaggtataatcttcaaggcgtacgggtacatatctttaaccgagttcttgatcgtattctccacaacttccgcaacgatgccaatttctgcaaaacacaacagtcctcagcacaattacttagatttaacaactaaagagacagtaagccctaactttgtagcggaagcaaagaaagaagaataattcagttacctctaataggtttcctgttggtctgagatatatgagagatcatgaagataattgctgcaagaactgacttagggtttctccggatatcgaaattctctgctttctcaaccgcttctggaatcgccattatctctctttgacttatatcaagtttggaacagaaccggcgaacgagttctccggtgttgataatcgcttgagaagcagacacggaggtttgatgtgactcaagaacacgctttatcaccagactctctttccggatatccttcttgtccacaccattggcaacctcagcgatctctttcaatgtcctcgagagttgcagttcacgacaagccgttgaaacagaggctgcacatatagcgtttagcttcttccctctacgtaatttggtgttagcgtgaccatcatatttggagacaatctcacaagccctagagttgattacgatatctaggtctagtgcatcggtcattctctgtatttcttcgaaggcttgcttgattaggtcttcttcatggttcttgacttgattatgtgcacggaacaaagtggagatgtcatctttggacagaacagaggaagcggtttctttaggtttctcgatgatggtgacaagatcgcctgatttgagaaaagggtttgtcgcagcaccaacacggtttgggtctctgtcactgtgattgtcgtcggatgcgaaagttctccattcctgagagtattcgatgatgtgagcttcgaggacaaggccacactccgaacagatggtgtcaccgctactgtgatcaaccaccattatggttggtctcttgcagtccaagcaggtctcttcttccattaacatatttttagggtttctttcttcttcgtaaattgttttcagagttgatttgttgatttgttacccaaaggccaaagcagagtatttatagaggatgcgagtaaggtaattcttttttttctaataggattttgatggttttacagtgttacaattttactattaggaaaagtaaagtttcttttttattttatgaagtataattatttcaacggaaattaattagttaccttttttcaattgtttggttatataaaaaacaaatatttttataccgagacgagctgttgcccagtggtaaatcttctaggtacatgtgttagcttcgaggcacatcggaagaaatctcttcttcaaaaaaataaatttaacctgctgtgggtcttctttctgggagatgtagcgcatttgggtttgagattcgagatattcacacataaaaaaaacaaatattttgtaaccataaaatttatacatttataaattttaacttaatgaactgtatgttattgttcctatattattaaacggttaaattcaaatatagcaattatacactaaataatatatagatataaacgttgtacatttataaaatacaacaaattaaatcatgtatattttcaatctactaaacaaattaaaatttcattaaaaaaaaaaaattatagtcccgcgatgtaccacaatttaaaatctagtatgttacataagattattgttatttacatataatatatagtggagatatgtgacagagatacagtgaaaactatatcctaaagcttatttttctgattcccttaagattctccgatggatatacacatcaaaactatcttttcttacccaaataatctgatatgatcacagaggaagacaatgtagtggctctggtaggttcattggcatttgtatcgcaacagcgtatttatgcggaataagtcttttaaaggtctttgcgcggttatgaaacttgccgagatggtttatcatagagaatctttcgaggtcttggatttcaaagatgatgtctaatattgatgtagtcctctctaaactgcatagacaatttgaaagagaaatgtattcttaagaaacattatctctcaaaaacaatttatgactgatccatccatacctttggaagttgctttcaagcttctgtattttctcattgaaagcattgacaagtaaagaatgttgctgatcttgattactagctgtcttcgaagtttgacgactgcacgaaaactctttttaggtaagtgagaaaagcttaagaaagtgaaatcaaactaaaaccataatggaactcactttatgctcttatccaaatccgagcgacattttagagaacatgaattagcgaggttgattctcgacacatagtaaagcacgatttcgtagttaagagctgcgttgtcgcccaagaaaacaaacgttggtgctggttggagaagctgttgcataagatgtgtagatgaaagaagccttctctttgatggagatatcgcctcatttgtatcgaccttagttatcataaggcggtaacaacaacaaaatcaaatatccatgtgaagatcgacatggaaaattacttaatgataaatataagagtattgaaaccttctcacttagtgtatttgtcgcaaggttccattcttgttcagcaattctatagagagcaaatgtttaaacgtcaaatatggcgaaaacaatataacataatcatcatcttgaatgtggtattaaattggtctgacgaaatgacctgatgttgtgacataactctgaaccttgtagatatactttgtgccatggtgattgtaaaaaggttgaactcttacgcttcttccgtgttgataaaaccatgttttggttcagagtgtttgatttggtcagtccagagttagacttacaagtataattgtatatcccttgcattttcggattattttccgccttcgaataccctgcattacacaataaatggccaacaatttcagaattttggcggacatagttggaagataaagaaaatatcttctaaagaacatttcataatccttattgttatcattccaacgatacagtatcttctacactatattttgtcacataattgaaagtctacaagtaaatatatatatatatatatatatatatatatatatatatttatgtcaccaaactttaaacaagctaaagaagatttacttatatacatatatgtagctttcgatggttccaaacagaacaaaaacaaacattatacaaaaaaatgctttgttactcaaatagtgaatgcatgcaaatactgtgaagacaaaatataaagttcttatgaacatctgaaatatatcagagtctaaaaatgacacatttccagaaatttttaaaaaattgagagaaattaaagaaacaagcaaacaatagctaataacaatatccagaaaaaggcagtggcatttacctatgaagagcatgattataaaatttggggaaatttcagtttctttcagtcataagttttctgggaaactgaagtagaaagtctcttgttacgatctgcaagaaaattcagcatttgagaatgcatgcagtaactatgaaaaacgaaattatcttttgtatgaacatgcaaaaaaattttaacatctgaaaacagatatcagagtaacaaaatttggagaaagaaaaagatttggagtaaaattaccaagaagagacaattaagagaggtagaggagcactatgatcggtcgagtaatgcccaagtcccaactatattttgggctctaaacccaactataggccaacacgtttcgaaaaacgaaatgcaatttaaagaatatttcaatcaacgaaactattttacttctttcttttgacataaaaaaaacaaaaaaagattgcttgaataataattataattagattttaaccggcggtacaccgcgggactacttgttttattaaaaaaaattgaaaatataatttttttataaattatttatatgtaacatattgttttatattttataaatatataattttaattttgatatattgtacaatcccttgattttatcatgggatacaccataagtcgatttttaaattatatatgtttttgttaaaattgtttgttttgttatatattttaaattatataactgtattttaattgttagttataggatttcacccattgtataccgtctcgtattactataaacccaaatccgtcttacctcagtgaaattaaatatatttaatggattttaccagtggtatactgtctcatattactatcgatccaaacccgtcctaccatctaaccccgttcagtaaaattaaacattattttattatttttgttttaataatactttaattttaaaaatatataattcatatcaatttaaattttttatttaaatgcttatttaattgttataaagttcatatattataatattctaaacccgtcctgccatctaatcccgttcggtgaaattaaatattattttttatttttcgtttaaataatatttttattaaaagatttataattcaaatcaatttaaaaggtgtctttcaaatggttatttaatttttatagatttctcattttataaatattctaaacattttttcctataaatattataaacgtttaattaaataactacaatatttaccttttaataaagtataatattaataatattgtgaatgattatgtgtagctaattttaagaaatttgatttgaagttttttgtttggattaaatttgaatgataacgtgattgatattttaaatcaagaattaaaaatcaaatcaaataattaagaatttaatgccaatggcatgccattgtaaataagttccaactatacgatttattttacaaaatggctgcaaaaatgtatatgtagatttaattacagtttttgaattgtctagtcatgatgtaaactcttaaatttaattaaagacaaaattgtgttgtctttaaaagagagtatgtttcagaaaataaaaataatatatgttacgttcttataaatgataaacataaattagatatgatatagaaatatttaaggttaatttaaaagatattatcatgattatagaaaatattggtaggaataaataacgagcctaatttcaaccaactatattacattgagacttgaagctacgattttttgaaaccagtatgaatctccataatttcgttttctacaattcttatataattcatatttgattttgattacactgttttaaattttattccaaaataatgttttctacaatcttggtaagattcatgttcactttcgatgttcattgtatgtaacgttatttatgatatttattattatttagactatgatatgtgatgcataaataaaattccgtggaatttagattcgattttggtattttatagttataatgattggattcatattcgatttgattatgtattatgatattgtaatttgaatatgatataattgtatattgtgtgtactgaattttgattgcggtgttcactgtgtttgatttttctttatccattctatatcaatattcaatacattttgtcctttgttttttttggtcgaaaatatattacgtctttatgatttacttctacgatttcttaaacgagtatacatcttcaaaacatttgttcttcataactttgtagtaagaacctaaccttattgttgaaaaaaaaatttcatatgcgcttactgatacccaaatcataagagatcaagcaaacatatcagatttctgttcttggtggttcagtgatatatgtcaaattaaatctaagaccactctctcaaatctctcttaatataacacttaaggatcgatttctacaaagttttttattcaaacataaaattatttatctcataattaagcaaaaccaaatgagtaaattaaaaacaaaaaaaatagattaaattgattgtaaattcagatgattaaaacgtcatatttaggaaagttctcaagaaatagataaacagtagatttaccaattagataggattattagcaactgttttagaactcaaatcacaaaagtataactttgttcgtaacttatgtttcaatgaaatcatttagttctttgatttttcaactttatcttagatttcgaatttttgttctattttaagtccaaaaacaagaaaagcctttttaaaattaaaaaaaataaatattgacggcaggaccaaaacgaagttgtagttgaaggagttcaaggaggagttgctgaaaacaaaaatgaggttgcagctgaatgagctcatttccatgagattcacattgctgatatatgggcaaatgacaactggttgttttactatgatggagttgatatgctacaatggtgctactagtgtcagtatacttcagcctcgtgtgttggaaggaaacactattaaagctgcacaaatagttatatatgtgtttgcatgcttatagttttaaacttgtattatttcatattaactaaaatcttaaattaattgacgagtgcacaaaatgttcaacttgttagaagtgttatgagttagttttagtaatttactactgaaccactagaaagttttaatagttttttacggacaaaatttataatatgatcgatatcacggaaactactatcgaccattctaccggataagtgattaagaaagtattatctgaaattattttaataattaaaaataaatccaattaccaaaaacattaaaaatatttttaagctaattatctcctaaaataataatccatatgctcaacatttttttacatgcacctctcatttttcactttctcaataaaactccaaaattatttttatttataaataaatcccaactctttcctatctatcaaattaacccaattttagtttagagagcccaaaatttctaatgagacccaaagtttctcaattttcgtaagggcaaaaaagaaaagtttttagaccgtccgattttgaatcctttaatctcttccaagaattctgaattcttctcttcgtagtctttgaatcctaaagtaacaatctttcgtttcagagcacgtctgtaagatgacagaggacaacgatgaggctagggttcctctcagcgactcgtctacaacgaacgatgcttctcgaacgagacaaaggtatcaactttcattgtttaaccaagccaattatcagcttcaatctgatacattttttcgtgaaattgacattgagttttaaccattcgattcgtgcccttctttggattgttacttcaactacttcgattttggttttggaatctcttttgtgaataaagcttttggcttttttgatttttgtctctgaatcctcatgtttaggctatggtatggtaatctctagtctcttaatcaattttgaactgatagagaatcttatgaattgtgaataaagattgtggcttgtttgcttttggctctgaaacctcatgttaaggctctatgctcatctttctagtctcttaatcaattttgcttctttagtttttaactgagaaaattctatgaattatgaataaagattgtggctttgtttggttttggctctgtcccttatgtttaggctatgttcatctctaattcctaacctgtttgcatctgtagttgttaactgatagagaattttataatttgggtggcaggagaaagagaaagtgggataagccagcggagcaacttgttgcggctggagttgcgtttcctcagttacttcctttaggcaacactatgaatgttccttctatgtcaccattgctccaaacgctttcggtgcctctagcagttccaaaagttaatcaagtaaatgactcttacgctcttgcggtgtttgttatacttattttcgggtctaacctttttctcacttagctattgcattatgtactatggtatagatgatatgtcatgttttcatctagtttggtgtcttgatgtatgttcttagtgaattgtaataccttcttaaaattgttgcatcacttgaatcatgttgtcccatgattagtagttttaccatgtattggtccagttccctctggtcatgtatgagactccacaagcacccgaaatatactgtgtttgtgactttaacattattgcctttatactgaacgagctgtttttcgtggatacgtcttttgtctccttttatcctgtaattcaaacatggtgattcgttgtaatttttcttgcatgtggtatctagcctaaaatccaggatgaggtgatcatagcgcgagaaattgttatcaacgatgctgaggcttctcttaggcacaggcttaccaaacgctcaactcaagaagatgtatgtgtaactttgctatgcgtattagttacacttttcctatctctagtttaacttctattcgtcgtgcagattcagaggtctaccggtgctgtggtgattactaggtttgtacaacatccaactcatggagaagaaagtcttacaataatctttctagattcaattgtttaacttcttttgtaggggcaagtatcgtcctccaaatgcacctcctgatggtgaaaagccattatatcttcacatatctgccgctgcccaggtttgttatcctttttggcctaaaggatagactctataatatggcagaaagtaaaacgtttgtggcttaaagaaattcccatattcatatttgagaagctttatttgaccgcctagctttgagatgttggcctggtttttacgtatgttattgcagttgcagttaaaagagactacagaacgtatcttagcagttgatcgtgcagcagctatgattgaggagatgatgaaacagaaatcaatttcacagatcggatcagttggtttacagacggtcaaggtatatactgcgtgacacttcttttttgtagttatgaaattggaacagtaagaaattaaaccatatttccagatgctgagcacatgcgtatatttgggtttcgaagctgacccatcatctaatgttgctgctcgtattcgtgggcctaatgtgagtcttccttcaatatctccccccttgcttctttctaatttacaccaaaagaattgaatctacagtctaatatcaatcaagagaagggttagccatttggtgttaggttttcatctttgattaatagttgcacttttttttatttgtctcaatccatgaattcgagagattctaatgttgaagctctctctgacatctccgtgcaatcgggagagaactttttttgtgttggtggtggttggctttcgtacatgcaggatcagtatataaatcacattatgaatgaaacaggagcaactgttgtattaagagggcgtggttcaggaagccttgagaatcaacatggagatggtaatatttccttcgtttgtgtttttatttgcctacttatgaaggtgttatttacctcaaggtggatgtatctgaatgatattgttaatgtaaatccctttaacgcattatggtagaagcacagctaccgctgcatctattattatccggcagcaacccaaagagcatcgacgatgcaaaacgtttagctgagaatcttatggatacaatcagtgtagaatttggggcttcaaggttaatttttccttctatgtcttctatattatattcagaagcatgttcctacatctttgtcatttcatttgctgatctgtaattgtatttggttttgctacaaaatgtttcagggtttcctcaagcaaggtgtatggtgcagtaccaccaccacagcaactgatttctggagctccgggttctgaccaggagaaccaaaatttgatttcaacgtatggtttgatgacatcgatacccatcacagcaccaccatacgctgttagttcgtttccagttactccagcaacaagtctttatcctcagtttccagtaatgcaatctctaggaatatcaaatggtggcccctcgcagcccgtggctggaggaactagctatagtgggtatgctggaatataccctcaagccacaccattgcaacaagttgctcaagtccttaagcaatcaatttctcctgttatctctactgtgccccctactatgttgacagctacgtccttatcgatcccaagtgataatgcaagtaatgaaatggaaaggcgtccaccccggaagcgaaagtttcaggaacttccagctgattgtaaggttccagaaaaagacaaacaggtaaaaaacattctgtatccgcggtgattttgacgaagaaatacatggattgaaccctggggtcttccttaactaagtaaccatgataaaaatttgtgcttagggttgtttgtaaataactggggtcttccataagtaagtaacaatgagaaaacttgtgcttagggttgtttgaaataaaattttgccagtattgtcaggtaagtgtttttcatagacaaatgattaaatactttgggtagaatgagaaaaggtaaagttttttgctaccctcactaggcttagcatgcatcttcttaagcatgtcatatgtgcacatctgcgtctaacagtattaaacctgtttatgaaatatttttactggggattcaaaatatatcatgagattgtaatgaggatcatgaaaattcatggtttctaatactttctttcagtttccgtgtcatgtattttatcttgtgctgattttttccccttactattccaggtatttttctgaacttctaagaagctaactagctgattctggacccgtgggccattggtttgcatttttcacagggtatttttgatattggaggcaccatgtggtttggagtcattttcgcttcaacttggcgatcagaatcaaattttattcagacttttaacgacttgtcgtgtcccttgtgtgcattgcataatctagtgtatctgcactttagtaccttgcatttaagttggcattactgacatctactattacccttatccattgtgtaatagcctcattcttttccgtagatggaattctgtgcttgatatagcagtcacatgtctcttaatgcatgtagttagagagaataattaacatttgattgaccagtataaacatatcttaggctgtcgttagtaccgagcagctatgtatcttctgatcttgtaggatattagtgagcttgtgactgtttgaatgaaaatgtttgtttgaattaattttgggcatgaatgttcttgtaaatgtttacatttaccaaactcgtctccatgatttagcattcgggtacatttttcttggatttgaaagtgttcacattactctctaggcttttaggaataccatctgttcatagtttatatatatgcagtcacttttatccgccaaaacgtctaactgttgtagtgtatatgccgatgaatgttttaattctatcatatgttgcagcaatcggagttagcaatgacaggtgatgttactccatcagcaaatagagtgcggtcgccgccttcaccaagatctgtaatgcctcctcctccaccaaagaccatcgcaccaccgccttctaagaccatgtctcctccatcatcaaaaagcatgcttcctccaccaccacgttctaagaccatgtctcctctatcatcaaaaagcatgcttcctccaccaccgcgatttacactgacaactcaacgttcaagattacaggacaaccacatcagtgtaaagaaaccaaatccagttccaggtttgttagaatcataatcaatccttggaaaactcaccaacaacaaataacgttaacttggcataacctagcaccagacttataatgatcagtgcctccctaatcttgcagatacgttaataaagctgatggaatatggagacgatgaagacgatgatgacgatcctgatgagccattgacaactagatcgtgacagtgtattagattacagaaccttcttatctggcaacaaaatgtcaatttgtgtttgtaacaatagaaagaaatgttggtctcttactgatttggaacttcattgcctaaggctattagttaaatatttaagacattagctacttgttttgcaaggcactgctcgttttgttgtatttcttatcattaatacataatggttaaccaattcctagttatacattcctataattatatttgggaaaaaacccgaaaaaatctcgatctaattttaatttgcccgtttgatatctctattattaaatttgctcgaaaaatatataagttaatttttatgtctattaaaaacatttgtttttaattttttttttgctaaaatcagatatccaagttaacggccattaacagtggtaacagaatccttaactgcagttaaaacttaatcgtatggtatttacgatttatatacaattgcttttctatagttttaaatataaccgtatgatatttactatttatatacaattgattttctatgatattaaacggataaataaaaattagatgaaagttttttttggatttttcccaattatatttggattctataataatcacttacaaattctaaatatctttgagtactttttcctaaacaataacgtcttgtgaatatattttttttgtttttttgtagattatctttagggtgaattagctaaataaccaattcctggaaagatactaaaccctaagataataatcaattaaatattttttgatggaaggatactaaaccctaagataatatatagggaatccaagagttttaatctaaaacaatgattaaatcacttaacatccttaatcaaaacaaacaattcattttaaaacgtatatagtacaatgtatacgtaaatagtatattcacaaaatagaatagtatctctcaaaaatcttccaaaatcaaaatcgatttattggctatttccctttagaatttccaacatcgtaaaccctttatcgcttctagatctaagaaatccataacatgatcgtcaatttgctgttcataattctcaattttattttccatggatttacaaattaaaattctcatatgaacttcgatgggaaagtgaagattaatttgacataattggcgaaaggatttccccggatttttctagtattctctggctgacgaagaataaatatagtcagagtattattgcgctaatggtgttgttataaaatagagtaaatcagatttgagtgatcctatcgacatttaagattgatccatatataattttgacttttgttcagttgatggtgatgtatctaaacaggggcggatctatgtgtatgggaggtggggcacgtgccctacactaaattataaatattagcttgtaaatttaagtagtttaaatgattcagcacaaatggttaaatgttttcaatatttgtccttccttacacaagttcaaaactagttgaagtaacttttttcttcttttgacttttcttttttcttcccccactattatcaatttaattacttgtatttcttcttttgatttatgaacattcacttttaactttctttgaaaatttctttattaattgattaaatagtatgtctgctgatatatttctaaaatgtttgatatatatattcatttacttttatgtgaaaatgaataacaaaattatatgtacacaatttcatagtttttccttgggtacctatatatattgtgagaaacaaattacagatttgttgaactacatattttatcacaaatttatagtttagtaacgaacagtatatgtaataattttgatagaacaataatatataataagtagattaatagtgccctaaactaaatgtttttctagatccgccactgtatctaaagattcgtaagaaaagggagagagagatgaaaggagcacacttcataaaagagaagaagatttattcactaggatgtcttttgaagaagaaagaagaacgagagcgagatgtacaaacacagtaagaaaagggagagagagatgaaaggagcacacttgataaaagacaagaaaatttattcaataggatgtcttttgaagaaaaaagaagaacgagagcgtgatatacaaacagaggatagtattgtcaatattacatatattatacataatatctctttctattgtttgaagtgttagtttaccaattaaagtatttttgttggttatatttgccaattcccattatctttatacatcaattggtcaagtcaagatcatatattccatatgcgattaaattcataattttaatttaaaaatggtattacagtttgcagatgaataaaaatattattgaccattaatttaagtaagaaagaaaatcccaagttgagttttcacaaatactatttgtcaactaaaaattccaaattggttaaattattatcaagttgtgttatggtgtgactccatgaaacgtcgtggagttgacaaaagacctttgcaaacttgtgatttggtcaaagtctatttcttttgacttgtctcttactcctaaattcattcatttcattttgattacaattcttttccaaccataattgataattctttagaccaaccaaatcaacaaagacttctcaaacttttatttcactatagatattcatgaaatgatgaatataaagattacacaaggtcaaataaattcaatacaaacaaaacaaattacatatatttctatacttgtaacagtaaaaaattatcatcataacacaatttatcatcatcttctataagaattgttcaaggatttagaagaaccagcaaagagatccaacaagagtctctcaatatcatcagtagtgtactttatatacctttcactgacactgttcttgtgtctactgtaaaatgtccaatacgcttgaatcacccacatggacgcctttgtccttacatcttctcttagcccctcgtccgaaattagccatccggtttgcgctttgtacacttcctcgaacgcagtgttgaatccttggaaccgctccctcgggcgtagattctttgaaccagaacctgagccagaaccgggaccagaacctgaaccatcgtccttgaggaacgataggacagggagccaggttgcgcgttcgtactctgttgcttgctgctgaaacttccatgtatgttttcggttccatttgtcgccgaagatgtgtctcagctcggactttagcactttccgggtcatgtagtgtatgttgttgaggagaaaaatgtgttgtagagagacatctttgtatagttttgatttctcttgaaggttggcttcgaggacagaggttatggagtagaaatgtcgggtcattgccagaaatttctccggtgaagaggagttttcgtaggtagactcttcttcgaccatcacgggattgataatatccggcgatggtggtattgtgagatcttctgcatcatcatgttccattagaagagagtcgagcgtgtgtttgaaatctgttagagccatgaggtaattcatcacgtagtttgtaagcgggtgaaccgcgcctccagggaaaggatgcgatgagacatccgctgcaatcgcacttttgaattcaagaaacgttgttcttgcacaatccccaagtctcctcatcacttccctgtattcggttcttacggacgaaccgggatgatccaagaacaaagcatcgatctctggtaaaagctcagatgctagctcatacatttcaagaatcctaagcaatttctcaggttgtcgtggaccaagagacacagcttcaccaaaattaagcaactgcatcatcggagccttcacagtatcgacgaaacatgttagaccgatctcattcaagtctccaaagatctgattatccagagacttctcactcaagagatatacctggacgatatctctcataacccgaacccatttcttgatattcgtattcaacgtcgcccaatccatcctcaaaacatcttcaatactcaacttctcaacctcatggttatacaaaaactcatccaaagcatcttttctaaccattgtacacacctgaatacactcacggtcataccctgaagcaatcatagtattcgcaatgttcttgagatctaatataacatcaggattcaccaaatcaaccacaacgtcccctgagtttctcctactatcattattacttccaagaatcaaatcctcagtagaagcagcaccaaaagaagccatggactcttcctccacaccatgatccgcttcaatagaccgaaacgacgaatgttcaagctcaaaaggcaatctattctccacaagaagatgcttaaactcatcctcaagccgtgccatagctatttgaagaacatcatgagcttttcttaaagaaagctcctcacttccgtctaaccgatcaatcaaacttctcaactcattcacagcatccaaatacagattaccttcatctgaacctaaatcccaaatcattgattcatcgacttctctagtcataatcttctcactaacaacattaagcctttcctcaatctcacctatttcatcttcctcatctctatcctgagtatcctcagctatcaccacacgagaaagctctaataagagattgcctaaaacattcttagcatttttagtaagactcttaccagatctaagttccttaacaagatacttagcagcaacaatcagtttctcttctccatctacctcaaactctcccatctccacacaaatcactaaacaagcttatccaaaaacttaaaaccccaaaacaaacttaaatctctaaaccctaattctcaaaactttgaacccattcaaaaacccagaagaaagaatcacaaaagacttcaactttacatgaaagtttgagactttggattcagaacttagcaaaagaagatctttttgaaagtgagattggtgaagaagaagaaacgtatggattgaagaatcaatttctttaaagattgaaaaatgcaaatctctctttctctcttcaaaatgattttttttggatttggtttgatttttgtttgttttgtttctctctataagaccacaagaacagaggaagaagattcaacggaagaaaattgttgacgctgtattatatgtattgtttattatccaaaaacagttgattatttaagtattggattattaaaaatttaattactttgctaaacatactcgaattctaaacatgtgcacaaaaaaattaacacaaatggtgtttttttttatcaagattagttagataaaataaaatgagacagtttaatagtcttggatgtatcaattctgatattttgaaatttcggttttcgttctaaaatttagcatctattcggttattttgctttaaatttttggatatttcgattattttgctttggattttcagatatttcagttattttgctttgaatttttggatatttcgattattttgggtattttcataaattttcgatttgttttttgcatttcaactatttttatatattttcaaatattttcttttttattatttagtctatacaaaataactaatatttggatttataattgtattttggttagttattgttatccgcaatattgcggtttgataccgattcgatttcggttctttcgattctagagtttagtattcattcaattattttttaattttctgtttggttcgattaaatttttttttcttcgattttgatttggtatattcagtttagttaattttcccatatctatagtctcaaatgattttaatatgcgagaaaagaatttaaaatataataataaaaagaaaggatttgactttgggagtggtaatgcaacattagtggtgaattatgtaatcgtgcattattattgaaatactcaagaggatatttttcagagtgagattggtgaagaagatgaagaaacgtatggattgaaaaataaattcttttaaagattgaaaaatgcagacttccccggaaaatatctctttctctcttcaaaatgattttttttttttttagtttttggatttgatatgatttttgttttgtgttgtttcttttctctctataagaccacaatgtcaaattgtcaataacagacgaagaagactcaactgaagaaatattgacgctgtattatgtttattgtttattatccacaaacaattaattattaaatatttaattacatgccgtcaaaaaaatattaaaaaaaataattactttgctaaacacactcggtttctaaacaaagtgcacaaaacaaatgaacacaactgaacactttatgacctctttgtacttccgatcaatacccctttcataatgacgtggaacacaccaattctaaaaagaaaatttatgactctgtttttcctatctagggtctatttggggatgttgtgtagcctttttgggggggttctctgtttctttactgttgctctacggcataactaatgtcacccaggtatctatcttatgctgttaagaactttaaacacatccaaactaagggggtgtattggaataggaattttacaagacttttgttttttctacaaatcacatgttattcaactaatgatttctaaattccttttaaaatcctatgttattgaaaatgaaatttgtgtaaaatcattcaaaatcatttgtaatcccttgttattcaatcagtgattcataaaactcatatcaaatccactgttattcaaaaattaccagttttttttaagaagaggtttaaaagaggattttaggagacttcagatacatttgtagttgaaaatagaggccaaaaaaaaaataggtgggatttgagagttttcagttttcacataaattttaaaataatgtttatattaaaaattgcattaaacaaaaagcctacctgtatcttcttctcctcctctccatggctttgactacgtacttctttgttttcaacaattagttctctcttttttttgtgtgtctaaaatcaatagtttgtaaattctctagggcatttttcgaagaatatattaaccatggtgaaattttcgcagagactacgatgtcatgggggtacatatctttaattcattttaccaatatagtggtcaagtagataaagcttcagccatgaattagatggaaattaagagcacaacgtgacctatacaaacttgtattcaagaataagtgctgctctgaatcaataatccataatgcttcatcccactaatgcatgaagctttttacatacttctacaatagttagtactcgtgtgataagcaaaaactttgatcaaaaactttttactagtcttgacaaaagaactaataatttatctcaatattcaagagttgtttaattgtgtatcggagaatcttgagattgatgtgagattaatgtcatgggataatgacaaccatgtgatcaagctggaacgagacttgagtttttggaggtgacgagagaaaaataatcacacacaacaccaatgtgacaaagtttaatgataaatctcaccaaatcactagagctttgtttttgtagttacataaaagtctatacttacaacaaccaaagattttggattttggattaaatcatctagaattaccttaaagcctactaaaatccctccaaatctaaattccactaaatcatacaaaatgtttagtccaatacatccccctaagtattcatgtttaagagtatataattgaattgtaaattaatataatcgaaaagtattccattatattgattttcaatttcaattaaatcgaattgtattccattaaattatgagaagttacctttgagacgcaactattaatatcaaatatattaaaagttataacggtttggtaaaataaattaaagaaaattcaaattcaaagtaaacatatacaaaacacttattcaaagtcacatacatatataaaaactccttatataactttttataaatgttcaaagaggtattggatggaggaacaaagacgcaataagttgtaagagcttttgatcaggatgcccaaatccatcggcttctttgtaaaacaaatccattacacgcgcaatgttgacgggtcgcaccagaatctgtcgtggcatagctttggacgtcatgaactcctcaatcattatcttataactctctctttccatcttcctcagttcttcaaccgctgcttctttggtgacaccatgttgcttcatgtaacagttgacaccatttgccacctctcctctgctcatctcttgctgtttattgtattacttacattagagatcttccaatagtacctaggaaagaagataataattaaaacttgtgtacgtacctcgaacgtgacaatgtcatttctgatacgaaacagagcattcaaggcatgaaagattttaggtttggagtaaaaccattccttcaattgcttctgatcacaatcgtccattgctataaagccgtaggatgcaaagtcatccaatgcagacgagggtgtcccaatctccatgtaatcctcaaagcttggcacttgatctgagcgtgcccattttgctatcccaagataccatatcatcagactcttgatctgcaaggatcgttgtcctttgttaattgacttttaattggtttctactcttgctactacttgagttcgatcaacttacctcatctatggttagttgcaaccgaccatgttttcctcgagctatcatttctcgatcaatatcttccacagtctcgaacacactttggtagatgattctcatatacctcggtagttcttccatggcacgcagatcccatctggacatttgtttctggttaaatacattgatatatgataacatcataaatgcatgagatcttggcatgtaggaggctagtgaaacaatttttgtggccctaagttttttttttttttttttctaaaattcattagccaatttagtccaaattttcttaagcttaaaaaacaacatgatttttttctttaaagctttggcccaacaatttttagggtcgaccctgcatgtatgcagaatggttgtatataagacctctacatacatacctatgaaaagcatcatgaagactctgaacttcaggaagagtggcatatgcatcacatgtatcatccacaacagtcatgatcagtgttagtttagctaagaaaattcttgcaagtgaatatcgcggctcgaaaagcactcccaagcccccaagataagtctccacatttcgctcccttatggagtacggtagcttagatgcgatacctagctccttccaccatctagaaccataaattaggttacataaaaaagaatattgacgacgaaagatgttatatatatacaatatacttacctagtgacaattttgagctctttgacgtaatgcatctggcaaaaattgaaattgagctttgaaaacctaaggagcgtctcatcttggtcttcttcttgatcatagaaagagatgtactgtcgtgctactagtatctctatgctatgatatcgagctctatacaaaacgttttctacatgcttaaaaagattagagcttgtttcggtgcctgccaacggttccaagtgataccgcgcaaaacttaaggcttcatccattatatcttcagatggtgctcctagatgcgcggcttcgtacagctgtagcagccctctaacatccccaactaaactttccttaaacttcccatcttcgcttttgaatctctcgaacacatctaccccaaaccattatatgctttgttatatatatttgtgaaacaaaaaaactgatctaattaactggtttaaataattgtcaatataccgcaaggcatcttgtgtccatatagtctgaaaacctcaaacatgattgctattgtttccaaatcatcctcgtccgaaattaagcaggccaacttcccgtaagccttgtgtaaaatctcctcgatttcattctcatagtaataagcgataccgaggctgataagcaaatggatgagacgaatcctctccttgtcgctgctgtgaggagacatgagcatgtctctcactttaggcttgaacaccgtttcaatttctttctcaagtgcctcaaattcctacaaatatgcaattcaaaaaaacaaatcatgtactctaacaagacatatccactaaaacacatcggaccaggtgtgtacttacggagtcatcgatggaaacagagaggaagtgatctccccaataagatggagaaaagtacgtcaatggacgagtactctcaagatcgccactagtctcagccttaacacggaacaagtagtgttttgtggatttcttggaggaaagagattggctttgaagcaaacggcaaggaaagagagagaagttggtcttcagacagagagggacgttgtgaatgatagggagagttcttggaccaaaacattttgatgcttccatttttcagacactctcgttacaagagagacacgagatcaaagtctttacttggcccttgtcttaggatgtatgtgttacttcactgccccatcctactctgttttaaatagatcatggatatggtggagaaactgtaacttcttgactactttggtgacgacaattattattattattattattatttttgatagctggtgacgacaattattgttatttatttttattagaaaggacacttattgttatggcacttattagtgttgaataattcgatttttttaattatttatatatatatatatatatatatatatattttgtaggctttttggccaaaaatcactatactatttactaaataacatacaagccttacaaattttatcttaaccaaatattttatttctaagaacttataattcgttagtttgcattaaatatttgacttaactatttcctctattacatatatagtcgctacaaaatctatctaaaaagataattgtttaaatttatatcacttttatattaacaaatcttatctttattgaactacattcaattaattcctaatttcttaaaatctccctatctacattaaatataaacatataaattttctttcacttttatttgttcttatatttaatttatttgattgtatataaaatacatataattaataaaacattagattttttctatatataatgtaactcaaaattttaaaaacagtcatatattactcaatcaatgaaaaaaagtgtcaaatgtcccacattgcttaagaaattgagcaatagttcagagtcttattattaaagaataaaactgattttaaatatgaatgagccgaaagttttatttatcaagcatccaaaattaaaagtgttatctagtttattttgattctatattttaaataaatttgtcaagcatccaaaataaatttattttttctaaaaaatcaattagaaataaataaaagaagtattaattaaagacatgcataactcgaacatgggggttggttgcctatctactttccgtttctgaggcattaaaataaatttaatttagtgtacttcaatgtaaattgaatataattaattagactatacttgatccatcggttaatttattttattctgtaatgtcccgtctatttttctaggaatcgtacaagtacaataatatatatatatatatatatatagtacaagtacagtaatatatatatatatatacacatagtacaagtacaataatatatatatatagtacaagtacagtaaataaatgtgaaaatttgtgataattattggattagttttgtcattatactaacatttgggtgttatattcctaagaccatattcaatggtatgagtggttgagggaatcttaccaattttttaatttttaaattttgacaatttgaaagtttagcaattctattggcctcttaacaattatcttgttcaatggtaaggtccttaagaaataaaatttggtgtttggtgttttgaagttttgaatagaaagataaaaaagagacaagtgaagtttggtattagagtcttgataaacacattttgaataacagggattcatgaaaaaaaaaaaatatacaagaggttttgtattaacacagattcatggcaatacataacaataatatgacaaagtatacaaactgtgtgacgaatctccatgttgtaatcaccgccttgtcctaattccataaacttgatctcagtgttccctggattccacagtccacttgaaccatttcatcaaaaatgacacgcgatgttaagctgtgtgagacaataacaaagtttagctcatgagacgggttgatgtggagtctgttcatgtcgtcgatgtcttcgtagagacttgataaaatctgtacaacaacactcaaaaaagaccaaagcatgagtcttaataccttcttgttcattcacacagagattgatggaagaaaagcacaacaaagagaagataaaacaacaacgatgaaactgactagctagattcttgctaagcctgcattattctgacacttcaaatttcaatagagattgatgaaaaaaaaaatcagtgctaccttgcttctcaaaaaaaaaaaaaaaaaaatatttattgagttttaattttttttttggcttaatatttaaggattttggctttagaactttttttaagtatcattaatagcaccctcaatagagggtttttagatagtttttatgtatagaaaagataaaaatattagaaaatgaagagaaaataagaaaaaactcgtatataagagacttgaaattttatataagagccaaatgagtcacatgtcttcgttaaattgattcattttttaaaaaaagatttaaaatttaattatttcagtaaattataataaaataataatattttggtattaaagagaaaacatttagaatcctccattgatgatgcccgttggaaagagctattgccacttgctacaacagatcacataacaatcatagaacataataaagattttttcgcatttcattttattattatttattagtaagaaatcgagtcgtaacaatacgcacataagtgaaaatttttgaaaaatttgtcaattctttttatattgtttttaactaattaagatgttttttttgccgtaattaattgatatgttaaaatgtatatatagaattagtatttcaaatttatgtcttatatacaaatgtctcaactttcaaattttacatttttcgtaatatataatgagatgtaaacgataaaacctacatttcatttcagttgtattacatacatatacaatacttaaggttttagtaaatattgaggttgattggtttggaaagatggaaggaatttgcagagaaattgaacaaagaagtagacaaacaacttctagggtttgatccgaataatgcggcacctctggtggctgttgctagttacattgctggaagacacaattgagctcttgcaagttacattgctaggttggtttaataagactctaggataaaagttttatccaaagttccccactttcaactgttttatccaaaaatctataaattttcaatgaacataactacccgagatgtaccggatcaatctctaggatgtcattttgaaggaaaatgggatttagaaataaattttcaacccgcgatctaacaaaaatataaacccgtggtgtaccatgggtcaatgaattacccaaactttacatagattaaaattatgtttcaaaaatatattattcatatataaatattaatttttataaaaatatctataacttttaaatgaacatatccacccacggtacaccgcgaatcaatatctaattagcaacatcatttgttttaagacattaaatactttgaaaataaagtatagcatttaaagcttctaactttttgttgaattactcatgttttattttatcaaattgaagtactctctttggtaaagaattcctctacttttattggagtcattctgtatttcagaaacattatttgttgttaaactggtttttaaattactcagctttagtatctattatatttatgtatttcaaaagcttattttctgcattatgtttttactttttagttaaaaaccaaaaataataaataatactaattaaataaaatatagctaatcccctgttaatctcgaaaatatgtaggatgataatgtaagataaatcataaacgaatcttttttttcaataagagaagaatcttacctgccattaaagatttaaattatataaataagattatgggacaagaaaaatgacatacgaataaaatcactaactttctttatacataataacagccaatggcggaggcacaatattagtaaggggtcagatgaccgacccccataaatctttgaatttttgcttacaagcttatgctctatttgattattgtggtaaattgattgctttctaataaattgacctcatgtccagtggtcatatcttttctttgcacctatggaaacgatattatatttattcaactatatcttttgcaattatgttttaagaaataattactgaaactatcacaaaatatgtaaaatggaattatatatatactgtatttgatgaataaagaacaataatgattatcttttattttatttatttttaaatacaatgaattttaaatttttaaagttagatttttttagaaatgaaatattatatttaaatatttaattaaaactaaaaataaaatatgacccctaaacaattttttctagctctaccactgataacagctagacattgcatgtctatcaacaatctccccctgtattatattcttaatcagaacctcttggggatcacaaggaaacgaaatgaagattaccaaaaagaaaaagaaaaaaaaagtagaagaaaagaaatggatgatatcaaaggtccaaaaccaccgtagaggagtactctttttgttccttattaattgtgtttttagagaatttttttttttcaaaaagattgatttttatatttctatgccttatttattagttattattgatgaattttaaactgaaaaacaaataattgaataacattgatgtagaattacacaaaaatgtaaatcacaaaacaatacatttgtaaatcaattttaatataatttcttaataaatttgttttttctaaaaaaataattaaaataaataaaggaaatatgaattaaagacatgcataattcgaacatgggggttggttgcctatctactctccgtttccgaggcattaaaataaatttaatttagtgtacttaatgtaaattgaatataattaattagtctatacttatccatcggttaatttattttattctgtaatgacccttctatttttttagtaatcctacaagtacaataatatatatatatatatatatatatagtacaagtacagtaatatatatatatatatatatatatatatagtacaagtacagtaatatatatatatatatatatatatagtacaagtacagtaaataaatgtgaaaatttgtgataattattggattagttttgtcattatactaacatttgggtattatattcctaagaccatattcaatggtatgagtgcttgagagaatcttacctattttttaattttaaattttgacaatttgaaagtttagcaattctattggcctcttaacaattatcttgttcaatggtaaggtccttaagaaataaaatttggtgtttggtgttttgaagttttgaatagaaagatagaaaagagacaagtgaagtttggcattagagtcttgataaacacattttgaataacaaggattcatgaaaaaaaaaaaaaatacaagaggttttgtattaacaaagattcatgacaatacataacaataatatgacaaagtatacaaactgtgtgatgaatcgccatgttgtaatcaccgccttgtcctaattccataaacttgatctcagtgttccctagattccacagtccacttgaaccatttcatcaaaaatgacacgcgatgttaagctgtgtgagacaatcacaaagtttagctcatgagacgggttgatgtggagtctgttcatgtcgtcgatgtctctgtagagacttgagaaaacctgtacaacaacactcaaaaaagaccaacttctagggtttgatctgaataatgcggcatctgtggtggctgttgctagttacattgctggaagacacaattgagctcttgctagttacattgctaggttggtttaataagaatctaggataaaagttttatccaaagttccccactttcaactgttttggctgcattgctcttaggacatcagaattgtgaagatgagcatgacgtttgacttgttagttcaaaactcacttgatcctgacaaaaacaggtgcttcgttggtttaataagatggatgctcaaggaaaaaagttttacctaaagctccccactttcagctgcttttgatctaaggactgagcatgacatatgacttgttcaatatttacataatcctgacaatatcaggtgaaccattttatacaccagcttatgttatatgatttttctatggatccgcttgttagaatatgtacataaaatgtgacttattcgaccaaacccataattgaaaattcatataattttgttggcagattacagttttaagacaacagtaaggacgttgaccttcattgcttccaagcattcgaaacctattaagagctccacttaatataatattatatcggagaaggtggatcggccatggctactactctcagctcatcctctctcttcatccaattcagaggacggagatacaactccctatcatcattcaacaatctccaaaagcgcaccgttttgtcgctttcttgtgctctatcctcacaaggtggagacatgattccaccagagggaaaaagcaatgatcgcaactctgcctttgacttcaagtcgtatatgatccgtaaagccgaatccgtaagtgcggctctcaacgtttcggtacctctccaagaaccactcacgatacaagaggcggtgcggtactcattactagcgggcggaaaacgtgtgaggcctctcctctgcattgctgcttgtgagctcgtgggtggcgacgaggctactgccatgtcagccgcttgtgcagtcgagatgatccacacgagctcgctaatccatgacgacctcccgtgcatggacgatgccgacctccgtagaggcaagcccaccaaccataaagtatgttgttaaatcatatggacgctaattgctcacgagatttgaatcatttattgatgttagtatttgctcactagtgacgaactattttttggtcaaacaaggaatttggagaagacatggcggttttggcgggtgatgcactccttgctttagcgtttgagcacatgacgttcgtgtcaaatgggttggttgcccctgagaggatgatccgtgctgtaatggagctggcaaaggccatagggacaaaagggctagtggctgggcaagtgactgacttatgtagccaaggattgaatccagacgacgtcggattggagcgtctagagttcatccacctccacaaaacggccgccttgttggaggcagcggcagttttaggagccataatgggaggtggaacagaggaagagatcgaaaagctaagaaaatatgcgagatgtattgggctgttgtttcaggtggttgatgatattcttgacgtaacggaatctactaaggaattgggcaagacagccggaaaagatgtaatggccgggaagctgacgtatccaaggctgataggcttggagagatccagggaagttgcggagaaactgagaagagaagcagcggaacagcttctagggtttgattccgacaaggcggcgcctcttgtggctcttgctagctacattgcctgcagacacaactgatattttgcatgaactgaacatatcctcaaagcatctaatgtcctgacaagtccattcttagttttattattcaaaaataaaaataaggtccattagattgatccatggtcttctttcatatgaacctttgtcttgtgatcatcactttgtgttctcagcttgcattttagtattacgtttttgaattttaatgtcatttttcgattactaatatatcattaaggtttgcaaatgggaacaaagcaagtgggtacacgaggaacgtgtttatgcaatattaacctgcctcaagactgaatatctaatgttaaagccatgttgaatggtaaactcgtaaaacttataaccatgttgaatttgttcattcttaagctagctcaagttaagagtgtgcctctctatatcttaagaccaacctccgtatgtatacaggcctgaaccacagttgacccgatgtggttcttgttgcagaacatgatcactataacggttatgtgaccagttaactgaaaaacacgatagcttgtattctccataaaatcaaattaaatgattgtctgactttgtccattccatttttcccggttcacatacgtgtccaacaataaccgaagataagattagtatattgttaagctctgtaaagtaacgttagaagcagttaaatctccggagtagacgtattgagtatgagctgagatgcatcacagatagaagcagagatagagacgaacttgaagagttgtaactttagggattgtttgtgtttttaaccactatgtccagtatatggagaaacccctgattaaagatattgttagaaatccaaatgacgaccttacttgaacaggatctgttctattggctcgtacctctgtttccttgatttctcaagagacatgctcttaaccctggttgatgaaccataaaaaaaccaagtgtcattagctcaattggtaaagaccctaagcgaagttttgaggtcgccggttcgagtgacgtttggaacgaaattaatattacatgttgtggtttcgagcttagagaaattacgggattcggtccagaacctcctggtattcaaaaaaaaagaaatccaagtgaactgaaaatccgctgacaccaaaaagtcaatgggaacatctccttaaatggagatgaaagagatctctgcaaagagattcaggaccacttttagcgcaaagcagataatcacaaagcattacctttcttggagtaatacaaacgtgatcacaaagcataacactggattatgtgaagctgcagagatcgaagtatgtgtccaaatcatcactaaatgaaacaaacgtgatcacaaagattatcggcttagtgattttggtttacttgaaggcttatatgaatacttcaaattctatggagattttttaacaaaaaaaaaaattctatggagatttagacggatttaaaatgatttgagataactttgcagaattactattagagaatcttagtaggtgagtagtagaaatttcttataataaagcagatttgttagatttgattaggaaatgttttaaaaagtatctgattggattagtaattttttagaatataataaatattgtaaattcttataatggagaagtataaatacttttccaatttgtaacccacataattataaatggtattgaataaaaaaataaattaattggaaattaatagataaagattttctcttcgaaaatcttgttgtaggatttgatttttgctagaaaacatcaacaactactattaattgtaatagatggctaaaattagaagttaagttagaagttaagatctgactttaatgaaccgtgacaagaagatccgcgtctttttgagacgggtacattttatgtcataaaattttaaacctaatggaattcttcgtaaatacttgtcaactttctgccaatgtcactaaacgtacggctcaaataatagttttagatgttagaaatgaatatataaaattagtatttcaaatttatgtcttacttaatatagaaatacaaaaaattgaaaaatggatagaaaacccttcacatttcttaaagacatatagaaaaagtttttctgaaaaaccctcaacttttttgtgagttttataaccctcacattttcattaatgataaaataaacctataattaataaactcaatttgaattcaaacaaatcattatattaaaacataaataaatataaacaatttgatttataattttttcctctaaaatttcagtttacaatctttttctaaattgaaaattttaagtcataatgtgcaaaaaataattaatgaagttttattcaatttggttacaataattcatcaacgtgaatttttttttttgttacgagtgaaataataatctacatatacatttttgcagccattttgtgaaataaatcttgtagttaggatacaatgattgccattggattttaatatttgtttttgataattagaaaaaaaatctttgaattaaatatttgacatttaacaatcttcataaaatctctcgacattaactacacgattggttactaaaataaaactttcaaaatatttaatatcatttaattactacaaaattatcattattgatattgtttttctgcatgactattacaattcgattataatcatcaaaccgcagagatatctgatagcatttagttactacaaaattacaaaatatttagacaatgattcataaacatatgataaataaaataaatgagttttttttacgggacgggttggcgggacgggtttggtaggacgttacttaataacaattctaaactataaaataaaaatattttatagataaatataatttacaaacttttatatatactaactttaaaatataaattgtccccacggtataccgcgggtgaaaatctagttcttatacataacataatattattttatgttaataaacgtttatttgttcgatcacacaaatttactaacatgaaaccaaaccaaatattataatactacaaaagtacacaaatttttatatcaaaatattttaattggaaaagtaaactatataagcatttattaatagttaatatatatatatatattacaatatattaaaaatataatataaataacatttactattttcaaaaattgtaccttcaactgaatctgaattttgtaataatattgactattttaaaatcaaaacctgaaaaagcaaacaaattacaaaatcaaatatactatcctataatttttgtagtttacataacataactcctaatggtaacaaacaaaatttgcctaatctcaactaagtggtaaataaatgtttttttatagcaaaaaccttaattttagaaaaaacaattgcaaactcgaatttgaaaaaataatcagaagtcaattttttttattgctgttttaatataatgatttgttaaatttgtttattaattgaaaaattctttctaatgcccttttcaggatgccccttttcaactttacacttttgttttatccattttcatttgtaccctctttaaatttttaatgaccattttactcctatttgaaaattgttttaggttaacaaaatgatatactaatactttttcgcctaaaatattccaaacaaaatatcccgccaaaattttcccgccaaaaagtttcgaaaaaaatttcccgccaaaattgtttttttcaaaaaacttttcaccgttttttttttttttggcgggaaatagatttacaagggattttaaaatatttacaaggaattttaaaaggttttaagagatttacaagggattttaaaaggcttttaaaagatttataagagattttaaaacgtttttaaaagatttacaagggattttaaaagagttttaaaagatttacaagagattttaaagggctttaaaagatttgcaaagatttttaatgggtttaaaattgttttaaaaggattttaaaatatttacaagggattttaaaagggtttaaaaatatttacaagtgattttaaagggctttaaaagatttacaaaggttttttaaatatttttaaagggtttaaaagtgttttgaaagatttacaagggatttcaaaagggttttgaaagatttaaaagagatttttaaagaggctaaatgggttttaaaagatgtacaagggtttttaaaagattttaaaagaatttacaagaagactttttaatccttgtaaatattttaaaacccttttaaaattctttgtaaatcttttaaaacccttttaaaatccttgtaaatatttttaaacttttttaaaatcccttgtaaatcttttaaaacccttttaaaatcccttgtaaatctatgagttttaaagtttacaaggatttttaaaagcatttttttggcggagaaaaaatttgttacgaaaaaagtttttggcaggaaatttctttttttgacgggattttttttttttgtcgggaaaaaagtttggcggaatttgtttttggcgggaaaattaaacttggcgggaaaagtttcagtttccaattacatgttcctattagataagggtaatttggtcattctgttcaaaggaaggggtgtttttaaaaatgaacaacataaaaaggtattattgcaaaaaggtaataaataaagggtagttttgcaaatctcccttattaattatagggtttattgtaccttttataaaaaggtgagggtttaaaaatccacaaaaaagttgagagtttttaatatgtttttagggaaaaatcccaattaaaacccaaactagtttattacccaatacttttagattggaataaaaatacctcatctaataaagtattgccaaataaaacccaatcttttaattattacccaatactttaggattttttccctatatttttagaaaaagtaggggtttttctacccatttatccctaaaaaatctcaactttcaaattttacatttcaaaagtttgttttttgcactatgtttttactttgtagttaagaaccgagaataataaatattactaataaaatgaaatatagctaatcccttgttaatctcgaaaatatgtaggacgataaagtaagataaatcataaccgaatctttttttgttccccaataagagacgaatcttacctgccattaaggatttaattaatacaaatgggattatgggacaagaaaaatgacatatgaatacgattactatatttgtttatacataataacagctagacattgcatgcctaacaataaccttcccctgtattatattcttgatcagaatctattcgggatcagcaacaaaagaaatggaagattaccaaatccaccgcaggggagatctatattaattaaagactaacgtggaacgtatgcgtaattgaatatatatactacataaaacttgcctaaagaagtaaatataaaatataaatgtaaaattttttaaaaaacttttgtaaatctttttaaaaaattataaaattcttgtaaattcttggaaatccttttaaatctttgtaaagttgttaaaacacttgtaaatctgttcaaaacattttagaggaaaaatgggtaaacaaaccctctccttttagaaaaacatgtaaaaagccctcaacttttttggtgggtttttaaaccctcatcttttataaaatggtaaaataacacctagtactattaaaccaaataactattatattaaaacataaaataaaacaacttagtttgtaatttatacttttgaaattcgagcttacgatatttttataagaatttaattgttctttttggcgatataaagaaataagtttcaattagaatttgttatgtaaactaaaatcaatttataggttagaacattttattttatttttcttcatatgttttctaaattttgaagttttggattaaaaaagaataaaatttatgaccaaaaagttggtctaaacttgtgtgactgaaccaaataaaactttcttaatattaattttatatttggttattacaaaattagtttggtttctcgttgatgaatttctagaattcaaccaaacaaattttgtttcaactaaatctatatataaaagagtatatcatccataacataaaataattactttatgcaaattaaatcaaatatatccttgaaccaaaataaataaaatttgaatagactctggatatgttatcttcaatatgaaatcaattttctgggctaaattttaaatttaaattgtttacataaccaacaatttacttgtaatgaaactgtttttctatatctcaaatagatttgaaattacaattttatgttattatataacatcaagacttcaaaaaaaacttcaattggaaaataataaattgtaaaacagattttaggaaagcaaatcttaaagcaaattacttttatttatttatatatttgtataatattttcttcgatttaaattgattttaatgatcctaagtgttaatttaccattttttaaaacgtggtttaaaaactcacaaaaaaatctgaggtttttttatagggagatttgcaaaactacccttttttactacccttttgcaacaatactcttttatgttgtccatttttaaaaatatactttcccttgaacagaatgaccaaattaccctcatctaataggaacatgtaattggaaactgaaattttcccgccaaattttgggcgccaaaatttattttttccgccaaaaacaaatttccgccaaacatttttccggtaaatttccgacaaattttttgtatttcaaaaagcttattttctgtgtttttactttttagttaaaaacagagaataataaataatactaataaaatgaaatataggtaatcccatgttaatctcgaaaatatgtaggatgttaaagtaagataaatcataaccgaatcttttttttccccaataaaaaaggaatcttacatgccattaagatttaattaatataaatgggattatgggacaagaaaaatgacatacgaatacgatcactaactttctttatacaaaataacaggtagacattgcatgtctaacaacaactttcccctgtattatattcttgataagaatctattgggcagcaacaaaagaaatggaagattaccaaaaccaccgctagggagatctatattaattatgaataattgctatgaatgccctttcaacactacccttttatgttgtccatttttaataatataccttcccttgaacagaatgaccaaattaccctcatataataggaacatgtaattggaaactgaaattttcccgccaaattttggataccaaaatttatttttcccgccaaaaaaaaatttccgccaaacatttttccggtaaatttccgacaaattttttgtatttcaaaaagcttattttctgcactatgtttttactttttagttaaaaacagagaataataaataatactaataaaataaaatataggtaatcccatgttaatctcaaaaatatgtaggatgttaaagtaagataaatcataaccgaatcttttttttccccaataaaaaaagaatcttacatgccattaagatttaattaatacaaattggattatgggacaagaaaaataacatacgaatacgatcactaactttctttatacaaaataacagctagacattgcatgtctaacaacaaccttcccctgtattatattcttgataagaatctattgggcagcaacaaaagaaatggaagattaccaaaaccaccgctagggagatctatattaattatgaataattgctatgaatgccctttcaacactaccccttttcaataatgcccattcttatttgtcattttcatttatatcctctcttaatttttactgaccattttaccttatttggaaaatgttttaggttaacaaaataaatattagttttttcctgccaaaaataatccgaaaataaacttcccgccaaaaaatttttttccgcgggatactcttccttcaaatattcgagcacataatagaccgccaaaacaattttgtaaaacgaaattccgccaaaacatttttcacaaaatcatttttcctgcaaaattttttttttgccgagaattagatttacaacggattttaaaaaggttcaaaaaagattttaaaagatttacaaaggaattttaaaaaaattttaagggttttaaaaaatttacaaggtattttaaaagatttttaaaaggtttaaaaaatttacaagggatttttaaagattttttaagggttttaaaaaatttacaagggattttaaaagatttttaaaaggtttaaaagggttttaaaagattaataagggattttaaacgaattttaaaggattttaaaagatttacaagaaatgttaaaagatttagtagggattttaaacccttttaaaactcttgtaaatcttttaaagactttttgtaaaggttcacaagagttttaaaatggttcaaaaaaaaattagcgggaaaatttcagtttctaattaaatgttctcataagatgaaggtaatttggtcattttgctcaagaaaaagggtatttttaaaaataaacaacagaaaagggtattgttgcaaaaaggtagtagaaattttttttttcttttcaaatttatccaagactaacatgcgcataattgaatatatatatatatatatatatatatactatttatacttgcctaaatatgtaaatataaaatataaatgtaaaaatttttaaaaaacttttgtaaatcttttaaaactatattaaattcttgtaaatccttttaaaatctttgtaaagtcgttaaaaacacttgtaaatcttttcaatgttgtaactagaaaaagatatagaagaaatgagtgtgttattccattgaataaagggttctttatataggagtaaaaggaaagggtaaaaccctagaaacatctagatgatgggcttagatgatgggtcttataatgggcatccatctttattcataacactccccccttgatgaccattgtagtaccataactcgtaaagtatttgaaatgctgcctcattaaaaaccttaccaggaaaacccaacggaaaaaaccatggttaagggaaaaagagtgcaacatacaattactcctccttatgagtatattcgacgagatctttgagacggcgtaatccgatacgatagactaacttcttgaaagtagcagtagatagcgcctgggtgaataagtcagccagattatcattcgaacggatctgtagaactcgtacatcgccgctcttttgtagatcgtgtgtgaagaagaattttggtaggatgtgctttgttctatcgcctttgatgtatccgtttttgagttgtgcgatgcatgctgcattgtcttcgtacataattgttgaagtccttttccctcaggggcggatccacggcaaggttgggttaggcacgtgcccgaggctgtttttttttaaaaaaaaaatctttaattgtatttaattcaatactttaatcatctgttggtttattggaaaaaaaggaaagtgccctactcttttaatattttccagcccataacaattgaaaacaatagcccattaaaaaattgtttcagtctaaatgaataaacgtggaaacaaacaattgacctagatttcttttgtcaactaaattgttttctaattgtttacctttttggtttcttctcaaatttccagccaccatgtctaacgtaagtatctcttattctcttttgtgattaactaatattaaaactgtagtagaccgaatgaaacaaaactgttagttttatcaaattattcgttatgattatttatgcaagacatatttttttgtagtttgataattcgttcgttaacaaatttttaatataaatttggtttctaatatgttcatataactattcttattagggaacaattcatagatttttcaaaagaaagcatgaatcaacgtcacaagatattccagaaaatattccggaagctattccagaagatttgccttcggatcctggcgataggaaacatattttggactatcatcctaatgaaagagatgaggtaagacgcaaatatctgattaaaggtccttatcaatctcgtgggcatgattttcctaaaacactatcagaaaaaaaaatgagacgatttaatccagagtggtttgatctctatagtggttggtaagaatacattgtaaaaaaggataaagcttactgtttggtttgctacttgtttagagattacactgaaaataaaggtgggagtgatacgtttgtgacgaaaggtttcgatacttggaaaaatcctcagagtttacgcgaacacgtgggattggtgaatagctttcacaataatgcattaaaaagggctgattgtttgatgaggcaaggtcaatcaattcttcatgctttttataagcaagatgacatagtcaaaagagaatacaaaatcagattgaacgcttcaattgattgttgtagatatttagtacgacaaggattaccttttcgaggccatgatgagtcagtggattcagcaaacagggagaatttcttagagcttgtgaaatatactgcagggcaaaatgaggctgtaagtaaaattgtgttggagaatgctccaaaaaataatcagatggcatgtcccaaaattcaaaaagatatagtgcattgctttgcggaagaagtgattagatctataattcaagaagttgatcatgatgtattttggttgatggtggatgaatctgcagatatttctgataaagaacaaatggcagtggtttttttgttttgttgataaacatgggacagtgaaagaaagatttattggtcttatccatgttaagaaaacattttttgcatctctgaaatgtgctattgattcattgtttgctaaacttggattgagtataaaacagttaagaggacaaggctatgatggtgcaagtaatatgaaaggtgaattcaacgggttgagatctctaattttgagagaaaatagttctgcatattatatccactgctttgcgcatcagcttcagttagtcgtcgtggcagttgctaaaaaacattttgaaattggagatttctttgatatgatttctgtcttgataaatgtggttggagcttcttgtaagagaaaggatagggttcgagatgaatttcggaaaaagctggaggaaagaatcaatcaaggtgaaattaagacgggaaaaggattgaatcagaaactttcactacagagacccggtaatactcgttggggtactcactacacaacattactccggttagttgatttattctctgttatcattaaagtgcttgagtggatcgaagatgatggaactgatagtaccaaaagacgacaagctaatggtcttctcaagtactttaatacctttgactttgtgttctacttacagttgatgttgcttattcttggactcacaaatagtttatcagtggctctacaaaggaaagaccaagacattctgaatgctatgtcactagtgaaatccaccaagcaacagttattcaagctcagagatgatggatgggattcttttcttaatgaagttttttctttttgtaaggatcatgacattgagtttgtcattatggatggagaatttgttgatccaagaaagccaagaaaaaaaagcaacatgaccaacttgcatcattatcaagtggagtgttttaacactgtattggatatgcaaattcaggagtttaatgatccaaacacttctctctttgccagagattttaattctgcatctatggcttcattccattttggccaatcacttctttgtgtacactcttcaatagatgttggttcatgatcctcatccataacatcaactgctacattgcattcaaaaatatcatcgacgtcgatttgctttcggttccattttattccagacatgacataactaattgagatctcttcattgtcaggtacctgaatttctttctgtgtcatgtctaaggtctcttctggagattcttcatttgtaattatttcctctgttttatctatgccaatttctgccccttttctttttcgaggattttaatatttggaaccaataggtctaccacgctttaaacgtgccttagactcatttgcagtttgattttgtccttttgggatatttattcttattggagcatttgcagccggtatatgtgatttgatcacactttttgggtagtgaatgcatctggcagctgatttgctaaactctgtaaatgaattatcttttgtacttttaattcacaccctttagtccgaggatcaagataagacattgataattcattccaaagtatatcacttcccgactgtttattttctccccctaatgttgagaaaacagactcattaaaatgacagtctgcgaatcgagctttgaataaatctcctgtagatagctcgagatacttaattattgatggggaatcataaccaacatatactctcaaccttctttgaggtcccatcttatatcgctgtggtggagcaattggaacatatacagcacatccaaaaactttgagatgggaaatatttggttcctgaccgagaaccagttgagatggagagaacttatgattacttgttggcctgatgcgaactaatcctgctgcatgtaatatagcatgtccccaagcagatattgggagttttgatttcattagtaatggtctagcaatcaattgaagacgcttgattagtgattctgctaaaccattttgtgtgtgaacatgtgctacaggatgttcaacacttatcccaatagacatacaatagtcattaaaagcttgagatgtgaattcaccagcattatcaagacaaattttctttaaaggaaaatctggaaaatgtgctcgtaatctaatcgattgagcaagcaatcttgcaaacgccaggtttcgagttgataacaaggttacatgcgaccatctactagatgagtcaattaaaaccataaagtatgtaaaggttccacatgatgggtgaatcggcccacaaatatctccttgtattcgttccagaaaattgattgattcgaaatttatcttagctggtgaaggccgtatcatcaacttgccttgtgaacaagcaacacatgagaaatcattaggacgaatctgctggttctttaatgaatgtccacatgaattagtgattatctttcgcatcattattgtaccgggatggcctaaccggtcatgccaaactttaatgttttctgtggacttctggtttactatagcatttacttcaattgtattaattgtagtataatataaaccagtagagaaagcaagtagtttttccagaatattcttagaaccttggatattacttgtgatttgaaggtatttgatactaccttcgctcatagtctcaatatgatatccatttctgcggatgtctttaaaacttaataagttcctttgagatttaggagagtataaagcatccacaatttctaattgtgttcccataggcattgatatatttgctcttccagagccttcaattatctttgcattacctgttacggtagttacacttgcttctttcattgtcaaaaaagagaaatatctcttatttcttaaaatagtatgactagttgcactgtctgccaagcaaatatctccaccattcattgtttcttcaaataaataaaataaaataaattaatatcataaataaaataatgaatcaaataattaaaaaaatcaactttaacattaattcgtaaagtaaaataattgaaagccaaacaaataaaaatcaaataactaaaagcaaaaagaaataaataaataaataaaacatagttcttcaaataattgtagtttgatcactttgtctcttcgtcaggaagaaaatcgtcaatatccaagtgagtgaaatcatcaaggtcaaaatcatcttctccgtcttcatacaccaaatttgtttcaacatcctttccctttgttgatagagctcaacaaggtgctttggtgtacgacacgtacgagaccagtgatctttcgctccacaacggtaacagatattcgcatacggtgttttcacttgtttgttaccactttgtttttccacttcttgtgagagtttgagttcttaaagtaaactccactgcctcgtcctccactgtatccacgcccacgaccacgaccgcgaccacgaccacgaccatgaccacagccacgaccacggttgtaaccactttcttgatcataggatgtcacattcgcttcagggaatggagcagaacctgatgggcgtagtccatggttttcaaaagtaactcattgtttttctcagctacaaggagacaagaaataagttgggaatactttacaaatccctttttacggtactgtgtctgcaagacaatgttattagcatgaaaagtagagaatgttttctccaacttatctgcttccgtgattttctctccacctaacttcaatttggatgttattttgaacaaggctgagttgtactcacttacagacttatagtcctggagtctcagatgagtccaatcatatcgggccttaggtaagatctttgtctttcgatgatcatacatatcctatagatcgttccaaatgatctatggatctttcacactgaggtactcattcttaagatcctcatggagatggagtttgattaccatctttaatggtatcaaggagatcttttgaatctagatgaattttagtttaaaccctcatctttttaaaaatggtaaaataacacctagtactattaaaccaaataaactattatattaaaaaatgaaataaaacaacttagtttgtaatttatactttttaaatttgagtttacgatttttttatttcagaatttaattgttgttttttggcgatataaagaaataagtttcaattataatttgttatataaagtaaaatcaatttatagcttagcacattttattttattttatttttcttaatatggtttctaacttttgaagttttggattaaaatgaataaaaaatatgaccaaaaatttgttctaaacttgtgtgactgaaccaaataaaactttttgaatattaattttatattttgttattacaaaattattctggtttctctttgatgaatttctagaattcaaccaaacaaattttgtttcaactagatc

SEQ ID NO: 1318 - DNA, 30780 bp, Arabidopsis thaliana
tatatataaaagaatatatcatacacaacatacaataattactttatccaaattaaatcaaatataccctcaaaccaaaataaataaaatttgaatagattctggatatgttatcttcaatatgaaatcaaatttttgggctaaattttaaatttaaattgtttacacaacccacaatttactggtaatgaaactgtttttctatatctcaaatagatttgaaatcacaatttcatgtaattatttaacatcaagacttaaaaaaaacttaaattggaaaacaataaatttaacagattttaggaaaacaaatcataaaccaaattacttttatttatttttatatttttataatattttcttctatttaaattgattttaataatcctaggtcttaatttaccatttttaaaaaggtggttaaacacccacaaaaaaaagttgagggttttttatatgtttttggaaaaggtgatggtttgtttaccaattttaagaattttactttaattagataaactgaaatgagatagtgtaagataatggttttaatacgagagaaaagaattgcagatatgtatattcataaaacttaaagacaaaaaatgattttagtaaatttgaccttaaattgttgtttttccgtcaattttattagattagctaaacaagctaatacaaagagagagaaggagaaggaacagaatcgttagggtttgggaggaatcagtttcgtcatataaaatcgttgtcaaagataacgaaatttagtagagttattcccaagtcttttatcgttattctccagtttacagaagtggatttggatttaaattggttgagttattcgcagtttcgtgagacacgttttctcatatacgaattaggaccagcagggattgaaactgagatcgtggtctgttctccgatcggcacgagtttttgtgtgcagctttgtgacgtctacggctagcgtttcaccggagggatttaatagttaacggttagtttgtattttagagtttcgtctttgagattgtttgtttctgtttttcatgtccagtttgcttcaaggttgtttttggttgtgacttgttgtaggacgtttctggactgtttcacacgtaaggagagtctctcctgagtttaattattgttagaatcaatttgttaaggtgagtacgtgaccatgagcttatctgagcgattgggttgtatgatttgttttgtgtgatgatatgtaggtgtggtgaatgtgtttttgggtgaattgttcaatgactggtttgtttatgttgtatttgtgattataccccttttaattgcttgtgtgtatagctcgtagatgggaggatcgcctcactaagtatttgtgataatacttacgcatgtctttctttttggtgcaggtaaagataaagtgtgatcgtggaatcatggcaagaaagagaggatgatctaggaactcgtttggtttatttttgtattttggttattagaaccggttagggttgttttaggattgttagtcattcttggtttgttggttgaatcatttatttattcataaatagtatctttgacttggggtttaattgttgctttattgattggtttaattaagtatttatgggaatatttaattatgttttaaaaaaaaacaggtcgggttgtttcaatttagtatcagagtgatgacggttctaggatgtgtagaaaaattaattgatgaattattttcttgatgattgatgtgggatgaggtaggatgttagcatattgaggatccatgagtgatgggtgccgcagccggaggagcccaggtaccagtgcaggctccagttgcgccacgagtggcggaggtgcagcagagggctgcggttgctgaggaggttccatcttatttgaggatgatggagcagttgcaaaggattggcatcgggtatttttctggtggtactagtcctgaggaggccgacagttggaggtcgcgggttgagcggaacttcggttcgagcagatgcccggtggagtatcgggtggatctcgcagtgcattttctagagggggatgcacatttgtggtggaagagtgtaactaccaggaggagacaggcgaatatgtcttgggcagatttcgtggctgagtttaatgccaagtactttccgcaggaggcgctcgaccgtatggaggcgcattttcttgagctgacacagggtgagcggtcggttcgggagtatgaccgggagtttaaccgactcttggtgtatgcgggttgaggcatagaggatgaccaggcctagatgaggaggttcttgaggggacttcgaccggatttgagggtgtggtgtagagtgtcgcagtacgcggattccagtagtacaaccgaagaagactcatcagcaggtggcacctagcaagggcggcaagcctgcgcaagggcagaagaggagttgggatcatccttccagagctggacagggtggtcgtgcaggatgttttttttgtgggagccttgaccacaaggtagcggattgcacgcaacgagctgagacgagggagtactaccactgcaggaagaggagacatctcaggccgaattgtcctaagttgcagcggatggcagtggcagtagtacatgcggcagtgcagcaaggagcgcaggtgcagcaaaatgtgcagcagttagcacatattgcaccggcaccacagggttacactacgcgtgagataggcgttaccaacaacagagcgatcactggtatgatttctgagactcagactttctgaattatttctgttatttttggatatcattgttttgtgatgaatgttagggttcttagcacatgaagtttgtgtacggaccttattagtgggcggtgtagaggcccatgtgttgtttgactctgaagcatcgcattgcttcattaccccggagagtgcctcgcgcggcaacatctgtggggattctagtgagtagtttggagccgtcaaggttgttggagggcagtttctagcggttctggggagagctaagggtgtggatattcaaattgcacgagagtcgatgccagcaaatctgtttctcagccctgaagagttgtatgatgttattctgggaatggattggttggattattacagagtacatcttgactgccaccgtgggagagtttcttttgagcggccaaaagggaggttgatttatcaggcagtgagacctaccttagggagtctcgtcatctcagcagtgcaggcagaaaaaatgatcaaaaaggactgcgaggcttacttggtgacgatatctatgaagagtgatggagaagctacgggagcagaagctgttcgctaagttaagtaagtgcagtttctggcagagagagatgggttttctgggtcacattgtttgtgcagagggagtttcagtggatctagagaagattgaggctatcaaagactggcctagaccgacgaatgccactgagatcaggagttttcttgggttggcagggtattacaggaggttcgtcaaggggtttgcgagtatggcaccgccgctgactaagctgacaggaaagaatgttccttttgtgtggtcaccggagtgtgaggagggtttcgtgagcctgaaggagatattgacgagtacaccagtgttagcattgccagagcatggagagtcttacatggtgtatactgatgcctcgagagttggtttgggttgtgttctgatgcagcgtgggaaggttattgcctatgcatcgcggcagttgaggaagcatgagggcaactatcctactcacgatttggagatgtctgcggtaatctttgccttgaagatttagaggtcttatctttatggcggaaaagtgcaggtgttcacggatcataagagtctgaagtatatcatcactcagccagagctgaacctgaggcagaggcgatggatggagctggtggctgattatgatctggagatagcctaccatcatggtaaagctagtgtggttgcagatgcgttgagtcgtaagcgcgtgggtgtggcaccagggcagagtgttgaggccttggtgagtgagattcgtgctttgcggttgtgtgctgtggcacgggagccattgggattggaagctgtggatcgagtagatcttctgagtagagttcggttggctcaggagaaggatgaggggttgattgcggcttcaaaagcagagggctctaagtatcagttcgcagctaatgggactatccttgtgcatgggcgagtttgtgtgcttaatgatgaggagttgcgacgggagatcttgagtgaggctcatgcgagcatgttttccattcatccaggagcgactaagatgtaccgagacctcaaggagtactattagtgggtcgggatgaagagagatgtagctaattgggtcgcagagtgcgatgtttgccagttagttaaggctgagcatcaggtgccgggtggcatgttgcagagtttacccattcctgagtggaagtgaaattttatcacgatggatttcgtggttggattgcctgtgtcgcagaccaaagatgctatttgggtgatcgtggaccgtctgactaagtcagcacatttttggccatcagaaaaaccgatggagcggcggtgttggctaagaaatatgtgagcgagatcgtgaagttgcatggagtacctgtgagtattgtgtcagacaggaattccaagtttacttctacgttctacgttttggagagcctttcaggcagagatgggcactaaggtgcaaatgagtacgccttatcatcctcagacagatgggcaatttgaaaggactattcagacgcttgaggatatgttgcggatgtgtgtcttggattggggaggtcattgggcggatcacttgagtctggtagagtttgcttataacaacagctatcaggcgggtattgggatggctcctttcgaggcgttgtacgggaggccatgcaggacaccgttatgttggacccaagtgggggagaggagcatatatggtgcagattatgttcaggagaccacggagaggatccgagttcttaagctgaacatgaaggaagctcaagatcgacagtggagttatgctgacaagaggaggagagagctggagtttgaggttggggacagagtgtatctcaagatggccatgttgcgaggtccgaacaggtctatctcagagactaagctgagtctgaggtacatgggtccgttcaggattgttgagagggtgggaccagtggcatacatgttagagttgccagatgttatgcgtgcgtttcacaaggtctttcatgtatcgatgctgaggaagtgtcttcacaaggatgatgaggtgttggctaagattccagaggatcttcagcccaacatgactttggaggcgagacaagtgagggttctcgagaggaggatcaaggaacttcagcggaagaagatttctttgatcaaagtcctgtgggactgcgatggtgtgacagaggagacttggcagccagaggcgaggatgaaggcaaggttcaagaagtggttcgagaagcaggttgctgcatgagtttgcctttccttggtttccagtttcagtgttgttgagtttttgagcttttgagttgttgtatttatttctctttcatttgtattttcgtttggagttgtaacgatcatgacatttgatgatttataagatgagtattttttttttctaaaatttgacttgagttgtcttatttaagaatgtgttgtgcggtttccaaaaatggacagtttcctagaaaagacttgtctatttttgaaaagtttgagtaaacaacctaagagagaggtgtgtttacgagatagtcgagagttggtcataaggatgttctcgaggggatatgatagatggtgaggcataaaggtgtcttacgcgaatccatgagggagtctagagatatgctcggaagcgtttagtattgtttgctcgagggacatgagggtcccaacgactcgtgaggagcggactatgctcctgatgtaccggtaactcgagggacttggtgtctttagagtgcgaggggtacggtggcttcgggtgacgatccgagagtacgctttagggtgacaacccgagagcgagttttgaggtattattttctccaagtgtcgtaactcgatgattttgtggctgagagtgagccgacacaactcagattttgactttgagtggggaagataatacgtgtgatacccgagatactgtaggccgaggcctgagagtgacggtttatgctcgaagattgcggtctgagagtggagagtgagttgtgagcaacaatgactagtatatcgtgagtatatcgactggatagagagacctagaggttggttggagggagtgcggaccgtagtgatggtttcacggaattcctcggagtggaagggtgaagctagattcgaggacgaatctatgttagtgggagagaattgtaacgcccgtgaaccagaaaatcggttgggttaattggaaaccctagagtgtacgtataaaagaagaaaactcgaaattagggatttagttagtcacttttcgtttgataaaggagaaaaagagagaaaaaaaaaaaaaaaaaaagagagagagaaggagaaggagcagaatcgttagggtttgggaggaatcaatttcatcacatcaaatcgttgttaaaagtaacgaaatttggtagagttattcccaaatcttttatcgttattctccagtttacagaagtggatttggatttaaattggttgagttattcgcaagacacgttttctcagacgcgaattaggaccagcggggattaaaactgagatcgtgtctggtctgttttctgatcggcacgagtttttgtgggcaactttgtgacatctacggctagcgtttcaccggagggatttaatagtaaacggttagtttgtattttagggtttcgtctttaagactgtttgtttttgtttttcatgtccagtttgcttcaaggttgcttttggttgtgacttgttgtaggacgtttctggactggtttagacgcaaagtgagtctctcttgggtttaattatttgttaaaattaatttgttaaggtgagtgtgtgaccatgagcttatctgagcgattgggttgtatgatttgttttgtgtgatgatatgtaggtgtggtgaatgtgtttttgggtgaattgttcaatgactggtttgtttatgttgtatttgtgattattccccttttaattgcttgtgtgtatagctcgtagatgggaggatcgtctccctaagtatttgtgataatacttacgcatctctttatttttggtgcaggtaaagataaagtgtgatcgtggaatcatggcaaggaagagagtatgatctaggaattcgtttggattatttttgtgttttggttattagaaccggttagggctgttttaggattgttagtcattcttggtttgttggttgaatcatttatttattcataaaatagtatctttgacttgcggtttaattgttactttattggttggtttacttaagtatttatgagaatatataatttgttgtaaaccacttaatggatggactccataaccgtggcccatgtccttagaggataggtccgtcagcccattggtgtgacggcccatcgaccggtcggcccaccagtccatcggtccatcggcccgtcggcctgtcggcccggcccatggagagaagccacagtcagtccggcccgtaggtccggcccatggagactagagttaggtcggtcatatacttaagtagttatgggcttttgtaacctagcccattaaacatgtaacctcctcaagtatgtatatatatgtgatgtaacctcatttgaatcaataagaaacaagttagttcttcacacgttatcagcacgagcttgctcttaacaaaaccctagcagccgccgctcaaccctagctcgtccgccgtccgccgtccaccgttccgtcgaccgccggtcgaccgtttgctatctgcctgtcgaccgacagtacttccgtcgaccgccgactgtcgaccagcgaccaccgtttgataaccaaggtctttagctcctggttccagtccgtacaaccccaaaggagaaaggtaattcattaaaccctaaagctaaagaaccccaatcaaacatggatctaacaaacggctaaaaccctaaaaacgaatgattgattagtgtttgcaatatgattgcttgtttgctcgattgtttgccttgttattgcttatcctaaactcgcaaatcgaaaacatcataacctagaatccgaaaccctaaaagacataaaccctaaatcgaaaacactacaatcggatcaaaaccttaattctatttcgtgattgtttgaagttgtctaaggtgtttagtttgattgatttcatggttgcatgcatgaattattgaaatccctcatgttgcataaaccctaaaaccaaaaccctaaggaaaatagaaaatcgctaaaaaggaaaatttaccctaagaccgaaaaggaaactctcccaagaggaaaaggaaatataatccctagagaaagaggagattctcctaaagagaaaaagggaaattatcctagagaaaagaggaaattgtcccaagggaaagaggaaaagagaaagtcaaatccttgagtaaataggaaaatcgatttatggtcttcatgacatttacgatttgtccattacatgatattgactcaaaacttcttcattgtagatgtcgaagctcacaaacctcatgtacgctgcactcttggcatctggtgacaattaccttcaatgggcattggacaccaagattgagttaaagtctaagggactcgccgagtgcattgtggaaggaaatgagaaaacggagaggtcaaagtatcaggcgatctcaatcatacgccatcacatagcagagagcttgaaaaatcagtaccttacggtcgaggatccacttgagctttggcttgagttgaagaatcgatacgaccaccaaaagaccatacaactacccaaagcccaacatgattggcttaacctcaggatccaggattacaaatccgtggaggagtataactccgagctctttaagattgtctctatcctgaggctgtgtggtgagaaggtgactgagaatgacatgctcgagaaaactttctcgacctttcacgcgaataacgtactgcttcagcaacagtaccgtgcgaaagggtttacgacttacacaagtctagcctcctgcttgcttcttgctgagaagaacaatgagctgttactcatgaacagcgcattgagacctcccggatccacagccgtgcccgaagccaatagagccgaaatggccaaagcgcctaatgaacctcaggcgaccaaggaatccaactacgtccataggggtaaccctcacggccgtggccgtggcagaggacgtggtggaagaggtcgtggcaatttctacggccaaggaaaccactatggtggtagaggccgtgggaactatggccgaggtaggggtagaggccgcggtgttaacaaaccacgaggaaaggctaagtccgtgtgctataggtgtggcatggacgaccattgggcaaagacgtgcagaacctctaagcacctcattgaggcatatcaagagatgataaagcaaaagggacccgaagccaatttggttcatctcgatggtgaaggggattttgaccacgagaacgatgacctaatggattatgagacttcggacatcttgggagaatagacatctagttttaaatttgctttgtttgctttgttttgtagtttgatctctattgctcgatgtcttggatttatttattttaatggaattgctttgcttcattattgtttgctttatcacctaagatatagttcttgttcacatttagaaatggccgaggacaaggacatactcatagtggacagtggctcaagccacacgatattgagagacaaaagatatttcataaatctaacattgagaaatgccaacattagcactatagcgggtatagcgagtctcattgagggctacggccaagcccatgtactcttaccaaacggcacacatcttgaaataagtgatgatttgtattcacccagctcaaagaggagcttgttgagtttcaaagacatacgtcttaatggtttccacgttgaaacaaagggtgaagggaatagagaattcctacatgtaacagagatcgcccaaggacacaagaaagtcctagaaactatacccgcagtgtccactggtctttaccatactaagatcaacatgatcgaagctaatttggcaatgaacaaagagttcatagaggagttcactttgtggcatgaccggcttggccatccgggtcataacatgatgcgaaagctaatgataagttctaaggggcacaccctaaaaggaaaaagagtaatcccaaagaagctcacgtgtgctgcatgtgcacaagggaaactcataataaggccatcaccggcaaaggtcaataacgagaccataaactttctggaaaggatacaaggggacatatgtggaccaatacatccaccatgtgggacatttcgatacttcatggtcctcattgacgcatcgacaagatggtcacatgtttgtctgttgtcctctaggaaccaagcatttgctaggttactggcccagatcattcgtctgagagcccattttccagattttccgcttaagactatacgtctagataatgccggtgaattcacgtcccaagcgtttaatgactactgtatgtccatgggggtaagtgtggaacatcccgtggcacatgtacatacacagaacggattagcggaatccttcattaaacgaatccaattgatagcccgaccattactgatgaggtcgaggctcccagtagccgcttggggacatgctgtattacatgcatcggaacttattcgtatcaggccatctagtgaacacaaatattcaccatcccaattgttaataggtcatgagccagacatatcccatctaaggacattcgggtgtgccgtatatgtaccaattgctccaccacagagaacaaagatgggacctcagaggaggatgggaatatatgttggatttgattctcccaccattataaagtatctagagccaacaacgggcgatctatttaaggctagatacgcggattgtcacttcagtgaatccgagttccctgcattaggtggtgagacgaacaagctgggtaaagaaataaaagagatagcatggaatcaaacatccttgaattggcaagatcctcggactctgatgtgcgattcagaggtccataaaattatacatttgcaaaagctagctaatgagttgccagattcctttgctgactcaaagagagttgtgaaatcgtacataccagcttgtaatgcaccagtacgtattgatatccagaagggaatcaatgtaattgctaccgagtctaacccacagaagaaacatggtagaccagtaggttccaaagataaaaatcctcgaaagactaagaaaggtgtaatgggaaccgaggtaaaggaaaccatagacatggccgcggcaagtcctaaggaaccaccaaatgagattcgggacgccgaagctcatggtcctgaaggaattgataatgatgagatctcaataaactacatcatgtctggaataaaatggaaccgaaaagaagtcgacgtcgacgagaaatttgcatatgaggtagcatatgagataagtgaggatcatgaacccacgtctataatagagtgcactcaaaggtcagattggctaaagtggaaagaagccattgacgtggagttaggttcattaaagagaagagatgtgtttggtccaatattgaggacaccatctaatataaagccagtaggacacaagtgggtctttgtgaggaagagaaatgagaaaaacgaaatcgtgaggcataaggcacggcttgtggcacaaggattctcacaaagaccgggagtagattatgaagagacatactctcctgtggtggatgcaacgacttttagatatctaataagtctggcaataagagagaaccttgacttgcgattaatggatgttgtaaccgcatatctatatggtccactggataatgagatatatatgagattaccagagggtattgagctcaaaggaaaagataagaatgggtctcgagaccaatactgcataaggctgaacagatcgctttatggattgaaacaaagtgggcgcatgtggtacaataggttaagtgagtacttagtcaaagagggctataaaaatgaccccatcagtccatgcatcttcatcaagaagtttgctagcaaaggatttgtgataatagcagtatatgtggatgatttgaacatcctgggaacctctggggaaatcgcccaaacagtcgaatatctaaagaaagaattcgaaatgaaagacctaggcaagacaaagttctgtttgggattgcagcttgagtacatagataaaggaatccttgtgcatcaaaaggcatatacagaaacagtactcaagagatttaatatggacaaggcccacccgttgaccagcccaatgcaggtgaggagcctaggattggatagtgatccattcggtccaaagaaggacgatgaagaaattctcggtcctgaaatgccatatctcagtgccataggagcgttgatgtatctgtctagccacactagaccggacatatgttttgccgtgaacctcctctctagattcagttcttgtccgaccaagaggcactgggaaggaatcaagcatttgcttcgatacctacaagggacaattgattttggtttatattatactaaccataacaaagaaggtttagttggttttgctgatgcaggatatctttcagatccgcacaatggaaagtcacaaacgggttatgtatttattcatggtggaaccgcgatatcctggagatcaatgaagcagaccatcgcggccacttcctctaaccacgcggagatattggcaatgcacgaggccagccgcgagtgtgtgtggttgaggtcaatgactcaacacatacgagccgattgtggaatggtcgaagacaaggagccgactatcatatacgaggacaacgcggcatgcattgctcagctcaaggaaggatacatcaagggagatcggacgaagcacattctgcccaagttcttctacacgcatgacctacagaaggatggtgaagttaaggtggtgcaagtacgttcaagcgacaattcagccgatctattcaccaaagcattaccagcaacgacattgaggaagctcgcgcatcagattgggatgcggaggcttaaggacttatagggatgaccaattcagggggagtaatgcgtgctgtactctttttcctcactatggttttgtcccaaaagggttttcctagtaaggttttaatgaggcagcatccccctagcgcattactgagatcccgttggcatctacacggttatgtcatccaagggggagtgttgtaaaccacttaatggatggactccataaccgtggcccatgtccttagaggataggtccgtcagcccattggtgtgacggcccatcgaccggtcggcctaccagtccatcggtccatcggcccgtcggcctgtcggcccggcccatggagagaagccacagtcagtccggcccataggtccggcccatggagactagagttaggtcggtcatatacttaagtagttatgggcttttgtaacctagcccattaaacatgtaacctcctcaagtatgtatatatatgtgatgtaacctcatttgaatcaataagaaacaagttagttcttcacataattatgtttaaaaaataaaaaacaggtcgggttgtttcaaattttccgcttttatattcgctcattttggaatcaaagataaaaaaaagaagtcgaactcgttgttgtcgctctctatcgcctatagataagaagagaaagctggccactctatctggaaaaacaccatcttcgccatgtccgagccgtctttgagaaaactcacttctcgtttgtcttggccaatcatatatctcataccctacacaagtgcttccacttctgtatataaacatgttaggcttcgtcgaaggttgcatgcgcccattattggctcctcatcattagatagggtacataccaatcctaaacccgataaattaccatgaaccaccaataaaacatcaataccctgtgatatttataacctatgacccaactatcctagggggactcccatggggagctgtagtattagtaatctccaactgggctagattcaagcatttgcttcattttatgttattttaagagactctctaggatcttgatcaatgtttttgtttattttctcattctgtgtttccatatgtaccacatgatccaaggataacttgaacttagcgaatctgtgagtgttctccaaaacaaatgatcaatgttcacaactacagatgaccatgggaatatttctggaaccgttggtatttgcgatagtgcccatgtttgaaagtcaagaggacattcaaaaatcatataattattgtcccctctagagccccacatctactacaaaccgtatcacagttaatacaactttttctcatatttgaattgattggcacacatccactaataagttgccaaataaattctctcaatttcggtggacatttgactttccaagagtaggcttgaagaaacctgatatctaggccaaaatagcgagtttgattctcaccttgcaccatcatttgttttgtatagtatccagactttgaccgtatattttccgcattttgtaaagtgtcttcccatgacatcaagtctatttggtgatcccaaatgtaatgcaaataccaaaggaatatcctttttagatccataatactcctaatcaaatccatatcccatgaatttgaatgataatcaatcaaatcattcacaagtgagggtttataattgtaaccattgcttaaagctggcatggagaattgagcaggtatccaagggtcattccataccaaaattgacactcctaaacttactttttataattcctttattaaccaaatatcgagcacactacactcctccatccataggatggtgagtacggtatcattgggtccataggatttgagttccgatagtatctacctttaaacagttttgcagataaagagttagggaccgtaatcaatcgtcacaagtgttttgctgacaaagttgcattgaaattctccacgttccggaattcaagtccaccgtcagccttactttgacagagcttatcacatgcattccaatgtaaactttttgtttttccatttgaactccaccaaaaaatttctaccgcacttgttagttttgatgttactgattttggtaatctgaagcaagacattacttaattaagcagtgcaattgctaccgatttgatcatcacattggattaaaaatttgcagaccaaccatttattctgtcttgtagacgttctctaagaaaagagaaaatctttgtctttgaccctcctaaattttctggtagtcccagatagtttccaattccccctatggatcccaaagattgtcacaagttcatcttttatcaagtcatcaaccttacgtccaaactgaattgatgatttcgagaaatctttccgttgtgcagaagtctcttcgtacctctttagaattccaaaaaaaaacaagacattgttcctttgtcgctttacaaaaaaagaagctaccatccgcgaataataaatgagatatcgaaaggcttgcttgtgcaactttcatccccattagaatcttttcttgttctgcttttcgaatattagcgatcagaacctctgtacacataataaataagtatggtgataacagatccccctgccttaaacctctttcgggaactatcagtcctcggggttttccgttaattagaaccctgtatcgaactgatgtgacactccacattatctgtgagacccatttatcacaaaaatccatcttctttagtaagctttcaatgaaggaccattctattctatcataggttttactcatatatctcttaatggcaatatattaatctttgcgggttcatccgcaatccaagaaacatctcttgtgcagtaagaatgttatctgaaattaaccttcctcgaacaaaggctgattgtatttcaaaaatgagcattgatagaacgtttttgagtatttgacagaaaaccttagatgtaattttgtatcccctattagagagactaattggtctcagctccatcatccgagttggtcgacttgtttttggtattagataaatatatgttaagttcaaccgataatcgaaagacccattatctagaaacgagttgactaaatgaaagagatccgctttgatggtaggcgaaactttctgatataataaagctgtcataccatctggtcttggtgtctttccggaggcatcataaataaggatgttcttaactcatgctccgaaaccagtgctgttagttccagattgacttgatctgaaattgatgtttcgactacctttaaagaatcctcaacatttatcggactcgaggtggtgaataattcctcaaagtaagctaccacaacttgttgaatatctttttcctcagagacccatgagccattatccttataaagaccgataattctattttagctcgacgttgctttgttagggcatagaaaaatgttaagttatgatcccctacgatcatccaaagattcgacttttctgatgccaataaagttcttcatactgataagtttcccttcaatttaagtgttaacttcgtgatctcctcatgcaatttagaatcatgattttgggctagttcaagatcttttttcaaatcacccattaattctcgaccatacagtgtcaaattgttccaccatttagatatggattgccgacaatttgttagtttttgtacaaaatgaccttcctcaaccgtattattaaattgacatccttccacgatggtttccattaaaccttcttttctggcccatcttttatcaaatctaacacttttctttccccgaagtactttatccttaattatcgctactaattgtttatgatccaaggttaccatacgtaaatattctacatatgatttgtaaaacattttgtgccaatcttcgttggcaagagctctatccaaacaacatcgtaatagtttttatccttccaccctcgccaagacagacaatcaccgatgtaaggaaaatctaacaatccgtaatcgtttatcattgtgttaaaaggaatgaaagatgacgcatgtcacagaccttagaattgataatgcaacattcgtaggataatatgatttttttgtgtggcacagccgtggtgtaattatgtaatcgcaaatttaatgaaatactcaaattgataagtcaataaaagttagggattaaaatgaaaattcaacaaaaactagctaattatttcaccagacacaaatttagtgatttgtttcaccatttttaaacaattgatgttttcttgacattttcgcaatatatatagcagaaaacagaattttattgtgtggttgaagggtcaagggtaatgttacaacttgattgttatgcacgaaaattaaaatctatactattaattgggaagtattgtgtgaactacaacattgtaagggtagtttaaaactaactaaataaattttttgcatgggtaatttagtaaattaacaactactccaactaaataaatatcttgaattagctttaaaaaaaaacaggatttaaatcagtaaattaagagaattttggattttagatttgtaattatctagaaaatggtttcagtatatatttaacattttaattagaatttaaatgatataaacgtttaaagtatttttttttaggtaattttcattattttaaaaatatatcactaagctaaatttgaattatataaaagaaaatatatttttaaacatattataatagttacaagcttttgaaatattctttcttctagattcgattttttttttttttaaatagtaaaacaaagtttaaataccaatgtttaaattttttaatgcaaatattcaaaatgagaacaataagtaatatgattttttgacagatcattaattgtattcgaacaataataactaccatatttgcgataatgcataatgataagtttaatttaaaaacataccaaaatcgttgagatctaattttagcttttaaaaaaaatattttcgtcatcctaaatttaaaatatgtaattcagattagttttttccagtaaagctaagattgaatccaaattaaaatctaattttgtgtacaatctatctcttataaatgttatgcatacattcatattgcctaacaatcaatctagaatattgattctttacaaaaatagatagagattcatatgtaaattacttcatgttctaatgatgtttatctcctaattttactatccatttatgcgtattcttatggattattctttcagggtcaacactagattacaaaaaactagccgggtgttggtcaatattatagctcagataaaatcatggaattaacactcaaaatatagttatacaatctgaaataataaacaaaacaaatataactttttttaaaaaaaaactaaaatcaacaaatttatcattttataaaaaataaaataaaaattagcccatggtaccctacgggtaaatcactacgatttcatgaggttgcaatatcaatttatacaaattttgacttttaaaatatactttatataattattgaaggtatacactaaaaatcggttttatatatttcaatatcataaatttataaatcacaaattatttttaaatatattaatccaagatctaccacaggtcaatcctttgattttttaatacattacaataagaatatttaaaataattaaaataatatttaattttacggaatgaagttatctggtggaacgagtttgggttgatactcatacgggacgataatctacgagtgtaatcttagaattaacaattttaacacaattatacaatcttaaacactaaacaaaaaaaaacaatatttacaaaacaactataacttaaaattcaaatttctagttacaaaaaaatcgaccaacggtgtaccgcagagtaaatttcacattatatcatctaattgatcaattttcaaaaaaaaacaattaatttgtatatacatcaaactaacaaaaatacacagattttccaaatatctctatattattccgcaattcaaaacaaatctaacattcgatttactatgcaaaatacaaatgaaacataaataatataaattaataaaaaaatttagctattgtatcataaataactctatacacttttctatgcacattataatttatacattacaatatcttttactaaaaatgtattccaatacatttcttaaaatatgaaatcccgcacgtaagtgcgggtcagaatctagttacgtttaatactgaagactatgtatgtaaattgtgaattaaaacttcattttaatattacagttaaaggatgttattaattgatgaaaactttttttaaaaaagaaatcagttttcacataatttaataatatatgattataattttgtgtagttaattaattatattaattgtaaatcataaacaattgtttaaattatgttaaatgctaagtgatatataagagaggatctttagaaagctcaatatgcaaaattcttatttttaatgtaaaagaagtaaaatgaatttctaagaaaaacaaagaacaaagaaaatcagaattttcattatttacataaaaaaataggggtattgacaaaaatggcactaaaaaacttaattattccaaaaatggcaccttcttttgaaatttccaaaaatagcataaaaggtttttaatcctctataaattaattaaataattaattttttttctattactatttatatcaatctcccaaataaaaatgagagcaaacactattctaatattaaatggaataaaaaaaccttttaaatagtgaaaatatatatcctaaattggaaataaaaaaacccaaatataatactacaaactaattttaaaatgaaaaatatcttttaaatggtgaaatatataccctaaattggaaatagaaaacccctattttgggggattgacacaaatagcactaaaaaactttattattccaaaaatgacatcttcttttgaaacttccaaaaattgcatacaaagtttttaatcctctataaattaattaaattataaatttttttattaccatttgtatcaatctcccaaataaaaatgagagcaaacaccaatctaatattaaattgaatcaaaaaacttataaatagtgaaaatatataccctaaattggaaataaagaacccaaatataatactacaaactaattgtgtttggcttgagtgttgtgtgaatgttaaatcccgttggctttactgttgcttcataaatctctcatagaaagtgtgcttcatagactatgttgtgtattgctgattttggaaggtgcataatgtccaaacacaatctagtggttcagtctatgattacattgcctcctactagatacgggaaagaagattgcaagatatgtggatcaatcaacaatcattcaaaatttagttacttgaagaccgttaaagaaatcctctctgactctttattcagtaggctgaaaactacttttcttgtcccaatcatcaaacaggattgagaaaagcaactggtaatcaaaaaggagttaatggcttgggtttttctggtcagctggtttactttctggtagtaagacaacttgtgtcgtcaaagaaagacgagctttggttttgcatcaacaacaagtcgatgagattttcattgactgaggttcatcttgtcacgggattaccatgttggataaaagaagatgaaatctcagtagattttgagtgtgattggcctttgtctccttgcaaaacccctatcaaggtggattatttgatagcacaattgaaggtattggatgatgaagaaagcaagctacagcttgttatgttgattgttattttaatcgtcttcatgttgtcatatggcattacaaagcactcggttccgaaggaattttggctaatgcgaaaaagaatattcatgcgtatccttgggaaaagatgcatttgacatgctggtatcgtcggtaaaggatgatgataatacgaaaaatgttacgaagattgatcttaaagggtttcccatggcattgcagctatgactgttgggatttgtatcagaattaaaaaaggcttatgctcggctcgatgataaatcagatcgttttcctttttgtgtgaggtatttatctactgttcatccttcttatgaacaaataatgagtacgaaatcttgaggtaatcaatgttcttggtgattcgaatgaagaagaagatgatgatgttcttaatgcaatgaagaagaagatgatgatgttcttaatgcacttgttgaatagtgattacgtattctctgagttagattggaagagagtttatacacttgttcagcaccaagaagatgaggaagttgagatttggtgatgggtcagacgtagatgcagagatgcagacacatgatagcgctggtgagacgcaaacagacgcagatgtaaagaggcaaacagatgatagcgaggatgagacgcagacgctggagaaagatcaaggattggttgaaagatttcaaaaactaagttttcaagatgatgaaccttctgccatcactgcaatactcaccacaccactaaaaaatctcgatacaaacgagtgcttagaaaaaaaacaaatattctctccctttggacataagaagaaatctcaaaggcggtgaaggaaagatcattggaacatcataggtggtttatctcctttcaaaaactcttgcctctagtggacacttggtatgatttcggttgttatgtgtccttttgttatgttatgttctagctgtgttcaaaagcatagcaaaaggacacataacaaccgaaatcataccaagtgtccactagagacaagagttctgagtactgagtttgaaaggagataaaccacctatgatgttcaaaagatctttctttcaatgcctttgagatttcttatcatgtccattgggagagaatattttttctgtataaacatgtgtctgtgcagtgctggcaaaaggttcatcatcttgaaaactcagttgttgaaatacttcaaccaatccttgatctttctttagcgtctgcgcctgcgtctcatccgcgctatcctttgtctgcgtctttgcatttgcgtctgttggcatctcactcgcgctatcctctgtctgcatctttgcatctgcgtctcacccacatctgcgtctgcatctgacccatcactcaacttccacatcttgttggtgctgaacaagtgcataacatctcttccaatctaatcgagagaatacgtaatcactctttaacaagtgcataagaacatcatcatcttcttcttcattcgaatcactaagaacactgattacctcaagatcttctctcttactcatgatttgttcataagaaggctgaacagtagataaatacctcgcacaaacaagaaaacggtctgatttatcatcgagccgagcataagccatgggaaaccctttaacatcaatcttcgtaacatttttcttcttatcatcatcttttaccgacgacaccagcatatcaaatgcatcttttccctagggatacgcatggatattcttttcgcattggccaaataatctttcgaaaccgagtattttgtaatgtcatatggcagcatgaagacgatcaaaataacaatcaacataacaagttgtaccttgcattcctcatcatccaagaccttcaattatgctataaaatcatccaccttgatagggggtttgtcaggcaacaaaggccaatcacactcaaaatctattgggacttcatcctcttttatccagcatggtaatcccgtgacaagatgaaactcatcaatgagaatctcatcggcttgttgttgatgcaaaaccatatctcgtctttccttgacggcacgagctgttttactaccagaaagtgaaccaactgaccaaaaaacccaagcaatcaactcttttttttattaccaactacttttcctaaacccctttgatgatcgggccaagaaaagtagttttcagcctagtgaataacgagtcagagagaatttctttaacagtcttcaaataactaaattttgaatgattgttgattgatcctcttattttgcaatcttatttcccatatctagtaggaggcattgtaatcatagactgagccattagattgtgttcagacattatgcacctgccaaaatcatcaatacacaacatagtctataaaattcatataaaggaaactttctattagagatttatgaagcaacagtaaagtcaacaagatttaacattcacacaacactcgattcaaatacttcaccttcactttactatcaaatcctaagtacagacactcaaagttacaacctgtaatataatctacatgatacttcatcaacgatctttttcacatcactaccaacgatctcaagtagttgtttattaacactagtgctagaggacagaaataaccaaaccaaaatttctcaaagtaaactttattttcaatctttaatatcgttctaattagtcttagactcttagctacacataaaaagcatgaaagactacctttctttgagtcatgttacatatgcgaagatcagctatagaactgtgtggagttcataaacccataaaaactgatccaaagtggcaatggcaatcttaagatgacgaaaaaagaagagagatttatgacacaaatcttaatacttacgcaacaaatcacaaggaacaagaacaaagatttaaatgaaacaacagtaaagccaacgagacttaacattcacaccacactcaaacacttcacattcactttactatcaaattcacccgcaaaagcaaactcgattcacaacaaccccagaaaacttattgacagaaaccgagaaaacttagagtcaatgacgaattcaagcattccacaagtaagatgccaccacacgcaaaaaaactcgtatcacaataacccagaaaactttttgacagaaaacttatttacaagttacaacaatccgacagttcacgacgctaagcttatttacaaacgtgttgacttgacttccttaagagggtatagagatcaacacaacacagagaatttcttagaactatattcttattgataacaaactgtttacaattgttatctcggatattacttgatctattctacccaaatgatcaaacccgactaagaatacctaagcctaattctcttctctgtttcttatcactctcacgtgaagacaaggagaactacacactcaccttcaagcttttgcaatgctctgaagtttacaatcgtatgacagtattctagagtgcttaaagcgcctcacgctaagttctagaatacttatccctactctccagaaccctaaacctaggatctccgagaatctcgttttaaagaatcttccttgtttccaagcttattccttcctaaatcttcgagacttgatttgactcctcaaaccctaactcctctttttccctccaatacccgagcaaaaacttcttgaatccttattggattttgaaactcgaactgggcttggacctaaaaattgtattactctaaaacacttaacaaacgcataagagctcatttgccaagaaacccatcaatcaaatttttttagttagcacaggattgcaaatagcagagatgagatgatttcaacagtcatatcctgaaacagtttagtgacccaaacagataattgatacatgcgggtagtagctttccaaacattttcaaagcatatctcttccttgtactctgttcagtgctttgtgtctatcggttgttcagaacttagaaagaaactgttacaaccactcagatcgttgatagatcagctcaatgttcagtggctagtctttcacactgtcatgccttcagttctaaacgatcaaggcaatgtgtaacaagcagctggaatttcctttgaagatagctttaccaaacaggagcttgatgatatgtgtttttgaactgctccttatttttgtcatattagcaatatcacttgacttcttaattgctgatattcgaacttagtgatcttgatacactttttttttttttttttttttttgtgtgtgtgtgtgtcaagttcatttagttggttgatcttctcagctctatgacctcctagtagatgataatgttttatgtctgatttaacccggcatgacaggcagctattttccacatggctttacaaagtgttgatcctctattcatctttggatttccatgacctgttctcgctttgtgtccctgttttagatcagcacaactcacaaatagattacagatcaaacattccaatgaacattcataaagtacgaaatttgctctaattcagaggtttgataaacaattcagctagttggtttttagtacccacatgttcaatagctatcaatttctcctcaaccagtttgcgaatataactatgttgatgatctatgtgcttagtacgagactttctaacaggttctttgaaacaacttataacactataattattgcaaagtattaacagaacatcagaaatcataccacactcctctgtgagttgtttcacccgtatgagttgagcactcgaacttttttaaagcactgagttctgcttcagcagttgataggaccaaccttttctgcttcttgctcttccaagacaccatgttgtttccaatgaagtagcatccaccatgttgtttccaatgaagtagcatcctccaacagatcatcgtatgtcatccaatgttgtttctattggagtatgctacttcattggaaacaacatggtggatgctacttcattggaaacaacatggtgtcttggaagagcaagaagcagaacaacttggtcctatcaaccgctgaagcagaactcagtgctttgaaaagttcgagtgctcaactcatacggatgaaacaactcaccaaggagtgtggtatgatttctgatgttccgttaatactttgcaataatcatagtgctataagttgtttcaaagaacctgttagaaagtctcgtactaagcacgtagatcatcaacatagttatattcgcaaactggttgaggagaaacgaatagctattgaacatgtgggtactaaaaaccaactagctgaaatgtttgtcaaacctctgaattatagcaaatttcgtactttactaatgttcattgaaatgtttgatttgtaatctatttgtgagttgtgctgatctagaacagggacacaaagcgagaacaggtcatggaaatccaaagatgaatagaggatcagcactttgtaaagccatgtggaaaatagttgcctgtcatgccgggtcaaatccgacgtaaaagattgtcatctaataggaggtcaaagagctgagaagatcaaccaactgaatggacttgatacacacacacacaaaaaaaaaaaaaatgtgtatcaagatcacttagttcgaatatcactaattgagaagtcaagtgatattgctgatatgacaaaaagaaggagcagttcaaaaacacatatcatcacgctcctgtttggtaaagctatcttcaaaagaaatttcagctgcctgttacacgttgtcctgatcgtttagaactgaaggtatgacagtgtgaaagactagccactgaacattgagctaatctatcaacaatctgagtggttgtgacagtttcttgctaagttctgaacaaccgataggcacaaagcactgaacagagtacaaggaagaggtatgctttgaaaatgtttggatagctactactcgcatgtatcaattgtctgtttgggtcactaaacagtttcaggatatggctgttgaaatcatctcatctctgctaattgcaatcctctgctaactaaaaaaatttgattgatgagtttcttggcaattgagcgcttatgcgtttgttaagtgtttcagagtaatacaatttttaggtccaagcccagttcgagtctcaaaagcccataaggattcaagaagtttttctcgggtattggagggaaaaagaggagttagggttggaggagtcaaatcaactgtctttgaaagtcgagaaggcaaacccttgtgctcaaagcaaatccatcagaactcgagtgagagagagcatgaaatcaattcttccggggctgcaacatcttgttcaccagaaatctgagtccgaattgtctggagatctaccagattcacagcccagcgacgcgatgccagaggttccacagccgattgaatcgaaatctcaagaggtgaagtctgacgaagaacttttgatgcctgattccaagtgggctatgatacttgtcacaggcccgccgccaccgatcatcgaaattgaggacgagactcagtcgtcaaccaatcaggttcagaaggctgaaccaaaatttcccgaggctgcaccttctcaaccctctgttgcttcaaggatgcgtaagaggaagcaatccaccgctggatagggtggaaagcggatgaagcaagaaaagggcaaggggatcaccgcttcatctaccttcgatggaatccgattcgtctcgaatgaggctgagaagatgtatgctcatttttcccgaagaacttcattgtagaagatggtttgtctaggaaaatggatgaggctgttcggagttttattgagaaggctggattgattcgtacggtgactgatttgaaaccgtataaggaggaactggtgtttgaattctgggcaaatctgcctacagtgaaggttgataccaccaatgttggtgttttggtgcgtaattgggagtatgagttctcccctgagaatattaatgagctgtttgggttggcatctgtcgacgtgagacagcaacgaatggacatggtggggttgatggaggatgaggtcgcaaagtttctgactgatggcaaggtcaagtctctgaaggggttgctggtgagtgctttctctccaccaggccgaaagctgttcaaactatgttgcaccaactggtctccaacatcgaatgatggtatgcacagcctgacagagccaagctggtatacatgatcatgcacaacattccattcgactttgggaggatggtgtttgatcacattcttcagttggcaataaaaccagaaactaagctcttcctgctatttccaaacctggtctaccagttgatacagacgcaacgccatgttcagatcccagtaaacccacccgcatcagcagcgtcgacaaagaagaagaaggtgaagcagagtgtagttgcaggacgcaaagactcagccaaccgcagggcgatgaaaattgccatcgaaattttgcaggctgctctagatgcaggtaagtgttctgtgtgatcttcttcacctgaattgtatatctctgtttgtatacataatgctaagttatgtgctcaagcagggggagataagtcggattcttcggcaactgatgatgctgggggagattaagttgtgggggagcctattttgattccttttgatttcttgttttaagctcggttataattctgaccaaaacaatgttctttttgtttgtaataacattgtatcatcgtgaacatgagtctctaataattttttaacacattgtcaacttttagactaatcgcattatgttgtttatgctagaatgttcttctagagtttgtctattggttgtgtgttatgtctcctggttgagtttcaggttatatcaatggaagaatgcttgtgtatcaaactcaatcaaatagggggagattgaagatgcagaattcaatcaatcagctgatggcgatcagaacactgatggatttcaggaagatgcatcgagtctcatcagacgcttgagttgctgacatggatgcaagagcagacgtggcaagctgatgcggcaagctgaggcggatgatgtggagagccaaggatggaagctgacttggcatggtatcaaagacacgattcaacgagaagatatggaaaatatcgtttggaagatttagaaaagaataaacttgaaaacaaggaaaattccttaaaacgagattctcgaagatcctaggtttaaggttctggagagtaggtataagtattctagaacttagcgtgaggcgctttgagcactctagaatactgtcatacgattgtaaacttcagagcattgcaaaagcttgaaggtgagtgtgtagttttctttgtcttcacgtgagagtgataagaaacagagaagagaattaggcttaggtattcttagttgggtttgatcatttgggtagaatagatcaagtaatattcgagataacaattgtaaacagtttgttatcaataagaatatagttttctattccatttaatactaatacgttttctatacttaaaataataatatatttataaaatattaatacacacaaccacgtaaatatgattactcatatgtatgtatcacccaaatatactcgacttacctctagactaagtaattaacctaacatatattcatatacgaaagaaaacacgatctcatcctcacgttagccaatcggatagatttttcgggttaaaaactagcaacaacggagaccggttgacatatttctccatctacaacggttgcattacctgacaaagattaatccagtaattaatacccatcattaatgtttatgaattaatctaaacccaaccatttcaaactcagtataatgactaaacgatgacttggtctttttctaaataaactaataagctttgttttaagaattaaaccaatctctttttttcaatcattagattttatttagagcttaaaagaaccaattctaaaaaaaattatttacaaaagtgatatgaatggttcggtacgaatttttcgccctaaactaattatttaataacattccaatcccacttcacgaccgcacaaagtcattaccacgtaactgagtccaatacacaaaatcccatatacaccttaataaccggtcatgatgttcggttcaataaacagttcaaagcaactatgacaccacgatttctctccacatgaccagttattacgttacggtttatggactcagttacatgtaggatctctaaggtttaggctggtttactctcttggtttaataaacaacaaaacaacaacaacacgactgttgagacgaggcaatacctttgctgcgatgaatctcaatggatctccttggcaagatggatatgtggtagtcacgttcaagtttacagtggctaggtactcatggtttctccagggaaaacaaaacagagattagatctag

SEQ ID NO: 1319 - DNA, 24294 bp, Arabidopsis thaliana
gatctccatggcttgcagcacaagcaatacatcttaaaccaaagctagagacattctagacgagctatagattaaaactagggtttccttagccttaagagcctcgccgatggacaacgactgctccggtgacagtggctaagatctggtgactcactgtggctgcggtggttctccggtgaagttccggtgaccttctccagtctccccctttctgtccattttccggtgacaagatcaccacctcctccgctttcccacgtgagagctcacttcttctccacaagatccacatcaacaacaatactaggacaatggtctagataacttagcaacggcgtgcggcttcacgaagaggacattatacacacgtatatgtattcacgaataacctaataacagaaccctttttttttcttgtttttgttaatccacatggacttttaatgggcttgggttctcttttaacaaaatgtgtggctttgtattcaatacaaatgttacaaagtatattttgatataagttacgccaagggacttgacagcaaagatcctgcgagaacagcgcttgaggtgagggaagaacgatgagcaaacccagagtaaagagaagccgaaaggactgaagcttgaaaccctaagttgtcactcgccactcgatactgaagctaatattcgaagaagaaggagagaagagatcgaatgattttttatttatttattttcactgttacttgagtttttgtttcaggaattggcaaaatgggctggaccttccagaatttagccattaagacaaattcagacaaaaatgccctttgattttgtaacgatgtacaatgcgtacagacgatttagttagaagttaatggatgtacaaagtttagttgtaaataaaaacaaaaatttgagttcatgtgtaacaaaacgaaaaaaaaatgaaagtgaatgtgtcatcgaagaagagaaacgagattccggtgagaaaacaagtgtttttccgaaataattgacttaaccactggacaattaaacaaaactcaaactctttatcttttttaactaaaaatatgctagatgtgcaatatttagatgtaataagcattcaaaacataaatctaaaaatatttagatttgtgagataacagttaacaagcggctgcaaaattagggttggaaaggttgaagatgagtgcaaaattacaattataccctttattaaatttcttatgtgtacgtatatgtaatttacgttgtatgtatatgtggacatgtaaatatagtagattatgttttattgttaaagcgacatacacaattatatattgaatttgtatattagaaatctttggttatttcgattagatgagatatttttcggagttttccccataaaatctatgcatatataataattaaataaaaatatatggtcaaagtatagatgttcctaatacttttgaaaaatgtataataatgtacgtacatctttgttgatgagttaaaattgttgagatatatttattgatacaataataaaccaatattgatgatggtgagggtatattctacgatagtcctactagagatgaagacattattatttataaaaatgtagacatgtgtacgtacacagtagtaatgtgtacgtacacgaaattatttagtggaacatatatggtacgaattctaataaatatataaccacccacaacaataaatttaatatataaatatatatgtcagtttcatttatctttttcatgtgttgttcatacatgatttgaatgttttgcttttatggtcaaaaaatatttgaaacgtaaatatacaaagtaattagatatttacgtacatatatacacacattactaccatgtacgtacatattactaccgtgtacgtacacatttactaccatgtacgtatatattattatcgttacacacatatgtgtatatgatattgctaatcgtgaattgttttcgatgatagtaaataaaatattatttaaaatagaaataaacatgttagattatgttttattataaaggcggcatacacaatatttattgagtttgtacattagaaacctttggttatttcgattagatgagatattttttgtgttttcctataaatctattcatatataataattaaataaaaatatatggtcaaagtatagttgttcctcatacttttgaaaaatgttatgtacgtacatctttgttggtgagttaaaattgttgagaataaataagattttaaactaaacccgtaaacgtacacgattatgttgagctccaaacagttatatcttaaaaatatctaaatcacataaatctaataatatttacgtacacaaaaatatttattggaacatacatggtacaatattaaaatgagtttaaaaattctctaaccactatctacgtattaagttattatgtaagttatatgtatgcctgtatattttaatataaattatgcatataaaatatttcaacgaatcgtattctgattcaggtaaaactgatcttccaatacttgcacaccattaccattcatttcacatctaccatgcctatatgtattcgtgtatgtaaaacattcacctttacataattcaccaggtacatagttagtagtgtacgtacatattctttgataaatgtacgtactagtgtacgttaacttcgattttataattgcaatttgggtaattgaatataaaagtctaaatataatttatgttacgtatataactatattttggatatccattcgattctctgtttgctttggataaaattttggtttttcaactatggttcaggttattcaggtatagaaatttaatacctttcgaatcatttgttagttctgggtttagttcttatttttcgaataggttcgtttgattattatgttttaatgtatttttcaagtgtaattagtacatggattgaatgttttgtttttatattcaaaaattattttaaacttaaatatacaaattattttgatgtttatgtacatatatgaacacaaattacaaccgcgtacgtacaggatattgttaatcttgaattatctgtaatgtaaaaattaataaattaattaataaaaataaaaatatgaaagtgagtcttaaatgatagaaaaaatgaattttaacaaaaagtacaaaaataataaatatttataaaatagtaaaaaaaaaaactataaaaactagtgagaatgaaaaatattacttttaattttcaataagctaactatacactttatgtccatttgatcctaactaactctccgtccgcattgtacaccattagatagtccatggacattttcgtccgaatttggctaaatggctaaatggtggaagacatagcccactttaccaaatcctgcaattaaaacatggtcaatcggctactgtatataatttagccttttttttatatatccattgggtacccaataccaattgtacaagacccaaataaaatggttagtaattagacctaaatatctaacccatttttaacccaaagttatttttctgtgtatagactaaacccataaatgatgatcttgggtatccatctggtccaaactctatttgaattaatatatgttaatctttctttttttgaacgaattaataaatctcaaattaaattgtgtttgaatcgtgtttttttcctaacacattattaatcaattatattcaggcaaatcatcatgtagaaaaatccaactagcttcgcttatccaaaagagttataacttataaagattcaacattccaatcttagcaaacacaagaatacaatacaacaattacctctatcccttctttttttataacacaaaaccaaatttgtgagaaaattcccaaaaaatacaccaacttaattatatcttctgaataaaatacacaaacttttagcgttaccaaaataatacacaaactttttaaattttttggttcaaacacaaactattttttgttgctaaaataatacaagaacttttaaacgttggacgtttcatacacggacgttaacaaaattaataacactgttaactttggatacttttattggtcccaaagcgacctacatattcgtctaacttgtagctatgcttaaggcatggccatgtatgtagtggtggaagaagttgtgtcttaagctttttgtcattgttgaacgaatctatgataacattctaaaataaaatacacaataacacaaaccaggatttacgtatcacgtattatatttatttatttaattatttaggcgtttattatctattttgtgtaaaacatcttaggctataggggttgggagcaatccttagcgtaaagaggactaaaagaagatggacttggcttggttttgaccgtctggtggaggaagaacatgagcagattgtatagtcgcatgttgatggaacaatttaaagtcggtttgcaattttgcagatggatttggattgaagccaagctggtgttgaccgtctggtggaggaagaacaggagcagattgtatagtatcaggttgatggaacaatttaacgccggtttgtaattttgcagatggacttggcttgaagccaagctggtcttgaccgtctggtggaggaagaacaggagcagattgtatagccgcatgttgatggaacaatttaacgccggtttgcaattttgcaaaaggacttggcttgaagccaagttggtcttgaccgtctggtggaggaagaacatgagcaaattgtatagtcgcatgttgatggaacaatttaaagccggtttgcaattttgcagatggacttggattgaagccaagctggtgttgaccgtctggtggaggaagaacaggagcagattgtatagtcgcatgttgatggaacaatttaacgccggtttgcaattttgcagatggacttggcttgaagccaagctggtcttgatcgtctggtggaggaagaacaggagcagattgtatagtcgcatgttgatggaacaatttaacgccagtttgtaattttgcagatggacttggcttgaagccaagctggtcttgaccgtctggtggaggaataacaggagcagattgtatagtatcaggttgatggaacaatttaaagccagtttgcaattttgcagatggacttggcttgaagccaagctggtcttgaccatctggtggaggaagaacaggagcagattgtatagtcgcatgttgatggaacaatttaaagccggtttgcaattttgcattcagtttaagagaaaaaggctgcctcctggcattagtaaagtcagatgcaataagaagcagagtgaccaccattgttattgtagagagcttcaccatgatcatcttcatattttaatttgggattgaaaatgtttattctacctttcttatttatattattgtgaaaaaattaacataagcaatatattaatgttttgttgactataaatttatgtatttaccaaaagaaaaacaaaagcaatattatatatttttgactggaattagatgttttaaatatatcaatatagttatatttgttgaatttatttactttttgtttaccagaattatatgttcttaccaaaaaaaaacataagcaatattatatattttgactggtattatatgtttgatgttttaaatatatcaagaaaaatacttggacccttatattcatcccctttattttagccaattaaaatttgacacctaataataataaaaagaatttaatttaattataaaatctaatttgccacaaaaacaaaattatttatcggcttgagtttatttgaaaaggtcagggtttagattttatgattaaacgaggttaaatatcggtttgggttttagaaagtacgattaggatttagattttatgattaaacgggttaaatattggtttaggtttataaacatatttaaattttacaattaaacgaagttaaatctcggtttgggtttagaaaatacgattagggtttagtttttatacgattaaatgagtttaaatggcggtttgcgtttacaaagaagaattaggatttagattttgtaattaaacgagattatatatcggtttagattttaattatagctttaatttattatgtaatttaagtaggatttaacatgacatgtttttattggttaatgcaaaaggaggtgaataaaggggttcacccataggggttcatatatcaatataattgtatttgctgaatttattctgattttattgatgagatatagttgataaattatttttctatatatacatgatataatttaatcgcatatttttcgacataaaaatatcaaattatggaaagtaaaatatataaatgatttttttgagtttccataaattaatttttttcttgtttagaaaacaacatcgctgactatatctcgaagacattgctgtggttggatagatgagcatgatcataacaatgataaggagatgagaaacaaaatcattgtcagcattatttataggcaagaattatctaattatttattcatttgatcattttttaatcttttttttgtcataagatattatttaagagtcaaacgagccaatttttagaaaacattgtttacaaaagtgatatgtagtggttccgcacgaatttttcgttccaaatagtttgctttgacatttgcattatgagggattaaggataaagaaaaagaatagaattcttctttgtcattttgaaactcttccaaatatactgaaaatgctggtcattcggttggggaagacactatcttcaccaggtctaaacagtctgtaaaaaagctctttcttggttgtcggcaccaatcatacacttcattgcccagagtaaagcttcgacttctatatggagaggaaaaagacttctaagccgattagcagctcccatagttgacgcccctccatttaatgatgtacatagccaccctcccatagttgatcactttttcaatcttttttcatttttttacttgcatataacgtttttggaaaaattacatttttaacattcaaaatatcacttggtaccactttaaacctcgaaagaattccactaacattcaaaatatcactaggtaacattcaaaagaattccactaacattataaatcaccaagataattttgctaatattttaaacctctaaactagctttcatgtttgcaccgccacaaaaatgatttgacaactaaattgtttttgtttaatatgattatttttatttaatttaaatttaaattaattttattattattatttacatttttagttttctatattgtaacgaatctaggagtttttgattgcattatattattttgtctatactagaactgataacattcgagattatgcggaattatacacaaaatagtcttaataatcgattcccactgtccccaatctcaatatatattactatttcattaattaaacatgatttatcatatgaaaagcagaaactattaaaaatatataacactgtttaatttttgataaaaattcaattatttttttgtatttaatatagaaaacttttgtagtaacaatttttaaaattagaatatatattgataatttgatcactgattattttatcacatatgatagaaggtacataaagtactcattcaagttgttgtgtaaatatagaatatttatgcaaaataatatttagttgtctcaattatcatacaaagagagcacatgaatccaaaatttggatgtcacttttattttcagcacatttttgtcattgctaaattttatttttcaaaaatatttctttaatatgttagcatatttattaattgtttctgtgagaatttaatagtcatctaaaatttctcaaacaaaagtcgttttttgagttatttggagggctccatatatcttttacctttttttggctttgtcttatttctagttcatgtaatgttaaggcaaacagattaacctgctattctattctcttattttctgaaattacttttctatatactttttctcataattggacaaccaatcatagagttattttttaattgatgtgtggttgaaaaacaaattcaaaaatcaagtaatcacatgtttatacaatattctaattttcaatctagtaataacatgtatatattatttaattctccaactataaaaatttaaacgttttttttccttaaaacaagttaaattgaaaaaaaaaacttaattccaccaccaaaaagaaagaaagatcgagctgtaaaaagaaaaaaaggatggccaaattgatcattgaggcggtggtagccgagtgcatgcagcatgcctatcatgtttcatttgtgttagtaggttcatcgacattgaaggcccaagactaaatgcagtaagcaagaactttatgggcatcatcttatagaaatttattgtggttaaccacctttattttttctttaaaaatgttagccttttatatatacactagattttgaccagtatatacgtgcgggatgatgatatgtaaaccatagttatcttgaccagtatatacgtacctataatcgaagtgtaggaaattaatgaacgagaaatatgttcaaagataaatttagattatatgaaatttatggtcgttaccttggcatgactttaggagtgtcttccttacatgttggacaccaaaaaaattgtttcttacttttcttgacaatctcatattccacttttgttatcttatatgttgtcttgtaacacttgaggcagctaaagaaacatcaagagtagtcggtgtcgacattcattatggtacaaattatgttgcacttaccaatctatacattatagcaaagaaataaacataataatattatttagtaggatgtgagaaatttagcattattatttagaatattacctcaaaacacccaaagaattcagaaatggtcgtccttggaaaacggtcatagtattcctttcttttcaccatttgattcccttcttttggcttagtgtaacaccccaaacccaataacttgaacccaccctatttgttttggttaaaagaaaatctcataaagcccatttaagcccaaaagaagcaaattacgaaatactaaggattttgttacatgtgtatgtatatatgcttatatcgtcatcttcgcgcagccttctcacgtcatcatctccagcaactcgttattaacctaagaacatcaaatcaacttgatcccaagccatcatcaccattgacgttgagatctgagttgttggagcgtgtggttttgttttagatcacgtacaagtgtgaagtgaaagcgaacgtcacggatcatcaccgttaaacaacggcttgattgggtaaggaaaacctaatccatttatgccttatttctactggaattgtctctcttagccattgaatttgtggcagatagatcaagttagcttttggatttttgtgtgaatatgtgaaagaaagaaacagttcaagtggtggaattggtgatccgtttcccgtcacgtccgaaggagtttggacgagttcttaacggttctgaatagatctcgttcccaattttttagagcagttttccgatccaaaatcagaggtaagatcaatcgggaaatcgcgtttaaagttggtgaatagtcacagttttcagagtgcagtttttctaaagtatctgagaaatattgtagtttcagatagaggttttgaggatcaatttctcctagaaatcagagagaatcaagaggagcgtaaggtgtgatttcaatgaacacgatgtgaaggaatccacagccactgacggatcttcaatcagacttaaactcaagaagttgtgcacgtttctttctggtcaagtaattgctaagtctgtcaaacccaaaaatcataaatgacagttcgagatggcttgttgacgacaacgtttggagcttgtaatgaagtccgatcgggatgaaacttcgtggagttcatcatgatactactggctacatattcaacggttggatcacatttgtaacggttagttcctgacttttgagtatgtttccaagacagttttatttgaagtaaatagtgatgagtttgtgttgttggttgggaaacgagttcggtttgaattgaagctttgcaggagctttcatgactcatggatttaggtcctggttgaaggagaaccaagttagagtttaagagcatgtggtcgcagttgagataataagtttgtctaaatgaggaagaaggaaaagtgtgttgtcatcttcagctaggctaaggtgagggtggtatttgcgaagcatggtatcattttcttttgttatgcttcttgacgcatgatatgtaggcttagatctgattgtatatgaaacaacccgacccatttttaaaaaaaatataattaaatattcctataaatatctaattaaaccaaccaataaaataacaattaaaccgcaagtcaaaaatactattttatgaataaataaacaattcgaccaacaaaaccaagaataactaacaatcctaaccgggttccaataaccaaaaacaccaaaataaaacaaacgagttcctacatcatcctctcttccttgccatgattccacgatcacactttatctttaccttaacaaattgattctaatagcaattaaagccaggagagactctccttgcgtctgaaacagtccagaaacgtccgttaactattcaatcgctacggtgaaatcctagctgcagacgtcacaaagctgcccacaaaatctcgtgccgatcggaaaacagacgagaccacgatctcagtttcaatcttcgctggtcctaattcgcgtctgagaaaacgtgtctcacgaaacttttaccacgatttgatatgacgaaactgatttctcccaaaccctaacgattctgctccttctcctttataaaacgaaaagtggctaactaaagccctaatttcgagtttccttcttttataggtacactttagggttttcaattaacccaaccaattaaaccggatgatttaaaaacaaaccctaaccgattttccggttcacgggcgttacagtatatgataagattacatgatgatatgactttatgattgttgagtatggtgtttgataatgtgatgttatgtatgatattataagtatgtttatgttaagtataagtatgtgtgtatgatgattatgtatgtttctatgaaagactgtggagaatcgaggtatgggcagtggtctccgtagtaatgtggacagtgatgggccgacgggttacatgctggtcaagaaaggctgacgagcctgggatgcatgggagtgtctgagccacgagggccagcctccacttatgaggttctagtcatcacgaggatgactggacctaacgatgtgtatatttatattaatatatatataagatgattgttatgaatatgttgttagaagttaaagcatgttaggttgattgtgtgtgataaatctatatgttatgattatggttgtatagctttagaaagtgttctatgtttcagtgggcaaagttgattcccctcactgagtattctttactcaccccctttttttccttttttcctcaggttagtaagcgtgaggagttgtgtgcaatattttgttcgagtatgaagtttaaagaaaatgtttttggcaagatcagataaataacatgctgtcttagtctatatggcggggcgggtgttacacttagattcttgtaaagtaagtgacaaaacttgagagggtaaactgttcaatttaaaatatacttaaccaaatgtataaaatagaacatatctaaacatgtatttgaatccaattgtaattttaacatcccatacttagccacaaaatcaacaaccgcagggtaggtaggattgattttcagtaaagacatctcaaagacatttgaaattaatctttgacctgaaaagtacatgatttaaaatatttgttattagtcatcttataatgattattataaacaatattcacctttaaactcattaatcttagcaagcggaattaagcaaatcactctctcaatgcatgcattttgacaggcattccacattgtctcagcgaacctctcccaatgagtacatgtcaacctttcatcactataaaaaaccaaataatttgagaattacattagtatagtttaatttatcaaaacactattatctatactataaaaaacaattatttgcttggtgtcaagtatttcaaactcaagcctctttgtgattttgttattgacatctgaacttttcatctcaccaaaagagactacttgtccaagtacatctgcaaaaaaataaaataaaaataaaaaataaaataacaaataataatcctatgaatatgtatttaatcaatcaattaaaataaaaaaacatcacagaagttttgtaatatatatgagatatcatttaccaattaagatgttttcatttaatcctgcttcatctaaaatctcagggaaacttgccagatccaagtaaatctcatcaaaaacaacaggagcacgacttatagtagtcgttcaaatcatagatattttaaaccatgttttgttgcacggtactttcccggtccattgatttggcgagtgtaaagttctcgacattacgccactctccaagtatgatgaacctttgaagtgctctcatctgttgcttcttagtagtagcatgtatcaaagtagattagtgaaatacaattgtgttaataatatagaaattacaatcctgatataatctagatttaaacgaaaatctatacttacttttttatcagctaggatcacttccatggtttctcctgagtattgcgtgtattgagttcatgaatgcaaaatcttaacttggattttccattcggtttttaaaggctttacatcagcaaggtccgtgatcaaagcaagtgcagccatttttgtataagcaatggtattagtaaaggagtttcttcgaaacgtgtgttttttttcttttcatctttgaaccattatttataggaatagcaggatataagttgcggttagattttgataaatgtagcagaagagattattctatagttaagattttaaacagatatgatccgtaattttagattgttgataattgttggagattattaattttgtccgtaattttagattgttgataattgttggaaattattaattttgctccgatattctccgtgaagtttgaagttacatcgtgcacaaaggatttatgtgcatacacataagatattttatcgaattaaataattaccatatatattagtttagatttaatcggatcattcaaaattttacgtatttatcgaattgtcatatatattagtttaaatttaaagagatttctataatctataaaactaacgaatctaacgggtcattcaaaaaaataactaaggttccaataactaattgcatcattcaaaaacaaaagtaatatgcagcccattaggcccattaatgtgttttggattcgttgttaagttactatattacccatgtaaaataactaaagtttcaataactaatctcatcattcaaaataattcgtaacatgcagcccattaaacctattaatgtgttttggattagttgttaagttactatattacccatgtaaaattcatttaattaattttagaaaaattatttctaatgcccttttcacactacccttttttaattatactattttctatttaccattttcatttataccctctttaaattattaatgaccattttacccctatttgtaaattgatttatgttaacaaaataaaatattaatttttttcgtctaaaatattccaaaataaaatttcccgccaaaattttcccgccaaaaaatttcccgccaaatattttcgaaacaaaaaaattcccgccaaaattttcctgccaaaaattttcgaaaaaaaaattcctaccacaaaagtttttcacaaacattttttccgtaaaagttttttttttggcaggaaaatagatttacaagggattttaaaaaggtttaaaacatttacaagggattttaaaaaggttttaaaagatttacaaggaattttaaagggctttaaaagacttacaagagttttttaaagatttttaaagggtttaaaagtgttttaaaatatttacaagagatttttaaagggttttaaaagatgtacaagagtttttacaagattttaaaagaatttataagaaaaccctttaaaaactcttgtaaatctttataaaacattttgtaaaggttcacaagagttttaaaatggttcaaaaagagttgtaaatattttaaatacttacaattctttttctaagagttaaaaaatgcttgtaaagactttataatagttttaaagtctttaaaactcttgtaaatcatgttttacccttttataagcttttaaaatccttgtaaatcattctatactacttacttatcctttaaaaacgattgtaaaccatgcaaaccctttttaaaatcccttgtaaatcattatttgacacttacttatgctttaaaaacgattgtaaatcatgttaaccacttttaaaatctcttgtaaatcattcaatgccacttacttatgctttaaaacgattgtaaaccatacaaacacttttaaaatcccttgtaaataattctatgccacttacttatgctttaaaaacgattataaattatgttttacccttttataagcttttaaaatcccttgtaaatcattccaatgccacttacttatgcttaaaaaaacattgtaaaccatgctaaccctttttaaaaatccttgtaaatcattctatgccacttacttatgctttaaaaacgattgtaaatcatgttttacccttttataagcttttaaaatcccttgtaaatcattcaatgcctcttacttatgcttaaaaaacgattgtaaatcttttaaaactattgtaaaaagttttaaaatgatttacaaaggttagaaaagggttttaaagtatttacctatgtttttaaagacttttattttaagagcttttaaaatgatttacaagggtttttagcaactaccaaagcttttaaaaaactttacaaggttttttgaaagagttttttaaaaatttacaaggatttttaaaagagtttttttaaaatttacaaggatttttaaaagcatttttttggctaggaaaattttttaagtgtaaatattttggcgggaaatttttttttttgggggaaaaaaagtttggcggaaatttttttttggcgggaaaaataatttttggcgcaaaaaattcggcgggaaacttgcagtttacaattacatgttcttattagatgagggtaatttggtcattctgttcaaggaaaaggatatttttaaaaatgaacaatataaaagactattgttgcaaaagggtagtaaaaaatggtagttttgcaaaactcccttaattttaagctacttctcaaacgttctagttgacacaatgctttccaattaatacgttaatagtataactaggtcggtacctttgctacgcacattattcatgctttaattagtttatcaatttcacttatgtatatattacgaacttcatgtattctgtttgtctataaatgtttatttgtataatttataaaatttaaaagtttctcaatttattattggtatcatttaaacatggatattattgtatttattacataattaatgtatccatttgtgtacaaaattgtatacttagtatatgtagttgtatacatggtgtgtcgaggtttagtgtattttattaacatgtaaattaattatcaaatttaacaaattaataagataaacataaattttatcaaaatcagaattacagaagaaaaacttcaaagaattattataaaaacttaaattcaaattcaattaatttaattaacaaaaattaatttcaaaccaaaaatgtaattaattttattttaaatatttaaacatatttttatatttattttaaatatcaaacataaaagatggtctaattaaatgtttttaacagttattaaaataaattaagaatatttaaatcaatttcaaacatattaattaatttttcaatttagaatatttaaatggattataatgttatatatataaaataaagaagatttgttatatttaattaggaaatgtttttaaaattatctgattggattagtagtatttaagcatataattaatattataaattcctataatataggtgtataattaattttttaatttgaaacacaagaaattatgagtggtatttaataagtgaataaattaattggataaataaagattttctccttaaaatcttgctgtaggatttgatttttactggaaaaaatcaacgacttctgttaattgtaatggatggctaagattaaaaattatgatccgttatttttaaaatccgagtcaaaagaatccgcgtctttttgaacggtttttttatgaaataatttttttaggaagtataataatatatttgatatataataacagttataaaattacatttgaatactaaatcaatcatattaaatacccttaaatagatcaaattaaataagatacgaaaatagttttgtgtatttaaattataaattattttcaaaccggaaattatgctatcaaaattgatatttaaataaatagttgttatcaaactttaaattcaattaatttaattaactgaaattaatatcaagccaaaaatataattaatttttattttaaatgtttaaacatattttatatattattattattactatactgaaaatttcataataaaataaattaaaatacgaaaaactgacaatgcatctgattaggtgaactgcggctgtggacaatagtctacctgcaaatctaatctacagtcaaaaggacaatagtctacctgcaaatctaatctacagtcaaaaatatttacacaatctcaatacattagtgaaagaaaatctattgatcaaatttaagaaaaaatattgcataccttataattttgttgttcatggaagatagtagtcaaattataaatcatcatcgggtttctgcaaattaacaagaaaaagaccataatccctatcaaaaaattcaatcagaattactcatcttataaatatagagaggtaaaaaaagtttaacatattactttgcgtaaaaggtaaataattagaaagcaagacatactttaacaaaattatgtgtgggtctacattttaatctcccacactacctgcataaatatttaaaaaacggatgtgagaaaaatatgaaaaatatttatggaaaaacatagagagtgagaaaggatacctcgatatattgtttttgaaacaacccaacccattttttttataaatataattaaatattcctataaatatctaattaaaccaaccaataaaataacaattaaaccacaagtcaaaaatactattttatgaataaataaataattcgaccaacaaaaccaagaataactaagaatcctaaccgggttccaataaccaaaaaacaccaaaaataaaacaaacgagttcttagatcatcctctcttccttgccatgattccacgatcacactttatctttacctgcatcaacaacaccatgagatgcgtaagtattatcataaatacttagtgaggcgatcctcccatctacgagttatacacacaagcaaataaaagggtataatcacaaatacaaaacaaacaaaccagtcattgaacaattcacccaaaacacattcaccacacctacgtatcatcacacaaaacaaatcacacaacccaatcgctcagataagctaatggtcacgcactcaccttaacaaattgattttaataataattaaactcaggagagactctccttgcgtctgaaacagtccagaaactcctacaacaagtcacaaccaaaagcaaccttgaagcaaactggacataaaaaacagaaacaaacaacctcaaagacgaaaccctaaaatacaaactaaccgttaactattaaatcgctctggtgaaacgttatccctagacgtcacgaagcttcccacaaaatatcgtcccgatcgaaaacagacgagaccacgatctcaatttcaatccctgctggtcccaattcgcgtctgagaaaacgtgtctcacgaaacaagttctgtaaactggagcataacgataaacgacatgggaataactctaccaaatttcgttacctttgaccacgatttgatatgacgaagccgatctctcccaaaccctaacgattctgctccttctccttccctctctttttctcctttataaaacgaaaagtggctaactaaagccctaatttcgagtttccttcttttatagtcacactctagggtttccaattaacccaaccaattaaatcggatgatttaaaaataaaccctaaccgattttccggttcacgggcgttacagttttctccatggtctcgtcgatccaaaacctcagttttctccatggtctttttctcttctgctaaaataaaaaaaagaggcgagagagtaaaagaaaatagaaattgctgagttagttcttgaaatgggacgtacagtatttataagatataaatttttaggtaaaagatatacataaaatattaaatcgtggaattcaagtttacaaattatgatgaatcccataattataggaaaatgtcaaagccaatttctcccaaaccctaacgattctactccttctccttctctctctttttctcctttataaaacgaaaagtggctaactaaagccctaatttcgagtttccttcttttataggcacactctagggtttccaattaacccaaccaattaaatcggatgatttaaaaataaaccctaaccgattttccggttcacgggcgttacagttttctccatggtctcgtcgatccaaaacctcagttttctccatggtctttttcgcttctgctaaaataaaaaaaagaggcgagagagtaaaagaaaatagaaattgctgagtgagttcttgaaatgggacgtacagtatttataagatataaatatttaggtaaaagatatacataaaatattaaatcgtggaattcaagtttacaaattatgatgaatcccataattataggaaaatatcgaagccgatttctcccaaaccctaacgattcttctccttctccttctctctctttttctcctttataaaacgaaaagtggctaactaaagccctaatttcgagtttccttcttttataggcacactctagggtttccaattaacccaaccaattaaatcggatgatttaaaaataaaccctaaccgattttccggttcacgggcgttacagttttctccatggtctcgtcgatccaaaacctcagttttctccatggtctttttcgcttctgctaaaataaaaaaaagaggcgagagagtaaaagaaaatagaaattgctgagtgagttcttgaaatgggacgtacagtatttataagatataaatatttaggtaaaagatatacataaaatattaaatcgtggaattcaagtttacaaattatgatgaatcccataattataggaaaatatcgaagccgatttctcccaaaccctaacgattctgctccttctccttctctctctttttctcctttataaaacgaaagttggctaactaaagccctaatttcgagtttccttcttttataggcacactctagggtttccaattaacccaaccaattaaatcggatgatttaaaaataaaccttaaccgattttccggttcacgggcgttacagttttctccatggtctcgtcgatccaaaacctcagttttctccatggtctttttctcttctgctaaaataaaaaaaagaggcgagagagtaaaagaaaatagaaattgctgagtgagttcttgaaatgggacgtacagtatttataagatataaatttttaggtaaaagatatacataaaatattaaatcgtggaattcaagtttacaaattatgatgaatcccataattataggaaaatgtcgaagccgatttctcccaaaccctaacgattctactccttctccttctctctctttttctcctttctaaaacgaaaagtggctaactaaagccctaatttcgagtttccttcttttataggcacactctagggtttccaattaacccaaccaattaaatcggatgatttaaaaataaaccctaaccgattttccggttcacgggcgttacagttttctccatggtctcgtcgatccaaaacctcagttttctccatggtctttttcgcttctgctaaaataaaataaaaaaggcgagagagtaaaagaaaatagaaattgctgagtgagttcttgaaatgggacgtacagtatttataagatataaatttttaggtaaaagatatacataaaatattaaatcgtggaattcaagtttacaaattatgataaatcccataattataggaaaatgtcgaagccgatttctcacgaaccctaacgattctgctccttctccttctctctctttttctcctttataaaacgaaaagtggctaactaaagccctaatttcgagtttccttcttttataggcacactctagggtttccaattaacccaaccaattaaatcggatgatttaaaaataaaccttaaccgattttccggttcacgggcgttacagttttctccatggtctcgtcgatccaaaacctcagttttctccatggtctttttctcttctgctaaaataaaaaaagaggcgagagagtaaaagaaaatagaaattgctgagtgagttcttgaaatgggacgtacagtatttataagatataaatttttaggtaaaagatatacataaaatattaaatcgtggaattcaagtttacaaattatgatgaatcccataattataggaaactatttagctattatcttataagtagttatttaattatggaaattgttcagaaactttatgctaattcaaaaatgaatatccaactaaatatttgattacctataattatggagaagtgatatattcgaattcaagaaagaaatatacgcattgaatattttcaattaatatgattcagttgctgaaaaaggaattcaattaatttaattaacagaaattaatataaaccgaaaatttaattcattttattttaaaatgtttaaacatatttttatattttaattatcaaacataaaaaaatagtttagttaaaagtgtttttctagttatttaaataaatttagaatatttaagctaatttcgaattcaaacatattaattcgatatttataatgttatatatatataaaaccgatttgttatatttaattaggaaatgttttaaaaattatctgattggattattaatcttttagaatataataaatattataaatccgtattgatataggagtataattagttttccggtttgggtttagtgctaaaacccgataagttcaaaaccgaaaaaaccctcaaaaactcgcaattaacccgtgacccggtgaaccggttgaaccggccgggtgtgggttttaatttttttttttgattttgcagtaaaatatgggattttagactttattcaattatttttaaaagttttttcagttcttaaattcattcgatgttttagattttggtgaagactttacaataccgccttaaaaatgaatcgaatggtgagagagacaattgagattagttgtttgaattcacgatgttttattagtttatttctatcattggtgatctcctactatatttgttacggtgttagacatttagttggatttaaaatttttaatcactttattattattgtttgattatatatatatatatatatatatatatttgggtgtaaataattttatattttggtaaacataatataattttatattttttaaacatgatatgattattttgttttatatttataaatactaaaaaaatatatatatatatatatttataaaatactctaaaatttctattaatattaaatttattaaataaattttaactaattgacccgtggtccaacccggttgacccgatgacccggtgaccaagaaggtagtccggttcatcatccgggtcgggtttcaaaactttactggagaaaatcaacggctaaaaaaaaatcaattgaatggctaagattagaagttatgacccgttattttaaaattcgggtcaaaaggatccgcgtctttttaaacgggtttttcatgatagaaaaattttaactcaatgacaaacttgttatttctgcgaaatgcccacctcattaaatgtacgtttcaaataatagagtagattatatttaatgatgggccaaaaataaattttgttttagggaagaatttatcttgggccggctctgttgaagggtgtccaagtattggcaaatcttcgtcgttgatgtaagaaaaacagttatcaccaccaacagaaaatagaaaacatataagaaacgaagacgatcctctttaaataatttaaccttagcgtgacaatctttaatatgtatcacacttaaattagacaagccggtatattatctcaaagactaaacattgtacaagaaaaaggtctaaaattaatctcaacgaatgaaaccattcttttaagtacaaaatctgaaaattgcgagttcgataaatttatgtttatacacctcggagataatgaggatttgtaacatggttccgatacaacaaacccctcaaaagagacccaaagggtcacaagaagggagatggatttacaacgatgtgctttaagggatgtgcaacgtcaccaccaccagcatgcttaacgaattctgccggtgagaggaagcttccatgacacacacagacaatcctcacctcctcacctttgcggtaccgatacagaaacccattaatctttttcccgttcggtccatcgcctgttgttgacacgaatggcatgtcctctataatgttttggctcgcttctttgcccaaattctcgggctgagattgggcacttgaagggcttgtttccacggacttgttcgttgttgcttcaaacacaagtaagtatttcagtaaaacactaaacaaaagacaacaaaaactttgcaaagcctagaagatatacaatgtttgctttcgaatattatcgataatcccttgatacattgtgcatttttgaacatactttttcccttggaatggaaacacaaacaatgtagtaactacaacgcaccaaactttgtttctttccactaacaatacctaaaatggccaaaaatcgaactctaagacacctaaaagatacctagtgaaagacacgaaataaaacgaaaagccaaagactcaaaaacgctaacaacacaacaaaccaatcacaatgccacacaatgaatccatcctaagggaatctaataatcgtaaaatgatatgttgatatcactacatccaaaagaagattcaatgtcgtgtaccctaatcaataatcaaagatctaaacaagcaaaactcaatcttgaagatttaaaaaaaaaaaatcatctcttaatccaaattcaacaaactcatgaaagatcacaaaaactatggtaatgtaccttgaacaggaggaagaagagtatcaacttcagacaaaccagaggaaccactaccagaagaaccaatagatccttcttccacaaccttctcttcaccaccacaagctttatgtttcctctgcttctctgatctctttctcttagcctcaagcctcctcaaactctgcaactccttcctcttcctccactcttcctccgtctccacgggtaacgaacaagtcctactcagccctgacctatcgttgaccaccaaatcaagaaccgacgtagacctcataagccttgttttcgcaagtgggtcaacaccaaatcttccatttagagatagacctaagtctaactcaatctctacctctccatcttcttcagacaatctctgtttcttcgacatgagcctgcaacataataacttcggtcggagaatattaattccggttaaattaga

SEQ ID NO: 1320 - DNA, 46739 bp, Arabidopsis thaliana
caatctgtgtacctggtttcacactctttgttccattaatgtacaattcgcaaattgtttccaactttcgtaaaccaatacttctaaccgaatcacttagaatttcgaccatattaacaaacccatcttctcccaaaaacacattcgccttgtaaccaaagcaacctatcgggaacacgcagttcccgaaatacatctcaggaaccggtggatctaaccggttcctgaaatcagcagcatacatgaaacggaccggtctgttctcatctcctccacgcgtctttaccaagcatgtccaaagatacgcgttggcaacaacgaacgttgacaagtgaagctcatgatgagagcgagctgactccctcttggcttgctccctaagtttctctatattctctcgagtcaactcgagcgagatccgtactaggtcggggctgatctccttgggaggaagcagcttcaatgatctgaaactatctttcacttctgagaaatatgacaaaagttcaatgatttttgcatcaagacttgcagggacattgataaccgtacgatctaaaaccggagtcaaatcctccggtaaatccatggctccatgtttacaaatgtgagcccatgattttataaacctaaccactgttttcccgtccataacagaatgatgagaagcgataccaatacaaaacccttggttggggaacaaagtgacttgcaaagaaagaaccgaaggtgagtcacaagaaagcgataactcgggcaccaaagagcgtatctccgattcgggacgtatccctttaccggagatacgggagaaatcagcatcactctccgcgacagtcaaggaaacatagtcgttcggagagacgatgatgctaggtttaggatcttgtgagctccatgtgaggcggccagcgagcgggaggtagtgacgaaggacgatggagagagagagctcaagtttggggaggatcacggagaggaaggactcaagagatgagtctttgatgagtttgtagaagataactctttcggtgggatggaattgtaaccaacgtaagtcgaagaacgtcagtggaagaaccatcgagttggctgagtcattggacgagttacttgctgggctgacttgggagatcttggttacctttagcgccattgatgatgagtatgtagctcaacaatctctaatggtagtaaataaacaagatttttctttgctttggtcacaaataaacaatatttatatatcacgccagattcatgtttcctgcaaaatcaaattatattcatttacaaatcaaataactaaattaaatggagtaaaatttaaatttataataagtcctgattcagaccagctgttaccaagtgtgaatgtttggtaagggattttaataacctttgtggtagaattttaaaatagataaagatgcttcagtatcagtctagattaaaaatgaacttcccacaatttgcgctaattatcgtcacaatgatttgttttgatttttttttcttacacctagattaaaactaaactttccacaatttgcagtttaaaacagatattcttttacacctaaataaaagaagatcatcttaacaagatactgtatgtttgtaggacaaacaattagactactgatcctcttccaaaatctttttaacctcacttttgaagttgaaacaataaaaattgggtgacagagccgtatctaatgcatcaaattttagtatccagatcatacataaataaggtaactttgacaaatttaaaaattctgcatggaaaacgttacttgaccaagagcaatgacatatatgtgtaatgtgttgtgcataatattgcaacaattgtttttttcaaaaagacaaattgcaagcaagcaccactaaagaggtgatacaattatgtccaaaccataattaaacgaagacataaaagtatccatctcactctgtgcagggtctcggctcccgaaccgtacgtgagctgcctcgtacggctcttcctaagaacttgaagccccaaaacttgaactacgcacatacatactttagagaaaaggtaaagccaagagagctgccctcaaccctactacgaggatagcatcttcttcaaacacaagcctatctcagcgccaccgatctcatccctcctctctgatatcgtgaacgctgcataccggtcaatggacacaatctcgtcgtttacgggtttaacccacccaaaatctgacccatataccccagttcggttcgaccccgaaacagagtcaacttgagtacccggtttcacctccttcgttccatcaatatacaactcgcaagtgcttcaattccttgtgaacccaaacttttgactgaatctccaagaatctcgatagcgtttaagaaaccgtctcttcccgacaatagctttgctttgtaaccaatagggaacacccagttcccaaagtacctctctggaaccagtggatctaattaaccgttttctaaattcggctgcatgaatacatggacagcaccgttctttctttgctgccaccgcgcgccttcaccagacagctccagagataggccattgtgacgacgaacgttgagaaatatagatcatgtagagagcgcgctgattcttgcttggctcgctccttaagtttcttgactttctcctgagtcagctggagtgtgattcggacaagatcggtgctgatatccccccttggaggcggctttagggttctcttgccatctttttcatacaagaagtagcacattgattccataatctttgattcaagaccgggcggggcattgatgtatgagtacgatctaaaattggagtcaaaatatttggaaggcacgtgaacggttccatgttctagtaatttacaaatgtgagcctatgatttgatacacattatcgaccctgttcttcgctctgtatgcagaaagaacattcaaatatttgaaactagaagatccacgtcgatgcatggaaataatttgaatttcttatgttatgaaaaaatagtaaaagaaaccttacttttagtttttgaattcacgaatgtgaaaagattatagtagtgcatttcaataattcaataatagttactatcatctcttagatgtaaatgtacattatagatttagtgcatggagttaataaaataatcataaatgaagacttttttttttgctacggagtgttaacactttggactatattattctctatgctcagaagaatcaaaaattaaaaatataactttttttttgtattattagttctctctcttaatttatgtaagttagacaaaaatacctcatcgcatatatcaaattatttagcaatgtaattaaatacttagggaaaaatgtcattaaaatccccaacttataaaaaagtagatttaaatcctcaactcccgacaaaacgaaattattaacaaagttttgttgactttccaaataaataccaaactttcgtatatatgaccatattaggcataatattaagtagattaacatattgtgtttacggagttaattttctgttaacagatccgttaattcaaaacgttattgtttcttataacaagaaagcgacctcgttttgttataacgaccaaattaaatcctcaaatccaatcttagatctccaaatcgagcaaaattcctaaccctaaatcttcatatgatttgaaattaggatttaattgagccgttatgacataatgacgttgttttattgttatagggaacattgtcgttttcaattaacgagtctgttaacaaaaaatggactctaataacagggtctgttaatgtcatgcctaatatggctatgccaataaaagtttggtatttatttgaaaaatcaacgaaagttgtatatttatttggaaaatcaacataagtttgatatttatttcgtttcgtaaagatttaaagatttaaataaactttttcaataagttggggattttaatgatatttttccctatgtacaatggtaaacttattcaacacccacctttttccctttttaacactccacgttattttttctttcctccacataataattcaacacctacttatatgttaaacactctaatggttttgtttaataaaattcaacactctaccccactagttttatttcattatttattttttcttttatattcatattttgtgattacataataataataattattaataaataaaattaaaatatcgacaaattagattaaattaacaaaaattaattattttatgttcttaactaatttttttgaacaaaacaaataattattattaaaacaaaaaaaatattacaaattttgatttacaatatgatacaagcacacaacacaattaataataaacacacttcacttcaaatacatacggattaactcacaaacaattaaactcttaaatcacacaacacataaagacataaaaatctctttaatttcaggacattctgaatttcgccaagatatgtttgactagatctgcttgcaattcatgatgtgcatttgaatcacgtaactctctcttgatgtattttcttttgttacgacgtggataatcttcttcaacattgttgcgacgctctctagactggtttattatatacttctcttcaatttgatattgtctattgtaagcttcaatatcgaaaggaaattctgatggatccattggattttttttagtaagatgatgtttgtgatattatttcatcaatagaaaaatgaattcccatttataaaaaatcgagtggttgaaagagaaggataagataaggatttgatgaaatatcatgtggttgagatccaacagataaggatcatgtggtaaactaaaatataaggattagatactaagtttctaacataaaaagccaaaatcgatggattacattgtcggaaaataatggaatactgacaaacaaatattattgcataaaatgacaaacaacaattatagcataaaatgataaaatacacacatacatatgacaaacataaacattaaagtagaaagtgacgaagtgtacacatacacttcaaatccactaatttccaaatacttcgtagttcaacttctctaacagctttttgctccaatcattgcgatgctcactctcaaatagcttcataaacatctccatcttcttcaatttgtttgcctcttctgtctcttggcaattttttccaagttttctaactctttctctttcaattgcttgaaatcatttcactcttcattaacgacttccaagcatgcatcacccttaccttttttttaactttctttttagacgcatccctccccatgggacgagcactagatcctacagagtttgagtcacttgcattaggattgtgagctctcttagatccactgcttccagaccccgtttttcctcctacctgactactatagcatggttgatcatgaacagcaagtcactctaacattaaattaaaatacacattcttaccatttgaatatagttcatgtgcttttgcgaatacatcaatctctgaccatccgctttgttacatacacttagcattatcgtaagcgccaatccatttgcccaatattttgttcacgtagttgaaatgatttctgcacgtaactccatcatacggaggatcaaatgagcattgctcattacaatattcagcaattttaatccactatgattcactcttttgatttctttcaacaatgctatatgttccatatttaattcatccactcaaaaacaccaaattttgcttagttgtccatttggggctttttcgtcgagtagaagttgaatcttcattgtttggaatgtcttcatcagcaccagtcatccctccaagagtcatttgtgtagaaaacccagtaaattcagatggtggttgagatgaatatgacatcatcgatgcataatatggatgatagtatggaacagatgatggcactgaaaaatttggtggaaatccataatttgagacattttgagactagttgaaagatggattttgatattgataattactggaatttgggtatggaaaaagataattagtagaatttagggtagaattattattggaatttgggtaagaaaatggaaaatttgcggaattttgtgaaggattattattaaaatccatttcacaaaacaaaattaaaaataaaaacaatatttttttggagaataattaaaaaactatagtaaaaatatttgttttttatgtgtccaaatgaaccaagtttatatttataaagattaaaatgttataaattttcatataaatatttttttatatataaattgttaattatataataattgattgtaaatagataagatgggataaaaaatctccaaaatctcaaatgccaataataatataacaagtgttattatctcaagaaagtgaactcttcacttgcaaagaacgtgtgtgaaacgtacatctcaataacatggtgacatgtggaatatatggacccaaaaaaaaaaagtttcgacatgttgaatttattcaacacttattaattcacatagattttttttgagttttcaacacctccattgcaaacatgaaacagttgaatcttttattcaacatgtccattgcacatagtttaaaaagaatattttcaaaaattacaatcccatctagtcaatcctctatttttatgttatttcgactaaaaccaaaaacatgcatttaattattatttttttaaactacaataggataattttataaatctcaatacaatgccggcactggacagagcgaagagaaacattggtatgaggcccccatttttaaggggctcccatttaattttgtttttatatatacatatttatatatcttacatgtcctatgctatatgctagagcaaaaatattcacagaataaacatgatatgaagaaagatatgttaaaaacaaaataaaaaatcaatttatgtagtgtcacgtgtcagccattcagccagacaatctataaaacaaaaactcaactttaatacataaaaaaaaaaactacaataatgttttggtttgtcattatacccatgacctttgattatcttcctcttctctgtttctcttttcatcaacgtcgttcttcaatctctacttctacaatcaattctctatactcatgactgataattttcctattttagtcgataatgtgtttatgtttatacttaatttttagttgattttgatcataaacttaaatttatatataaacttttttaggtatttcaacaagaaaaacaaagtgtaaaacaagggctcaaaaaagaaagaaacagagaaaagatgaagaacttgtgaaatctttgagtaattctatgttgaggtatgttaaaagatcaaaatctggtaagtttgatgaaagtgatagagttggtgatgagaatgagaatcaagaagatgataaggccggagaagaaacaatggctgactgtgacaaagaggaatgtgaaaaaatctctaaagaagatgatgtgcctgtggatttagaaaaacctccggagatttcgattttacaatttacagatcctgcaaattggagaaaaaatgatcagggattaaaagattatctagtgcaaaaaagttctatggaaagagttgaaagagactacgttttccccaaaaatgatgttggtagacattttttttatagatatttcaaaagggagttgaaaaatggagaaaaataagataggaattggttactttattcaaaagcataagacaaaatctattgctttgttgtaagttgtttagatgggaacaagatgccactcagttgtcaagcacatgattcaacgattggaggaatgtcaagataagactcggccaacatgaaattagccatagtcacatcttttgcatgggttagtggatagaattaattgagattgcgaaaggagcataccattgataagtatttaaaagaagaagtcaaacgagagaaaaaccattggagagaaattttgttgagactttttgcattggtgaaaaatcttgctaagcagtatatagcattccgtggaactaaggagaagattgatgagagaaataatggaaacttcttgagattcattgaaacgtttgaagagtttgattcacttacgcaggagcatatcaaacgagttaaagaaggtaaaattcactatcactatctaagctccaaaatccagaatgagttgattgctatgctaggatctgaattcaaacgtatgatcatcaaaaaaaattcaagaggcaaaatatttatcagtaattctcgattgtactctagataaaagtcataaagagcaaatgagttttgttatcagatgtgttgatgtctccaccacaacgacacgagttgaagaactttttgtgacgtttttagaagtcatcgatagatcggggaaggactttttgagttgctttgttatacattcggtgatctcaagttgaaaatcgatgatgtgagaggacaaggctatgataatggatccaatatcaaaggaaaacacaaaagagtacaaaagcgattgcttgatatcaattcaatagcattttatgcgtcatgtggttgccacagtcttaatttggcacttgctgatatggccaaatcatcttcaaaagcgattttattctttggaatatccaacgcatctactgcttgttttcatcctttacacctaggtgagaactcctaaagagatggtaggaggtctcacacttaagccattatcagagactcgttgggaaagtcgcgtagaaagtgttcaagaaattcgttttcaagatccaaaaataagagatgctttagactatttggctgaaaattttgatgatcctaaagctcgcagcgatgccgacgctcttgctacaagtgaaactcatggaatcggaaggtttgagttcttatttggtttggttatttggtatgatcttttatttatcgtaaacacggtaagtaaggtgatgcaaatagagaatattgctattgatactgctcttgttcaactaaaggggttgctctcgtattttagaaactacagagaagttggttttgaagcagcaaaagcggaaactaaaataattgcagaatctatggatgtcgagcccaagttccagtgaaaagaaagcgtatcatcaaaaaaaaatgcattttgatgaggaggtggagaaacatggtgaaagtgtgatgctaagcgaggaagagagtttcaaaatcgattatttctatacaatcgtggatcaagctatagtatctcttcaagcgaggtttgaacaatttgaagagtatgggaaacattttggattcttgattgatttgagaaagctcaaaagagaaactgaagatggattaaaagcatcatgtatcaatcttgaaacttctcttaaacatggaaagaattcagacaaataattaacttcatctaaatgttaaacactataccttaacccctaccaaataacaccaatatttaacttagtttagatgtatgacgctatatatacatactctaacactcatctaaaatagagaatgaaattaactctcttttaagatcaatttttttgttgttttttcgtgaaattggctcttagatgattcattttatgttgaacgtaagagaactacttattaaaataacagttttatattataaattctacatgtcggctcatacagtccgctgggatgctgtagacggcaacaaatttaactcacaaaatcatttttcctttgaatatacgtcttcaatactcccaaaaataaaaattgaacttatcgataataacaaaaaaatatggatgcagagcttgcagcccttaaaacttatctttaaatgactgtatcaactttgtttctagcattatctttgctataaaaaattttaaagtatcttttcatataatttttcgacatatgtttcttttgactactttttctgggataattgaaggttaaaataaatttggataaacaatttaaaattttcggatcagtataattcatggtaaagtaaacattaagaaattaagcaccaaggtaattaaagaaatacacataacataatacatgttttccaacaataacacaatagttgactactatacactttcaaaattgccatcacatctctttcaaaacttttcaacggattgaaaaaaaaacacagagctcactcacattacataaaagttttagaagttgagatggtaaagaacatgatctcataagctcttcttagtatttagcacttaaatcctcaagaaccacaagtgttaaagtagctaattaacttaaatgagaagaaggcacaactattgacatttaccatctttttattattgtttatgaccaaaattagtgtattattagtctcctccgcaccggaaaaacttctagtttaggacatgtacaataaacaaatatatctctactttggagctttataaaatgcatggccatctcaaaaatctgttttgccatcttgacgctgaaatgatttatcataccactgaacaatgcactaaagaaaaacgatatgaaaatgacatatgtactaaaaaaatttagagtagagaacaatggattagttaacgacaacaaaaccaaataccgaaaatatccaccatcttgatttctaggtctgctaaaagtctcaaaaatcaaaagaattgattttgctttttataagttttttttattaaacattctcttttacgtttgtcttcttatattttcttcttcgatctccagtttgtggtgcaatgacccatcataaaactcaaaaacacttatcacagtaacaaataacgatagcggatgggatttatgatggatcttgtcaatctatagtcttcaactggtaaactaatccgagaagtaaaaagtatgtgtgtatccggatacgttttatacaaaacttttgttttacttaaaatggggatttctctccaaaaactattcatattataaccatgtccttataaacaaccttaaagttgatatatatgagtgttatgcttatatcatatcacatctagaaaagaatgattaaaaaagtcaacaaagaccagctttcaactttcatagcctttaaaaaggcatcaacgtttgtgtgtctatatatttttaagtctcgcaactctcattaatcccacccaagcttcaaaatagaacacaaagacatgaaccgaacacaatctctaaacacgctctattgtcgtcttggcaacactttttcttatgagtcttgttgtgtgtacaaacacaatttctccaataactttgtcttgctgaaagccgattactttgagctccgaccttaggctattttctccactggatatataacgaaacaaacggtaccgtttccatcgtttttcgccaacatggaaccgctccttcttcttggattgcttggggacttaacccaagtaatactcatggttgggacgcaagcgctagtcgccttaaccaactaaatggccaattccaggtctaaaaaatcgaaagaattgatttctcttttttcaagtttcttttattaataaaaccttttcttttacgtttatcttcttttcttttcttttcttctttgatctgtaatttatgtggcaacaatctatcataaaagtcaaaaacacttaatcacaatataaaaaaactaatataaacccatcatcatccaagctcccttgagttcctagagatgcaaggcgaagcctgactttttttttatcggatataaagagacataccttgaaaagatgaaccatcttacgccataaaagagataaagatacagtagaacctctataaattaatattcgacaaacgaataaacactaaaaaaaaaaaaaaaaaatctctaaaaagaatggtagatttgtgtattgcttaggtttattttagtatatgagcctttattctctagtgatttttaataatctaccattttaaaagctacataactccttattttttctctaattcaagataaattttatattaaagtgatagttggtgacactctttgatcataatttgcataacacaaagtactaaatctattgaaaatatgcataagattgagtatttttcaaaacaaatatatgtccaacattataatttgttatttcattaccaacacagaaatcaagatttaaagatccattgagaatatcatgaaaaaccacgaaaggaaaacagttgtcaaacctcaaatctcctatatatgaaatgaattcacacgccaaaaatttaattatatagacatcatctttatatagatccccatttgcaactaatcagctatttgcatttattcaaagaacttcaaattattattatgattattatactttttgtaatatgatattttcaaacaaaatgcaaagttataattatatatttttttgtgtaaattactataactataggtttctttcttgtttcatgtatgtgttgttgaaagattctctttgaatttacccaataatttccccaaaaaaagtccttttaagaaaagagaatttaattaactatttttgcgtgtgtggtcgatcaattgtttgagatttcctgattattctatatgtcccccacagacacagaaactcatatacagagacataataaaactgaattggcatcccttttctttggatggatttaatacaaaatttgacccaaatctatatagttgatgttctgcatacataaaacgtgtccccattcctgtgacgcatacatgtgaagtgtttaattgtaatctctttgctttctggtttccatgaagagaagacagaagagttttgagatgagacaaagtgagatgattaaagatgatatataagagaagtaaaagggttacttctagtgttgtatgaagcaatagattattcaatgtaatgctagtacaatgataacaaaagaaagctttgtataccattagggcacgggttcgagacttgggaagctcttgaataaatttcccaaacccactcagcctaactctacgcttaacttccaccatcgccggccactcgctcgtttctgctttctcaccactgccatagaaaaacctagtcagagaatgaaagcatatattcaaatgtcataactgtcgtcaagattcatggtgattttgcacaagtaccatgatattctgaatttctgatagaaggaaacatgaaacctacagatggactctggagcatcccatactctactcagaatacttgacccccttaaacaactgatgcatcttcttttttatacttttcacagacactatctagcttgctgatgtttcaattgatctattcttaagcttattcaaatgccattctaattgaattagagaagagattgattgctaacacaattccagttcaagtacaatttataatcttcaaagaaatatctaatattagcatagagcagaaattgtctgtgcccgaagaaaacagtatcaaaaatattgaataatagtagctatattagttaaggtaataagaacttaccttttgaaaatgccagcaacaggcactacggaagacatactcagttgcagtaaccatcccatgctctctctcccttatcatcactaagtgcagctgctttctcaagtctagagatatcgtcatcatacataggttattaagcaaagtagtcgtcaatgagtctttggtttccagctacatgatctctcttgatgtattttcttttgttacgacgtggataatcttcttcaattttgttgcgacgctctctaaaccggtttatgatatatttctcttcaatttgagattgtcttttgtaagcttcaatatcgaaaggaaattctgatggatccattggattttttttagtaagatgatgtttgttatattatttcatcaatagaaaaatgagtttccatttataaaaaaatcgagtggttgaaagagaatgataagataaggatttgatgaaaagatcatgtggttgagatccaacagataaggatcatgtggtaaactaaaagataaggattagattctaagtttctaacataaaaagccaaaattgatggattatattgtcggaaaataatggaatactgacaaacaaatattattgcataaaatgacaaacaacaattatagcataaaatgataaaatacacacatacatatgacaaatataaacattaaagtagaaagtgacaaagtgtacacatacacttcaaacccactaatttccaaatagttcgtggttcaacttctctaatagctttttgctccaatcattgagatgctcattctcagatagcttcataaccatctccatcttcttcaatttgtttgcctcttctgtctcttggcaatttttttccaagttttctaactctttctctttcaattgcttgaaatcattccactcttcattaacgacttccaagcatgcatcacccttacctttttttaactttctttttagacgcatccctcccatgggacgagcactagatcatacagagtttgagtcacttgcattagtattgtgagctctcttagatccactgcttccagaccccgttttttctcctacctgactactatagcgtggttgatcatgaacagcgagtcactctaacattaaattaaaatacacattcttaccatttgaatatagttcatgtgcttttgcgaatacatcaatctctgaccatccgctttattacatacacttagcattatcgtaagcgccaatccatttgcccaatattttattcacgtagttgaaatgatttctgcacgtaactccatcatacggaggatcaaatgagcattgctgattacaatattcagcaattttaccccagtatgattcactcttttggtttctttcaacaatgctatatgttccatatttaattcatccactcaaaaacaccaaattttgcttagttgtccatttggggatttttcgtcgagtagaagttgaatcttcattgtttggaatgtcttcatcaacaccagtcatccttccaagagtcatttgtgtagaaaatccaggaaattcagaaggtggttgagatgaatatgacatcatcgatccataatatggatgatagtgtggaacagatgatggcactggaaaatttggtggaaatccataatttgagacattttgagactagttgaaagatggattttgatattgataattactggaatttgggtatggaaaaagataattaaaagaaatttgggtagaattattattggaatttgggtaagaaaatggaaaatttgcggaattttgtaaacgattattagtaaaatctatttcacaaaacaaaattaaaaataaaaacaagatttttttggagaataataaaaaactatagttaaaatgtttgttttttatgtgtccgaatgaaccaagtttatatttataaagattaaaatgttatgaattttcatataaatattgttttatatataaattgttaattgtataataattgattgaaaatagataagatgggataaaaaatctccaaaatctcaaatgccaataataatataacaagtgttattatctcaagaaagtgaactcttcacttgcagagaacgtgtgtgaaacgtacatcccaataacatgatgacatgttgcatatatggaccccaaaaaaaaagacatatatgaacttattaattcacatagctttttttgagttttcaacacctccattgcaaacattaaacgggaaaaagttaaaaaaacaaacaaactaattttaatttggaagtttaatacccaatatttttagattggaataaaactacctcatctaattatttgtagtcacaaaatacctcagatataagttattggtggaatcaaatccagtcgttaacgggcgttacggaatcatttaacggtgttaaattctaattccgtatgatctagtttatataggggttgtttagatttattagttgagaatattattgtatcctagtggctacacacgaggctaacttattctccttactcgggtttgatacccctaactcgcaattttttttttagttttttcttcttcttctcctccgggtgttcgttgagaaatcaaaattggagagaaatccagagtcaagggtcgaagaagcttctcatgattcggatctgctatttgaaaaggttgaaagagaagagcttctttgtagaaagagtttggggagagttccaagttccaacatgggcggattgaggtggaggaggtgaaagaagtggagttacagaaggtggaaggcaagaaggaggcgttggaggtggaggaagtggagttacagaaggtggagggcaagaaggaggcgttggaggtggagatgaggtgattggcggatctgttaagaaccaccggcgaaaataagaaaagggccttactagggattcgaactcgggttaatagggttaagtgaccttgctaaataccactagggtacggtaataaatttcgtttagtgtagacaaacaattatatatatatatatatatatatatatatatatatatatatatatattaaactagttagagttaaaatttaacgccgtcaaataattctgtaacgcccgttaacggttgggtttgattctaccaataatttgtgtctgagatatttttggaatacaaataattagatgaggtatttttattccaatctaaaaatattgggtattaaacttccaaattaaaattattttgagttttttatagcttttttcccaacattaaacagttgaatcttttattcaacatgttcattgcacataatctaaaaataatattttcaaaaactacaatcccatctaatcaatcctctatttttatcttaattcgactaaaaccaaaaacatgcatttaattatttctttttttttaaaccacaataggataattttataaatctcaatacaatgtcagccctggacagagcgaagagaaacattggtatgaggcccccatttttaaggggctcccatttaatttttgtttttatatatacatatatttataaatcgtacatgtcctatgctatatgctagagcaaaaatattcacagaataaacgtgatatgaagaaagatattttaaaaacagaataaaaaatcaatttatgtggtgtcacgtgtcagtcactcagcccgacaacctataaaacagaaactcaactttaatacataaaaaaaaccaacaataatgttttggttggtcattatacccatgacctttgagtatcttcctcttctttgtttctcttttcatcaacgctgttcttcaatctctacttctacaatcaattctctatactcatgacagataattttcctatttagtcgataatgtgttcatgtttatacttaatttttagttgattttgttcataaacttaatttttatataaacttttttaggtatttcaacaagaaaaacaaagtgtaaaacaggggctcaaaaaagaaagaaatagagaaaagatgaacaacttgtgaaatctttgagtaattctatgttgaggtatgttaaaaggtcaaaatctggtaagtatgatgaaagtgatagagttggtgatgagaatgagaatcaagaagatgataaggccggagaagaaacaatggctgattgtgacaaagaggaatgtgaaaaaatctctaaagaagatgatgtgcctgtggatttagaaaaacctccggagatttcgattttacaatttacagatcctgcaaattggagaaaaaatgataagggattaaaagattatctagtgcaaaaaggtcctatggaaagagttgaaagagactacgttttccccaaaaatgatgttggtagacattttttttatagatatttcaaaagggagttgaaaaatggagaaaaacaagacaggaattggttactttattcaaaagcataagacaaaatctattgcttttgttgtaagttgtttagacgggaacaagatgccactcagttgtcaagcacatgattcaacgattggaggaatgtcaagataagactcagccaacatgaaactagccatagtcacatcttttgcatgggtcaatggatagaattaattgagattgggaaaggagcataccattgataagtatttacaagaagaagtcaaaagagagaaaaatcattggagagaaattttgttgagactttttgcattggtgaaaaatcttgctaagcagaatatagcattccgtgaaactaaggagaagattggtgagagaaataatgtaaacttcttgagattcattgaaacgtttgaagagtttgattcacttacgcaggagcatatcaaacgagttaaagaaggtaaaattcactatcactatctaagccccaaaatccagaataagttgattgttatgctaggatctaaattcaaacgtatgatcatcaaaaaaaattcaagagacaaaatatttatcagtaattctcgattgtactttagataaaagtcataaagagcaaatgagttttgttatcagatgtgttgatgtctccaccacaacgacacgagttgaagaactttttgtgacgtttttagaagtcgtcgatagatcggggaaggactttttgagttgctttgttatacattgggtgatctcaagttgaaaatcgatgatgtgagaggacaaggctatgataatggatccaatatgaaaggaaaacacaaaagagtacaaaagtgattgcttgatatcaattcagtagcattttatacgtcatgtggttgccacagtcttaatttggcacttgctgatatgaccaaatcatcttgaaaagcgatttcattctttggaattatccaacgcatctattgcttgttttcatcctctacacctaggtgagaactcctaaagcgatggtaggaggtctcacacttaagccattatcagagactcgttgggaaagtcgcgttgaaagtgttcgagcaattcgttttcaagatccaagatcaatcttgaaacttctcttaaacatggagagaattcagacattgatggggatcatttatttttggagcttaaagttctaagagaagttttaccaagagagatcaagaagcctattgaggaattggattttttgaaaaagtttgaaagttgttatccaaataaatgggttacttttagagtgatgttaaccgttccagtttccgtcgcctcggctgaaagaagtttttccaagttaaagttgataaaatcttacttgcattctactatgtcggaagaaagattgaatgggctggctatattgtcaatgagagggacatggttggagagctggactgtacaagttggatggataactttgccgagaaaaacgcaagaagaagtttgttcaaaaaatcgaaacaaatattgaattttgattgtttttttgttgaatttgtgtttcatggctagttttatatttatgtttgaaaccaaatatgtttgagcttgattatggttttaaggtgcgacataaggacctccgtttttgtcagggcctactctgtctcaatattatgtaaaatagcctaactaaggcctaaactatcatctcctaatttctggacattttataattattctcaccgcttgtttttaaattatcaacaaattatactttttctgaaataatttcaaaaacctattaaaaatattgataaagtcaacactaaaattttctcatcatcaaacttatagcatctccaatggctcaatatttctcccaatggtttctctcaacaaaattgttgaaaaactaattcagaaaccttttaatcggagagagatgtctctcttgagaaaaacttttgatgagatgagaaacgtgtacgtggcatgttctcattggatgttttatgtgacaaaactgaaggaaaaaaacgcatggaaaaaattgtttctcatctctctctctctctctctctctctctctctctctcacgttctctctctctcacgttctctctctctctctctctctctctctctctctctctctctctctctctctctctctctctctctctctctctatctctctctctctctctctctctctctctctctcaacgaaacgacgatggcgaaggcgacggcgacagagccggacttttgatccgacgattaaggttcaattgaagcagtcgatctgttgtatgagcagttgttgggcatgagcaaacgacgacgacgacggatgcggatccgtcttttgcaaaaccggtggtcacgagcgcatgtggaaaatgaatcgaatcggagaatcgctgactgaagctcataactggtaagaatctatttctttctgcaatttatcatgatttaatttgggaaatttgatgtttcttttagggttatttgaattctgaatttagggttttatattgtaagcattgagtaggagttttttttattatcaatggaggctaagtgtttgttatttgacatgattgatgtgaggatgagtcattgaatgtttgatttagggtttttagtttttgttaatcaaattacggtgaattgaaaacatatttgatctgtgattcatgctttcatatgtgtctacaacatgtttggcaactttttttgagggaatcgttttcacctgaagaatatattaacacgtaataaaatcttggatcaagaaaaatatcataacttgtaaacatatatactaggaagtgttggcaaacaatcatacataagttatgataaatcttaatcgctactaaagcctttgcgattttgttgtttatgtaataaaatttatattcttataattgtttggcctcttcttgaagctaacatgaaggaactagcaagagattgagaagcttgtgaaattcaatcgcttggtacttcttaaactaagagtctaagattcataaccaaagaggttagacaaataaaatctcctctctcttttgtgcgggaacaattttgactgcataccctttatacttatgtgaatatcagaaaaaaaaaatcctatttttttagaaacaccaaaagagtcaatctcttttatctataaatattttaatcttgtttcctgtttataccttgtgtttattcttcttggtatcacagtggtcagagagagattgtgcttttgtgtttagtttatatgcctgcaatctttttgtatcaagaagtgtttagtttaattgttgtgataaatttaccttgcattcgtgtcaaagggaaaggaatattgaagactgggcatggataaacgttaagagcaatattctaatggttaagagatcaatagaaaatatgtgtgcaagcctcacgatttgatatgaaacagtagaacaagatcattagtgcttatataacactcattaaaaatgaagtgttgattctaacatagtttctctgattctccatatagtgaataacattatttccttctgtttgatgtttaggctaatatgattttgttttctctatttttgtgaggttaaatggagtggttgtggagacgattggtacaagtagagaacgcaagatatatttatcacatcaactaaatcaaggcatatttaaaagtggttgttgtctcattgattaccggtttgtgtttaatatagagttaagcgtataagtacactttcattcttctatttccttcttctttaaccttcaattttctctgaatttctcgtttccatcttcttcaaccttcttctttaacctgcttctttaatggatgatatgaatccattttatcagtcttcgggtttcatagacctattgcatagtcagcaagaagacataatcgttttgcaagtggatcatctgaagtcccaacctttaatacacaaatgtttgaagaaggaagtgaagatgaagtaacactcatgggttgtacacaagatgaagtcaaaccgaaggttggtttatcacaaaagaaatggtttcccaaagaagatattgttctcgtcagggcatggcttaacactaacaaggatcatgtgattggtaatgaccaacaatgtcaatcattcttgaaacagattgcatcatatgttgcaatcagtccgcaacttgattatctgccaaagagagagcatgctaaatgtaagcaaaggtggtcaaaggtcaataaaagtgtgaccaagtttgtaggttgttataagacggcaacaactcataaaactagtggacaaagtgaggatgatgtaatgaagttggcttatgaaatctactacaatgataccaagaagaagttcaacttagagcatacgtggagaaagttaaggtatgatcaaaaatggtgtgaagctgcaactattaaagggaataaaaatgctaaaagaaagtgtgtcgatggttattgatatggttcaaattacctagaactactctctcaaataagagatcaattgcagtattttaggatcgaattcacggagttcttttgttaaaacagttagttaaatgtcgagattaagctagcagggtaatagtgaaaataaaggagaacaaagtaaaaagacagcagattgattgtgttgtaaacgatttaataaagagctaggaacagggtattctcaagaaactattggttagtagatttaatgaaagctaggttgttatcgaaccattcttaaactcaaactctaattatggaataaccggcgggcttgccgcgaaactccctatatctatagctaataataaccggagaagccgagaaactatcaacataaatatgcattcttaacgagttcaattgttcatcttagtagataggccgattcttattacacacctataaaccagattcatcatataatagatccaactacagatacctatgggctatggcgggcatatctattgtctggattcaagatctagttaaatactctagatctagcattagacatgattaaagatgaaaaattctacatataacctagcaaagggggcaatctactaaaccatatgaatccctaatgagaaaccctattcctaacaagcagactactcagacatattggatgaagcaaacaacatattcgagtgtgaaaacataaacacagtaatagaggtaagagttagaaaagatctcttcactgtattaagaactggaatgaatctctcaagaacaaatggatgaatagcttctgtctctcacaataaggtttgcaaagaacttgataaaacaaacttaggtctaaaagcaagatatataaaaccctaaaaacgtccagggactaataatgcaaataggaaagtttctggggcaaatttcctcttctgtaaacttgaaagcgtctagggtttttgctggggccgaaactggtgtcgattgacaccaagagtgtgtcgatcgacactcctcgctgattcctgaaccaaagtcatccttagcttcctttttcttagtgtttgctccaaaatgtctccttatctctattgttgtcccattgcatagagtacctgaaaagacactaaaaacactcgagaaataacataaagactcaaaatcctatacctaaaacatagttaaaatcggtgaaaatcgggttatatcaactcccctagacttagcttttgcttgccctcaagcaaaacacaaaagctgaacccgtggaagaggttttgaaaacaaaggaactcccaacattctctagcctattgccatgatctttcaaactaagtccatatgcctaacaagtctaatcaaatcctaaccaacatatacttctctgcaagcttacacaacattctagattccatacctaagttccacaactatatccaccatgctttcatcgctgggtctcatcaaacaagccagcattcaagatccttctagactcattcatgtactataccatgataaattgaccattcttttatatattttttctttttcggtgttctttctctaccccagacttattctttttagagattaaagaaaggggaactcgcatactggatcgacatcctcagcatttttccaacctttgtaattgatcattccaaataatgtataataatggggtcatagaaaacattcctacccctatacactatctgaaagtcatctcaatctctcattatctttttctttttataaggtgagaggaacatattcttttttatcacattggtctcaatatcaggtacgaacaaggagtcaagatgtatgaatactaatcgtttgaagaagtaaaaggaagagcagtgagattagctccagccttagtggttgagttggaaactaggatatcctcaagtctgttagtttgccaactagattttccaatagtcggattgactcgaacctgcagcactcatcaatcaggcaataaacaagtaaactaaagaaaacgtttcttttttttttttttttttagagttagaaaataaaagaaataaccaaatgaattgcaaaacgaaaaataataagaaacaaaaataaaagccatattagtacgaacctcccccagacttaaacgacattttccccagtggcattcaaatccagagaaagcgggaaaaataaatcaaaaatagaagaaaagaaaagagagggaaaagaaaaatcaaaccagtgggttgcctcccactaagcgcttgttttgagtcaataggttgacttggcggagttcaggatgtgggtggagtggtggaggattgatgctgcctcctcgccttccaaggcggtgtgtaaacggatatggttcgagcagcttctggtgtcgatcgacactcaggggtgtgtcgatcgacactcaggggtgtgtcgatcgacactcttctcgtcacctgcaaaaacaacaggagaaacaagctttcgaggaatctaggcttgttatcatgtgaagcagtcttcgaataatccaaagaattaatcaaagataaaacaggagaagagagagaagagaacttatcacataggtcctcaagtggtgtgggctgaagagaatctgcaaaattctctgtccgtgaatcccgagggtgtcgatcgacaggggtagtcaccgttgctctacaactctcattggcgagctgaacgtgttggagcgttgtgtgttgctctatggtgggattctgatcagtctgaggaggtgtgcctatgctagaagcaatgcaactgataggcttagtaagctttgaaccatccatgccaaactccatctccgaatcacaaaccttgagagagattctccctctcttcacatcaaacctagcaccagctgtaactaggaatgctcttccaaggataaggggatccttgggttccttttcatagtccaggaccacaaaatcagcagggataacagagttaccaaccttaacaggaacatcttcaaggattcgcttggaacgatccgcaatgagaagagtaatgcgagtaggcttgtagtgagtcatgcctagtctcttagtaacagacttaggcatgaggttgatgcttgatcccagatcacataaagagcggctgaatctgcttgtggagatagagcaatcaagaacaaagctacctggatctggaagcttctcggtgctctgaccaggagtaatggtgcggatgtactcagctatgtctactctctatgccttctccttcttggccttaggcagcatgattgcactgatgtctctggtaagtaccttagcttcatctgagctaatttcattgtcaacaagtcgcttgacatacatgttgagtgaagcagaagatgtctcagaagcatccttaggaagagtatggaggatcttctccattatggatgtgcacttagcagcatgaatctcttgcttagaaagacgcctcctcggatacgggacatgaggagtgtagacagactcgggcagcataggtatttgcacctcataaggtgttgtccggatccagtgtcgatcgacactagaggggtatcgatcgacaccgtcgtattgagtcgtctctgagaatagcgtcccatatggtgccgatcaacacaggagggtgtcggtcgacaccatctctgcaactgcgagctccaactcgtcttcagtgtccaattcctcccacacatcatctccttctctgatcaagatggcattgcggctcttccttgggttagcatcaggattaccaggaagaaaaccctcttgtctcttgatagattgtgcagtttgagcttcttgtacatctagcttcttcaagtgagagctctgattatcgatcttcccattaagatctgtgtagacagcatcaaacttgccattaaactccacaacaagcttagtctggctctctagaatctgctcaagcatcgattccattcttgtctctactaagggtggagggggggcttggtaagttgaattaccatagttcctttgaaagatgctttgaggaaaggtcttttggaaagcaggctttggagtgtagttgaaggaaccctagttccctgtaaacctgttgccactgaagttgccctgtggctgcccaaacttcctgtatccctgaccatctatgtagaagactccttcttctgactcaggctcaggctcaatagtttcttctttagctgcaaagtggacatgcttcttccctgtgagcaagttatgaactgaatctagcttagcattcacctctgccatctgatttcctgaaatagctccagcaatcttcttcctctcaaaatcagcattcttggtactgttgctgcaagcgaggttctatataagggttgtagcatcagctgggtaacgtgtattgaagttaccattgctcgctgcatctagagccatctggtatctccaattaactcctctaaagaaggtacctaaaagttgtacctcacggaaaccatgatgtgggcaatctcgttggtactccttgaaacgaacccaagcagccttgaaagcttcagctggaccctgtgtgaaggtagagagcttatttctcaactcctcagacttagcatcatcgtagaaattgttcaagaaggctatcttgatgcttctccaagtcttgagggaacctgctttaagttgtttcagccaagaagttgcttccccagaaagtgaataagggaagagcttgcacactaggtagtcctctgagactccattagccttgatgctcagaacaaggtcctctaatcgctcgatatgatccattggttgctcatgagataagccatggaaaggatgctcgccaactaaagcaaagtagccaggcttcagctcatagtcgtttctctggaatggtggggatacaatcgctgatcgattagcatagaaccggtctgacctgttgaaatccccaagagtacgacgtggttccacagctagaggaatagctgcaagaatctggtgttggtgtcgatcgacacctctgttgtgtcgttcgacacctattgcatttgcgtgctgctcccgatggtgtcgatcgacacccagttggtgtcgctcgacaccgagccctgctgcatctctagcagctaactgcgcattgaggcgcgcttgatcctcattggcgtcctcaggtaggatgagtccatgatcatccaatctctgaccagcctcattgtaggcttgtccatcctcatctctcaaaactccttttgcatcagctctgatgactctctcagccattgctaatttcttagtttttgttaatcaaattacggtgaattgaaaacatatttgatttgtgattcatgctttcatatgtgtctacaacatgtttggcagcttttttgaggtaaccgttttcacctgaagaatatgttaacacgtaatgaaattttggatcaagaaaaatatcataacttgtaaacatatatactaggaagtgttggcaaacaatcttacataagttatgataaatcttaatcgttactaaagcctttgcgattttgttgtttatgtaataaatttatattcttataattgtttggcctcttcttgaagctaacaggaaggaactagcaagagattgagaagcttgtgaaattcaatcgcttggtacttcttaaactaagagtctaagattcataaccaaagaggttagacaaataaaatctcctctctcttttgtgcgggaacaattttgaatgcataccctttatacttatgtgaatatcaaaaaaaaaaaatcttatttttttagaaactccaaaagagtcaatctcttttagctataaatattttaatcttgtttcctgtttataccttgtgtttattcttcttggtatcacagtggtcagagagagattgtgcttttgtgtttagtttatatgcctgcaatctttttgtatcaagaagtgtttagtttaattgttgtgataaatttaccttgccttcgtgtgaaagggaaaggaatattgaagactgggcatggataaacgttaagagcaatattctaatggttaagagatcaatagaaaatatgtgagcaagcctcacggtttgatatgaaacagtagaacaagatcattagtgcttatataacactcattaaaaatgaagtgttgattctaacatagtttctctgattctccatatagtgaataacattatttccttctgtttgatgtttatgctaatatgattttgttttctctatttttgtgaggttaaatggagtggttgtggagacgattggtacaagtagagaacgcacgatatatttatcacatcaactaaatcaaggcatatttaaaagtggttgttgtctcattgattaccggtttgtgtttgatatagagttacgcgtataagtacactttcattcttttatttccttcttctttaaccttcaattttctctgaatttcttgtttccatcttcttcaaccttcttctttaacctgcttctttaaaatggatgatatgaatccattttatcagtcttcgggtttgatagacttattgcatagtcagcaagaagacatcaatcgttttgcaagtggatcatctgaagtcccagcctttaatacacaaatgtttgaagaaggaagtaaagataaagtaacactcatgggttgtacacaagatgaagtcaaaccgaaggttggtttatcacaaaagaaatggtttcccaaagaagatattgttcttgtcagggcatggcttaacaccaacaaggatcatgtgattggtaatgaccaacaatgtcaatcattcttgaaacagattgcatcatatgttgatatcagtccgcaacttgatgatctgccaaagagagagcatgctaagtgtaagcaaaggtggtcaaaggtcaataaaagtgtgaccaagtttgtaggttgttataagacggcaacaactcataaaactagtggacaaagtgaggatgatgtaatgaagttggcttatgaaatctactacaatgataccaagaagaagttcaacttagagcatacgtggagaaagttaaggtatgatcaaaaatggtgtgaagctgcaactattaaagggaataaaaatgctaaaagaaagtgtgtcgatggttattgatatggttcaaattacctagaactacgctatcaaataagagatcaattgcagtattttaggatcgaattcacggagttcttttgttcaaacaatgagttaaatgtcaagattaagctagcagggtaatagtgaaaataaaggagaacaaagtaaaaagacaacagattgattgtgttgtaaatgatttaataaagagctacgaacaaggtattctcaagaaactattggttagtagatttaatgaaagctaggttgttatcgaaccattcttaaattcaaactctaattatggaataaccggtgggcgtgccgcaaaactccctatatctacagctaataataaccggagaaaccgagaaactatcaacctaaatatgcattcttaacgagttcaattgttcatcttagtagataggccgattcttattacacacctataaaccagactcatcaaataatagatccaactacagatacctatggcgggaatatctattgtctggattcaagatctagttaattactctagatctagcattaagcataattaaagatgaagaattctacagataacctagcaaagggggcaatctactaaaccatatgaatccctaatgagaaaccctattcctaacaagcaaattactcagacatattgaatgagacaaacaacataattgagtatgaaagcataaacacatcaaaggagataagagttagaaaagatttcttcactgtattaagacttggaatgaatatctcaagaacaatggatgaatagcttatgtctctcccaatagtgtttgcataaaacttgataaaagacttgataatgagaactaggtctacaaacaatatatatagaccctaaaaaagtccagggactaataatgcaaataggaaaatcttctggggcaaatttgatattctgtaaactcgaaagcgtttagggtttttgctgggccgaaactggtgtcgatcgacaccaagagtgtgtcgatcgacaccaagagtgtgtcgatcgacactcctcgctgattcctgaaccaaaatcagccttagcttttgctcctaaatgtctccttatcttcattgttgtttcattgcatagaatacctgaaaagacactaaaaagactcgagaaataacataaagactcaaaatcctatacctaaaaacatggataaaatcagtaaaaatcgggttatatcagctaccaatgtttttttaatctttttggcatggatacaaatcttagtgttaaactctttttgtaaagcctcaaacttttattttatatgatattcacattcttatgatagcttaatatacacaaaagatcttttcaaaagatcaattaaaataggggaaattaaatctaaaggagttctacaaacaaaattgtccatatacacctttttttggagaatgccaatttggacgaaaatacccttactctatattataagcatttttaaaaaaatttaacattgataacatatagatctacaagaatatagataatttgtaaaaaaaaaattgttatttagttgaaagaaagttgattttttgatagataaattttagtctaaattatttagaaaacgatttctagtgatctacttaatttagaatttctattctaatattttgtacatattttacgaatatttagactatttttctttctaacaatcttagaaaataggatattcaatatctaattattgtagaacatgtattctaaaattttcttcttgttctaaactatgtgtgaaattgtattctaagaatttctatagtttctgaaaacattagaaaacgttttctaagaaattttcacttttagaattcatattctaaccaaatttagaattttgtttctaaactatttagaattcctagatatagaaagtgaatctttgaaaaaggaaagtaaatatttaataaatatttcggtttcacaaaatactttctgttaagattacgatttttactggatttagaaaacaaattctaattttttagaattaaaagaaaaaacgccaaaagaaaacgtgccttagtcgattaatttgtgccctatcattgatctcttcttcttcacgttcttcctttttcatctcgtgttctgtttttcattatgcatatctatgtgaggagtggtatttggagattgtatgataacaaggagtggagatttattgttgatgaaaaaaatcgtgggagattgttgtttttggaattgaatacaacttttgaagagcttaagctgatggtcagagaagactatggaatagaacagagtacaatcgatgtggagttaagctacttacccacggatcttagcgttgattgtcctcctaatgttatgataaataacagacaggttagtaattttctttcctattgcaaaaagaaaaaaaccgtaaagttatgtgtgacgttcaatggtggagttgaagataaaggaggtaaagaaaattttgatttgaataaggaaccaaatgctccaagcgatggagatgcttgttttaatgctgacgaaaaagtattaggtagagaggtggaaaagacaaacagtctgtcatcgatttggccaaaagtccaaaaaagcgaaagcatcatcagggtgcaagtgatggagtgggatcatcgtcgaagtctttttctgtaaaaaaggagcaatatttcagaagtaaagatgttttgaaggcaacaatggagttgtatgcgatgaagtataactgcgactacatgagtacaaagtctgataagaaattttggtgtatacgatgcgtagatgtggtctgcaagtggagtcttcgagcggagcgtttagagagatctctgtattttaaagtcaacaagtttatggatgaccattcatgtgctccttccaggaaatttttttttgtcgcacatcttcaaccaaaacaattggacgtctcattatgcataattatgaacgtgtgttagaaggtcctaaaccgaatgatatcagcaatattattcgcacacaatacggacacgagctaacttatcatcaggcgtgggaggctcgtgagtatgcagttaacgaggtcagatgaattcctgagaaaagttatgggaagataccaaaatacttgtacatgctagaacaagcgaatcctggtacttatacaaactacgaagttgatggtgagaatagattcaaatatctatttatatctttcggtcagtctattagagggttttacaagcctattcggaaagtgattgtggttgacggtacgtttttgaaaagcaaatacaaaggagttatgttggtagctacagcagtagatggtaactccaatttgtatccaattgcatttggagttgctgattccgagaatgattcttcatggcaatggttttttatacaacttaagaaactcatagcggatgaagaagacttagcttttgtgtcagataggcatttctcgatcactaaatcgcttgaaaaaatctatccattggcatctcatggtatttgcatagaaaatcgaagaggcttgtttccaaacacaaaccagagttcatgtttcttcctagttaccaactgtctagacagtaagctatgcaaacagagtatcctaaacggttttcaaatatggcaaagacatgtgcaaacagaggatcactcttcacttccttatactctagtggcatagctttcttgattctcttgaggagagctgttttgcagaagttgttgacttttccaacaagaggctctctaccatgtctgaataagcgcttcggatactccttattaatgtctgcacataacaatcacttatatgttagtaaaacaagagataatagctgcagcgttattagtaaatagctctcatgagaaacaaaaataaattgtatcttaaagtacttgaactcatactcgtgatgccttcatcggtttccattaagaagctacaccacagatataatatagataaaaaacctgaaaaaacatagtacccacgttagcaatcaagaagaggaaagacaaaacaagaagaaaaatatgacatgaaaattatcaaagaccgctaatcacatgaccaccatctcttagtttcaaagcagttatcatgataaggtaatgtgaatatgtggatctttgtctctaaaaaatgaagcttcttaatggaaaccgactattgatcacgtgattaaatagcaatagtcagacaggacttttggaacctcccatatcatcatcatcgtaagtaaatgattaagaataagataagtatctcaccatcttattaaatagcaatagtcaaaataagatcacgtgatcaaatcccaataactatgtgttcaaacccacataaatcttattctataaaaccaacaagctttagaagtctctcgtctctctctttctctaacacacatctctatccaagattttcaagttacagtcacagagaaacagaacaatgtcataaacgattatattggaaacaaaaaaaaagaaaacgataagagagagggagagatctctcacagatcagtccaaatgagttaatcacataattatcaaacttccgagcactttcgaaactaatgattgacattatgatttcccacttaactttattattctaaaactttagtatattagtccaagttgaactcttcagcaaatatatcttatataattgattgttctcatattgtttaatataacgttagtataaacaaagactacatcaacttcgcattcgcactatagaaacaggataataattgtatatatcaactaaaatttcatgatattttttctcatctactaagatatactagtataactttctctttctctaacacacatctctatccaaaaatttcaagttacagtcacagagaaacagaaaaaaaaaaagtcaaaaggtttcaagagtcctaaaagaaattccaagaagagaactcacaatgaagagatattgttcagtggctgatgttctctgttaacgacgacacattcgagtcaagctgtgagagatttgcttgtaagcaaggagatgaagaaagagccacttaaaggagaaataaaccagaaaattgtgacaatcaaagacatcatgacgagatcccaaacatataaacaccaaatgtataaacaagataaaccttcaaatcaactaaagcttcttatgcgtaaaaaactaaagctttcaaagactaagatgcccaagttaaaatcaaaccttaaacccaaaattgaggccctaaattacaagtatgaaaaacgaaattcatctaactatgtcttaatctataatttcaaacacaaacacaaatacattaaaatgaatcaaagagctagatgagttattaagtctacatgcaatcccttaaaattaagagtcaagaaattgaatcctctctacaagtaatatgaattctaagaaattaagacggaccttggcggttttggtggcggagaaggaagggaggttgagatgagtggtcacgacggtgattgaagaagattcaagtgactttggacacgatggcgccgaccacagagaaggcaaagaaatcgccggcgacgacgaaaacggagatgatcccggagatggcaaagaatgcgccggcgagtgtggagagtaagtttcgccggaattttttttttaagagctgaatgttttttttttttaatcgagtaaaggaggaagagagataaaagatagggtttcgaaagactctaatacatttagaggatttaggttctcaaaattttactaaaattactatttcttttgtgtaaatagattaggaaattattgttttttttaattataaaataaaataaaggtaaataagacttagttttttttgaaaaacctatttgactaatctacaaaaaaaaggaatagatggacaattttttttatagatatcctttaaatttaattttcccaataaaatatacacaaatcaaaacaaagtaactgctaaaagttataattattatttcctatacaaatttacataatatactttagcagcatcatttagtttctcaaaagtttcaattcgtaatagtagtgtgtttttctagaataatgaagaaaaaaatggaatttggtgaaaatggcaacacagattcatttcagcctccaaagaggaactgttccactcccatttctagattgtaatagaatgttacacaacataatgcatcaaatgctaagcaatgtgttcctctaaagtctaattacgatagagtatttgcagatcttacaaatttaactcatgttgtaatagaagaacacattatccatcaggaatcagcctgtcacaatctcagctaggtgtgaaaaaccatattatatcatccatatttttgtaaatagtttataaagtatttcatatcttaattgatgattaattttcaaaaacttaacttaatggttatatctttatagatgcagatcgttcaaaatcatacgttacaccaaatcgtagtgaacattgtatataccacatttgttatcacaaagtcataattctgaaattattgatgaatctcctctagactcaggtaatcagtatgacataaactcagaatgaaatatattttcctaataatgtttctatgatatacaaatgatatatttattattttaaacccttcactacaacctctaaccaagttacagatcaaattaggtgatcagaaatttactccggtgagagtgagacaatcaaagtcaacacttggattagataatttgctatcttcaataagattagaagctttaacaagtaagattcattatataaaacactagtttcttatttcaaatttataatctaaaactttagtagaaattaattcaatcttactttcctaattatattcaggtacagaaaatgaagaaaaccatacaaatcttttatcagttcctattagtcagtcatattctgatataggtagagatcattattttaaagtaatgtaaaccatacatccaccatataactcaattccaaaataaaacccgttctgtaatttctttacatgtcccgtgatttttttttaaagtagtaatttttaaaatttaaaaattatttattatgtataaaagttttgcaaattgtatcattctctaatatatttatattttatagtttaattttatatatagtaacattatgcataccacataacatttttggttttatataatcttttttaaattaggatgatttgatatgtttaatattagtagtcttaaaaaataataaattaaagatttaactcgtattaaaacagtggattaattatattttacctttttattaatgttgattcaaaaattcgtcttgccaaaaagccatttattttattaatattaattttatttatgatatgactctgaattatactctaaatattttaggtaataacataggagtgcaccatatttatttaataggggaatgtaccatatgacccgaatgcacttttacccaaatccaccaaaaaagtcttgcaaaaatactatagagataagaaacgatagtcggttttgataggtataagattagcaaatatattagttagcttaaattatttaaagaatacaaattgaaaaggtaaattacactttattcgaatatagtatcaaaacttatataacacatagatttgataattttttaattgttgaatactttttttttgtgctaatttttatgtgattaagatttaattgatttcgtatataaaatattaaactgttttacgaacttatttgtttataatttggtaacagatagatatttgaatattcagtatattttgcttcagtttagtaaatctttgatgaaccgtctttagatccaataagccctataattaagagatgaatattgtcgttaaatgattttggtaaccttaatgatgtcattaaaggattttgtttttgattaaatttttctaatggcattgtcatgtaattaattacaaaaattaaggttacatttaaaatgtactacccaaataatataataggattttaaattgtgtagcagtagatattactggatttacttagaaatataaaatcataaatcagatcattatgataaatgcgaatatatcatcctatatatgtttatttatatgacgtgcacacattcaacaatttcttatatacatgtatttaatataacatgcagatgctgaaaatattattcctattggcaattcacaaatacataccatgccaccacgaattaatacctctctttcttttgttttcaaagactactgaagcaaaatgagaaccattagaactcagcaaatggaaaacgatagaatttatattttaccagcagcagaaaaaggttggtttatagattttattgacaaacatttacattaatttggaaaacaaaaatatatccatctttgattattatcattttctgttaacaatgatcaaataattggaaagacaacttcaaaatctaaatcaagtaatccaaagtatcggaacttagaggaagaatttgatgatgcaatatagacataatattctgaaggcaagtataatttaaacattaatgattttttcattttgaaaatttgtgataagttattgttttcaaaactattgtagatgatgtcgagcaaacgtatttatacaatagcagtgatgaggaagatcttactctgtctgaatctgatgaagaactgcctactatcaaccaagatctatttacaggtggagacttcagtaatctatctacaaagagaaacaatgtaaaacaacaaaggatgattcaggtatttaaacaagaattttatattttaatacagaaaatctataaaatttgtatatagtactgcatttttattattaggttatctagatcatggtgatccgacatacaagtgtcgtttttgtggagctataatgtggtacgacgagcattttaacaaagaaggagatctaaaaatccgacgtttttctctgctgtttgcatgggactataaaacttccatttttgaaaaaatctccggaatgcctaacaaagttacttacaggaatagatcgacaaagtagacattttcaaaaaaatctcaaaccgtacggaatagaatttttaatgacttcacttggtggtaaagttgataggtcagttcaaaaagaaaaatgatcaaatatgtttcaactacaaggagcaaattatcatctcactggaagtatgaagcctaaggaaaactattatgcaaagttttcacaactttacattgttcatacagaaaatgaatttacaaatagggaaactgttttaaggtaagctatgtattcttattttttccgactatatgttaatataaatgttgacattttttaatactttttatgcagtaaggggaaagacagttcaacttaaaaaagcaacaataaactgaagcaaaaaatcattaaaatgctcatcaaaatgctcgatgaagtcaacccatatttagaaaacttgagaatagctagggacaaaatttaaactaatacaagtgagactttctatatgcgtattgttagtgatcgtataggtaaggatggaaagaattattacaaccaacaacatctgaagtggctgtagtgattcctggggattttgtgaaaggaatgtcatctcgtgacataatcattaaagacaaaacaactggcagactacaaaggattagtgaaattcatccctcttattcgctactacaatatcctttcattctctactatggtgaagattgtttcagaactaagatacagaaaggatacactgggaaaagcaatacctgcaagattaagtccactagtatgggacaatggttttcttttcgggttcaggaaaaggagaatgaaagccatactcttcaattgtgtaggagattgtttcaacagttcttggttgatggttattcaacaattgaagctaataggttgtcttatattaaattcaattaatcaaaaattcgttgtgagaaattcagtaacatcaaagaagcggctgcagctggaaacaaaaaaatgaatgaacatggaagacctttgattattacttcctcattcaccggtggtcctcgagatatggtacaacaatattacgatgcaatggccatatgtaaacactacggatttccagatctattcatcagttttacgtgtaatcctaagtggccagaaattattaggtattgtaaagaacgtggtttgaatcctgatgatactatgatagaccatatattatatgtcgtgttttcaagattaaccttgattcacttatgtttgatttgactgaaaaacatcttcttggaaaactgtcgcaggtaagttatctatatatttatttattgcttaatatatatacatatatatcttaaatagttttgaaaagtaatgattatatttttctcatgcagatatatatatacagttgaatttcaaaaagaggtctgccacatgctcatatactgttattcatggcatctaggagtaagctaccatcttctgaggatattaactggataatttgtgctgaaatacaagacaaacaaaagaacctagaagtttatgaggtcatcaaagagtcgatgatacacggcccttgcggtgcagcgtttacaaattgtccatgtatggtagatggtaagtgttcaaagatgtatcctaagcctcatgctaacttgatctaaagtaggatatcgagctcatatcaatgtggagtggtgtaatcaaacaggttccatcaaatacttataggaggcgggagacataagatttttttgaaaagtgtggatttaagtgtgacaacaggtatgctgtaccttacaatgggaagttatcgttgcgatatcgagctcatatcgatgtggaatggtgtaatcaaacaggttctatcaaatacttattcacgtatattaataaaagacctgatcgtgttgttgtggttgttgagcctataaacaagagtcaaacttcaaatacagtttctgagaacattcctaaataagataagcaaagaagaatgaaatcaaggattactttgatcaaactttaaatcatgttagcaagaaacaatttgttatataatttataataaggatattttatattaaaatttctttgttttgtaatcatttgcggatatgtatctgtttcagaagcaatatagaggatttttaaattcccaattcaatttagaactacactggtgcataagctttctttccacaaagaaggaaatcacccgtgttgtttcgatgaggatgaagatatttaagatgttttggaaaaaaaatatgaagattctcagtttactgcttggttgtatttgaatcatgacaattttgcaaagaccctcacttattctgagatacgagtacattatacttgggatgggaagaacaagcaatggaatatatgtataagaggattctctttaggtaggataagttacgtcccacaaaaaatggaagctgaatattttatgcgtatattacttaacatagtacgaggtcctacatgttttgatgatatcaaaacattcaaatggattgtttacgaaacatttaaagaagcatgttaggcacttgaaattttagatgatgatcaaattatattgatggtatcgttgatgcaagccaatggttatttggagatgatctttagaatctatttgctaatatgatgctgtctaagtctttatcaagagcagaacatgtttgagaagcaacatgacatattttatcagaagagaagagagaagaatttaataacccaggtttgtactatgtttcatacgaaccatttttaatcatttgtttagattcatagtgatttgcttcttatttttaggacatgttaatatacgtttcagatttcattttatgtgaagttgacaagagaaattataatcttcaggagatggagaaactatttcttatgaatggttattgtttgacaaaccttaagacctttccttatacaacaagagaaacaattgataattctaatagattgattgttgatgagatgagatatgacataagtgaacagatagaaaagcacaacgaatggttcactatgctgacaatggagaaaaaaacaatttttgatgagataatgtgtgtagttgattctcaatgatgtggagttttctttgtttatggttttggaggtactggcaacaatttttgtggaaaacattatcagctgctatcagatccaaaggaaaaatcgtgctcaatgctgcatcgagtgggataacttcattacttttacccggtggactgacagaacattccaaatttgctattcctttaaatccagatgataccttataatatttgagatttaatgaaggaagcttctcttataatatgggatgagacaccaatgatgagtaagttttgtttagaatcatttgatagaagtttaaatgatgtgtgcttggaaaacatgataacatgccttttggtggtaaggtaattttagacaaattcttcccataatccagggggcagaaagagctaaaatagtattatcttcattaaatgcatcttctctgtgggagaaatgcaaattactaaagctaactaagaatatgcaacgtctaaccaacataattcaaacatgttcacaacataacgacttttcttatcaaaacttaaaaaattgatattatgtagcttgaatattatgttgtgaacatgtttgaattatgttgtgtgtttgaatcaaggttctttgtttgtttaatacagtttgaagcaagatatgtgtcttttgacatcactgataacatgtaagtttacattatctttgctatattattttatgttcagtttgtattttttggaccaaaacatcattatttataaaatgttttaaaattttgtggttgaaggggaaaggttataacttgttttgtaaatggtagctcttgtcagtttttcgtcacaaactggtttaagaaaataacttatgtgacttataactatgagccagtcctcattgttatacgtttcttgaaattctcggagttcaatggtaagtttgttagagttttccattcgtgaacaatgtttgaatgcaattaaactgcattttgttttttctttttgtttaggtaataactgcaattaaactttacattaatccaacttttactgattttgacactcggagatacttgtaagtaacattctatcatataaagagtatataccaaactttattttacatgttttacacagacatgtctttgaagttggacaagtttatgattatgtgaaaatggagttggatcatgataactaaagtggatatagattgatgtcttattgtcgatcgtccgacgtattgcatagtcaccaagagtgtatcgatcgacactcctcgttgattcctgaaccaaaatcgtctttagcttcctttttcttagcttttgctccaaaatgtctccttatctctattattgtcccattgaatagaatacctgaaaaacactaaaaacactcgagaaataacataaaaactcaaaatcctatacctaaaacatagttaaaatcggtgaaaatcgggttatatcagtaatgcaagttcccaaccaatcaatgttgaagatgatggaataataagtcgacctccgggtgtcaaggcagcaaaagcgaaaggatagaagtcagccactattaaagaaggaaagaaatctgctagtattaaaggagaagcagaccagtcatcagtcgaacattttcagagcttataggagcttaaggagaaggattgggatcacaaagagaagcaaagcaatcagatacttgaaagtctctttagtgacttaagtgtcagaagttttctctctcttaactctctcaaatcttttagagagaaaaaactttgaatcttgttcatatcttttgctaatccgattaacatcggatctctttagatttcgttttatgttttagctttctgactatttttcagatctatctcaaacttcttgtcggtttttcttctatactttgtttcgatttgtagtttttttgtaaagccttttgcctgttcttcaaatcaacacttctatgttgttgaagtgttaaatcattgtggtttgatgggtctttgttagctgtgtacttgattcttcgtccaattgttggtaaatcctcgcttgcccatatgggattaaattaagcgattgttcactttggtcgtttgatttcaagtggttgtagttgattgaattggagtatgtagatttggagtccctgtcgtgtttgatagtttctctgaagactgcttcgatttttagcggttaaagaagaaatccgatgagcaaagtaaatcaagtcaattacttccaatgttcattgcaaaaggcgattggtaaaaagaaaggcttaatctggtagaagctgttcgaagatgatgaagaactggaaggtaaagaaatatgccggtgactggaagtaattccccgacgacaatggagttaatgaagaaacaacttttctccagacctgccacgtgcccgtgtttatcttttgttaagacatgtgtctatgagctgtattgatataagctttaatctgtgtctttggtttatattaaatatttaaatgggtcttgtactttatgtgtaatgccctttgggctctttaatgaaatgaagtttgacgaaaagaaaagaaaagtgtcaggcaattttttggaataaacaatcctcagttatttcaggtcaagatgacaaagtattttccgagcagctcgacaaacttcacagtctattcaggttataatcataaaaaacaagcaaccaagtttgtggatgtgatactaaaaagaaaattgatgtcctatgctgtaatttccaaacaaactctcaagattattagactattggtggttctttggagatttagaaataggctagtcttatcaacattattagattattgatgttctcaaattgtctattttttagggttctaaatagattagtgataaataataaataagaaataggtgtttgtaaactggaaaaatgttaaattttaaaattcctccaaatatatacccacaatgtttcactgtaaattgtctctcaaatcatatgatatacaattttactacaacatcccaatttgcaataacgagagatttaaaaatatttttataaatgtttaatcaaagaaccatagatttggcattacgacaaaaaaaagaaaagaaaataaacatagatttagaatgattttaacaaatgaaatttggaacggtataattataatacatttgagaaaatcattggtgcaataaggggtgatagttttttaaaacacaaatcctcccaaatcaacaattcagtatgcctcctattaataataataataataattaaaattaaaattaaaatttcaaatataaattacaatgaaaaggtgaaaaatagatataactaaatcagtaaaaaatatgttttcttcacatatttatatattttctttattaaaatgtttaatacaacattccatgattttgtttttgtaatgtatacaaaaacaaactaaaacaatttactaagttaacaaactttaaaatatcaaatgtgaactatatctgggcgtagatataaagacgatgttctagatttattgtttagtatcgtgtaatctgtggttgagtaataagaagattcttatacagtagctatccaaaatcatcatcaatcacaccataaaagagagaaaactaaatttgtaaacttattttatgggttcattgatctccaggagttcattagccctggactggattcctttgagatactcggtcaagataagctgatggtatgaaccatcttcctggtctgatcaaaataaatttggtcagaatgataaattctggaaaaccgtattggtaaccatctcgttcaaacacaaatcaaaacccggttagcctcacactcattgtgaacagatattttaaccatctgttctagccttgtcaaaccttgtcaaatcaaatctatgggcgtatcatttgggcccgctagatctattattgggccgtaacacttattctttggtccattataattttattttccgataagtaagaataaccatatgacactacaagaagataagctctttccgacggacgaaatcgtcggaataacgtcggaaacagccgtattcgacgaatttttaacgacatagatggtcgagactatcttgtcggaaatgtgaatgtcgacgcaaacgtgttacaaattaccaacgggtttccgacgagatatttcccgataatttctctatgcttttctaacgataacattggttgcgaaactggttggaacatagtcggaaatgatcgtcggatcctcgtcgaaaatagtttccgactattttctaacgaatattgttgtcaggcattgcatcagaacgttgttaaaaatcggtcggtatcttcttcgacggtttcccgacaacgttattcccgatggattcccgacgaagtatttccgatgggttactgacgttgttgtattttctgacgggttactgacgttgttgtattttccgacgggttaccaaaaatcgtttattcttcgggttttttaacattctcctttgtctcttctcttctcttatcttccccaacacccccacaccccccgcatcaatttcaaatcctaatctttcgaatcgtggagaaaaaccctatgtttctgaatctaatggtggtagttttgtttctttattggcgatggcaaaattaggggaaacacacggtggatttatccgctcttgttggtcgagacgcaggggaatctttcctttctctcaagtttaagacgacagagctttctaatatcagtatcaccaacggatgctacgcctctatgcgctcgccaagtggtgtaagtcattctctgtttctacaagtatttttaatgatgtggtggaagattagggtatggttttgtttaatcatgatcgattagttttgaacacatttctctagggatgatttacagaactggaa

SEQ ID NO: 1321 - DNA, 90170 bp, Arabidopsis thaliana
agacaatcacttaagaacacatcaccgatacggttacgcaatgtagtcttcacaaaattcatcgcggaaaaacatctttcgacagttgccgttgcaacaggaagaatcaaagatagctttagaagatgatataccaaaggatgtgaaagatgctttcttgtctctaccatcacacgagcaagatcaccaagacgctttaaatctgtaaacctttcatcgtttttcacattatcaaggtagatctcaagttgatgatcaagagatctacgctccacaaaactaaagtcatctggataaaactaggtcaatctcacgagcatggacttatcaaactgacgaaaagaatctatcggactcaaagatgacatgcaaataagtagttcagaattcaactcatcaaagcggtcattaaactcttgaagttgcatatctaagacagtgtagaaacaatccaccttatagtgatgcaagttggttataccggtctttttccttggtcttctagaatcaacaaattcttcctccattttaagcattccaatgttagttttctcgctaaaagaactaacttcagccataaaagcatcccatccatcgtctctaaccttttgcaactgacatttagtagttttcaccaatgaaatagcatttaagatatcttgatcttttctttgccaagcctttgataagctatcactgagtcccataacaagcaacatcaactccagatagaaaacaaaatcaaaggtgtgaaaatacttgagaataccatatgcttgttgtcttttggtggtgtcggtgccttcatcctggatatactcgagaactataactatagatgaaaacaactcctcaagacgcaacaaagtcttataatgtgaaccccaacgagtatttccaggtctttgaagggaaagttcttggttcaacctagttcctgtcttaatttcaccattgctaatcttttcttccactttttgccgatcgatttcccggatcttatcttttcttttgcaaaaagctccaacaacatttagcaaaacagaaatcatataaaaaaactctccaacttcaacatgtttttttgcaactgccatgacaaccaattgtagttgatgagcgaagcaatgcacataatatgcagagctattttctttcaaaatcaatgatctcagtccattgaactttcctttcatgttgctagctccatcgtatcccttccctctcagctttttcaaactcaatccatatttagcaaacaaagaatcaatagcacttttcagagataaagaagatgtctcttgcacatgaataacaccaataaatctttctttaactaccccatacttatcaacgaagcgaaaaactactgccatttgctctttatctgaagcatcagccgattcatctacaagcaagccaaagacatcattatccatttcttcaataatagatctagttacctcttctgaaaagcaatggacaatatctttttgaattggtggagatgtcatctggttatttttaggagcatttttcaacacaactttctttacaacttcattctgaccagctatatacttcaaaagctctaaaaaattacccttatttgttgactcttctgattcatcatgaccacgaaatggtaatccttgatgtaacaagtgtcgagaaacatcaatggaagcattcaaccggattcgataatcattcttcacaacattggtttgcttatggagagcagtggcggagccagaacaatgactcactggggtcaaaaaaaaattaaacgaaacgataaactttactataaacataaaaatgtcattacaaataaaaactctaaagatgaactctacgttcactcatatcttggaatcgttttatcaccgattcgtttgtaacagtgttaagtacttgcttttcaataaaacaaacaagacaatcacttaagaacacatcaccgaaacggttacgcaatgtagtcttcacaaaattcatcgcggaaaaacatcttacgacagttgccgttgcaacaggaagaatcaaagatagctttagaagacgatataccaaaggatgtgaaagatgctttcttgtctctaccatcacacgagcaagatcaccaagatgctctaaatctgtaaacctttcatcgtttttcacattatcaaggtagatctcaagttgatgatcaagagatctacgctccacaaaactaaagtcatctggataaaactcggtcaatctcacgagcatggacttatcaaactgacgaaaagaatctatcggactcaaagatgacatgcaaataagtagttcagaattcaactcatcaaagcagtcattaaactcttgaagttgcatatctaagacagtgtagaaacaatccaccttatagtgatgcaagttggttataccggtctttttccttggtcttctagaatcaacaaattcttcctccattttaagcattccagtgttagttttctcgctaaaagaactaacttcagccataaaagcatcccatccatcgtctctaaccttttgcaactgacatttagtagttttcaccaatgaaatagcatttaagatatcttgatcttttctttgcaaagcctttgataagctatcagtgagtcccataacaagcaacatcaactccagatagaaaacaaaatcaaaggtgtgaaaatacttgagaataccatatgcttgttgtcttttggtggtgtcggtgccttcatcctggatatactcgagaactataactatagatgaaaacaactcctcaagacgcaacaaagtcttataatgtgaaccccaacgagtatttccaggtctttgaagggaaagttcttggttcaacccagttcctgtcttaatttcaccattgctaatcttttcttccactttttgccgatcgatttcccggatcttatcttttcttttgcaagaagctccaacaacatttagcaaaacagaaatcatataaaaaaactctccaacttcaacatgtttttttgcaactgccatgacaaccaattgtagttgatgagcgaagcaatgcacataatatgcagagctattttctttcaaaatcaatgatcttagtccattgaactttcctttcatgttgctagctccatcgtatcccttccctctcagctttttcaaactcaatccatatttagcaaacaaagaatcaatagcacttttcagagataaagaagatgtctcttgcacatgaataacaccaataaatctttctttaactaccccatacttatcaacgaagcgaaaaactactgccatttgctctttatctgaagcatcagccgattcatctacaagcaagccaaagacatcattatccatttcttcaataatagatctagttacctcttctgaaaagcaatggacaatatctttttgaattggtggagatgtcatctggttatttttaggagcatttttcaacacaactttctttacaacttcattctgaccagctgtatacttcaaaagctctaaaaattacccttatttgttgactcttctgattcatcatgaccacgaaatggtaatccttgatgtaacaagtgtcgagaaacatcaatggaagcattcaaccggattcgataatcattctccacaacattggtttgcttatggagagcagtggcggagccagaacaatgactcactggggtcaaaaaaaaattaaacgaaacgataaactttactataaacataacaatgtcattacaaataaaaactctaaagatgaactctacgttcactcatatcttggaatcgttttatcaccgattcgtttgtaacagtgttaagtacttgcttttcaataaaacaaacaagacaatcacttaagaacacatcaccgatacggttacgcaatgtagtcttcacaaaattcatcgcggaaatacatctttcgactgttgccgttgcaacaggaagaatcaaagatagctttagaagacgatataccaaaggatgtgaaagatgctttcttgtctctaccatcacacgagcaagatcaccaagacgctttaaatctgtaaacctttcatcgtttttcacattatcaaggtagatctcaagttgatgatcaagagatctacgctccacaaaactaaagtcatctggataaaactaggtcaatctctcgagcatggacttatcaaactgacgaaaagaatctattggactcaaagatgacatgcaaataagtagttcagaattcaactcatcaaagcggtcattaaactcttgaagttgcatatctaagacagtgtagaaacaatccaccttatagtgatgcaagttggttatacccgtctttttccttggtcttctagaatcaacaaattcttcctccattttaagtattccagtgttatttttctcgctaaaagaactaacttcagccataaaagcatcccatccatcgtctctaaccttttgcaactgacatttagtagttttcaccaatgaaatagcatttaagatatcttgatcttttctttgcaaagcctttgataagctatcagtgagtcccataacaagcaacatcaactccagatagaaaacaaaatcaaaggtgtgaaaatacttgagaataccatatgcttgttgtcttttggtggtgtcggtgccttcatcctggatatactcgagaactataactatagatgaaaacaactcctcaagacgcaacaaagtcttataatgtgaaccccaacgagtatttccaggtctttgaagggaaagttcttggttcaacccagttcctgtcttaatttcaccattgctaatcttttcttccactttttgccgatcgatttcccggatcttatcttttcttttgcaagaagctccaacaacatttagcaaaacataaatcatatcaaaaaactctccaacttcaacatgtttttttgcaactgccatgacaaccaattgtagttgatgagcgaagcaatgcacataatatgcagagctattttctttcaaaatcaatgatctcagttcattgaactttcctttcatgttgctagctccatcgtatcccttccctctcagctttttcaaactcaatccatatttagcaaacaaagaatcaatagcacttttcagagataaagaagatgtctcttgcacatgaataacaccaataaatctttctttaactaccccatacttatcaacaaagcgaaaaactacttccatttgctctttatctgaagcatcagccgattcatctacaagcaagccaaagacatcattatccatttcttcaataatagatctagttacctcttctgaaaagcaatggacaatatctttttgaattggtggagatgtcatctggttatttttaggagcatttttcaacacaactttctttacaacttcattctgaccagctgtatacttcaaaagctctaaaaaattacccttatttgttgactcttctgattcatcatgaccacgaaatggtaatccttgatgtaacaagtgtcgagaaacatcaatggaagcattcaaccggattcgataatcattcttcacaacattggtttgcttatggagagcatgcttgatggactgaccttgtttcatcaaatcctcacattttcttttcgcattattgtgaaaactattcacatccaatcccacatgttggtccaacctatcagccttattccaactacaaaaaccagttgatagaaagctatcactccctccttgatttccagcttgatctctgaataagtaacaatacaagcaaaaagctttttctttctccacactatactccaaccaatcaccatacaaatcaaaccattttggattaaaacggcgtaacacctttccaattgctatttgtttaaacttatgaccacgaggttgacaaggtcccctaatcaaatattcacgtcgtacctcatctctttgattaggatgataacttagaatgctttttctctttgcgggatctcttggcaattcatttaaattaatatcaggtggtggcggagattttcttttcagaaaccgatacattatttttgttgttgccttgcctacatacaaaaataagaaacaatataaaaatcatgagttaaaacttaaatcaaatataaaaattgttttctccgtggccttatcatgattcatgacaactttaatttttatcattagtaaaaattactgtgagattaaattagaaactaaaacaaactacatcaaaaattaagaagaaaacagtatattgacgactaacgttacaaagaaaactcatgaataatgacgaattgagttttcaatttttgacagaataacaacaccaaaaactaaattaatcacaaacaaattttgcttaagtgatcaaattgaaattggttaatagttaattaaactttatataaaaaaaaatatatatatatatatatatataaaagagtttaccttgaaatctatagtctcgagccttaatctgattttcaaggatgtgatgattgtataaaaaaacaaaagaggaagaagctaaactgtttttggctaccacgacacatgttcaattatttaggttttttactttcttaattttgacagatttttattgaacctaacattagtataattcaataaaattattgggcttttgtatttataattcacaaaattttattgggctttgttttacttgtacctcaacaaatcattcataggggtcaatatttttgtttgactggggtcaataaatagttttttaataaaaattctattatttttcaaaagttcactggggtcatttgacccctataattcttcattggctccgtccctgatggagagcatgcttgatggactgaccttgtctcatcaaatcctcacattttcttttcgcattattgtgaaaactattcacatccaatcccacatgttggtccaacctatcagccttattccaactacaaaaactagttgatagaaagctatcactccctccttgatttccagcttgatctctgaataagtaacaatacaagcaaaaagctttttctttctccacactatactccaaccaatcaccatacaaatcaaaccattttggattaaaacggcgtaacacctttccaattgctatttgtttaaacttatgaccacgaggttgacaaggtcccctaatcaaatattcacgtcgtacctcatctctttgattaggatgataacttagaatgctttttctctttgcgggatcacttggcaattcatttaaattaatatcaggtggtggcggagattttcttttcagaaaccgatacattatttttgttgttgccttgcctacatacaaaaataagaaacaatataaaaatcatgagttaaaacttaaatcaaatataaaaattgttttctccgtggccttatcatgattcatgacaactttaatttttgtcattagtaaaaattactgtgagattaaattagaaactaaaacaaactacatcaaaaattaagaagaaaacagtatattgacgactaacgttacaaagaaaactcatgaataatgacgaattgagttttcaatttttgacagaataacaacaccaaaaactaaattaatcacaaacaaattttgcttaagtgatcaaattgaaattggttgatagttaattaaactttatataaaacatatatatatatatatatatatataaaagagtttaccttgaaatctatagtctcgagccttaatctgattttcaaggatgtgatgattgtataaaaaaacaaaagaggaagaagctaaactgtttttggctaccacgacacatgttcaattatttaggttttttactttcttaattttgacagatttttattggacctaacattagtataattcaataaaattattaggcttttgtatttataattcacaaaattttattgggttttgttttacttgtacctcaacaaatcattcataggggtcaatatttttgtttgactggggtcaataaatagtttttaataaaaattttattattttccaaaagttcactagggtcatttgacccctataattcttcattggctccgtccctgcccccagtaaaaatttctcgatttcaaaatatatcgaaaccttgagtaataaaaaaagtgggatgctgtattttcaggattgaatttcatattcgaatggacctcgtaatcgtaagaaagtaggtttgtttagttatatgcctagtatacataaaataaaatgtgaaaaaaaattacgaaacagagaaatgataacaattttggtttcatgacacttgctagtctatattatttttgtttcttgacacttgctagtctatattatttaacaattttggtttcatgacaaatacgtttcataataatcgccataatataaattatatgattactattaccaccacctctttgtattatatcatgattctttatcaacgaagccaccgactcactcgtaaccacttcaaaattcttcgtcatgtgaacattcccaacgagttgactcaacacaaccgattccgtaaccgagtttttcttcttatgctgcagctaaatcgtcgctctcacaatctcagtgtgcatcgagctcgataatctcctgattcctttagctccatcgatcaaaatcaccggaataacatcagagcttttcttgccactgtgtttagagaagaagaggactgattcggggatccgattacgaatccgggttaacgggtcactgaggaacaaggaggttttagggtccacgagcataatgtgtttgaaattgcgtcttaggctttgttcgtttctccatttgacagatccatccaactcatctattcaacatgtccatctgaatgattcattcgactcttgttcgtttcatttttagtcggttcatttgactggactatccgaatgagatgttgttcgtttgcttatctctatctccatccaaatgttttgtaataatacaaatacctaaaatacccatgctttcatctaattatatttttattattacctgtaaacatattaattttaatttttaatctaaaatatatttaaaagtaaataaatttcaaatattagttttttatatttataaatttattttatgtttttggcgggagaacgtgattttacagttttgacggaaaaactcgattttacggttttggcggaaaacaaaattttacgtttttggcggaaaaacgtgattttacgtttttcgcgagaaaacgtgattttacgttttggcgggaaaacgtgattttgcggttttggctggaaaacatgattttgcggttttgacggaaaaacatgattttgcgattttgacggaaaaacacgattttacggttttggcgggaaaacgtgagtttgcggtttgggcgggaaaacagaattttacggttttggcggaaaacggaattttactgttttaacggaaaaattcgatactgcggttctatcgaaattttttattttatttttttaaaaataattgtaaaataagatttaagtctatttgttgtttatctaaaaaatacatctaaataatcaattgaaataattagggtattttgtcattttttgttttggactgaatcatctccatccaaataatccaatttagttcagccaaatgagtttcaaaattaagtctaaattttaaaactcatccagatgattcatttggatggatcatctgaatgaaccgtttttggcatcaaacgaacatcaaaactcatctccatccagatgatccatctgactggtgaaacgaacatggccttactcgacctagcagcattgggtaacacacccatcttctcaagcttatcggaacgtcatccacaaacccgggtagcgagttttcaggatccaactcagtcacgtcgaaacccactactgagccatgtgttcggtcgagttattcaacgacgacgaatcgttgtaagctcgatgagtcttcttccaccaaattgcctcagacgatgacgatttcgattgcatcttcatgaatttcgtgagattaaatccccaaacagagtcgatttgattcgacgaattcaaatttcgatgaacatcaacgagttttaagaacgagtctttctcttcttcgatcatttcaatacaggttaaacaatagtttgaaacgaaacaggttaacaaaacaaaatatagaaagtatagacccatgtaataacattggaaaaatagcttttaaacaatttgggctgggctaatgtaaaatttattataacattgaaagtttagtttaaaaagaaattgggttggattaattttaatttagttttctgacatgtacaaatattaaagtttgattggttactccaccgacgaaccctcaaaatcactcggaataaactgcatgaaatctctaaattgacgctctgcttcggcttgtttctcatcctctcccacaaccaatctaccatcttgacacaaaatttccttgataccatttgtagactcacggatcattgctgctcgatgaaatactttgttattcctgtcacccacgtctagccaatggagcttcgatttatgtttaagatatttctcctccagctatgctacagggtcccaacgttggtaagcgtcattttctgctgccatcacaagaggagaaggttttgcatgagtttcttgttgcaaaagacaaagattgtcatacgcttctttgtatttctttaccaagtttccaagtctgttttttgccaaaacacacagctttggtttaagcgctttttagcttctttgagaaacgaaataaggttgaagtcgataggaacaaatcatctgtgtcttgccaatggttttggaccaacggtaagaactcctccatctccgtaaggacattaacaaatttgaaaggcttccgacctccgccattaccgttactcatatttccttctatttgcataatccggcaccgaagatgatcagaaatacctcgtgactcaaaaatattatatgcatgcgggaagacttgcagccacatatcattctccataactctatcgagtttcttaagaattaagtcattttccctcttgttacaccaagtgtaaataggtccttgtgacgccatatccgagagtgaacaatagttgactaggctctgaaaatcccgcatccctcctgtaaccaaagggttcgtgtctactcgagaatgctcagccaagtctagagtgacattaaagtctccaaatatcaaccatggtttattttgaaacataggagagtcgtaatgatctcgtagctcctgccatagttctttgcgttcctctacaccattagaagcatagacaaaggaacaaaagaattcgtcatcgagctcctcaagcttcaccgaacaagtaattaattgagcagacttatagaaggggctcaatctaacatgactttgccaaactacccaaattcgacctctgctattgtgttcataatttgtcaaaactgaccatcccttaaacaattgattcatcaacatctgcaccttcttctcactaaaccgaatttctaacaaacacccaaacttgaacgtattctcaaaaatccatttttgaattatggaatattttgacgttttgtttagaccacgaacattccaaaagaaacccaacatttaatgatgtttggagtgatgcttcttggattgatctctagagggatcactagtgaaagaagcagaatgttgtggaataattttatgagcagtctttgatccgcgtggcagagatggtcgcggtggcagctcaaccttggatacacggctttttgaaacagcgtcatgggattgagctgtaccagtttgaacttcttgatcaacaaaaccggaaccagaaactcgagacggaatctctgcttcccctgcttcctctgttttattttcctcctcagtgtcagccttttctcccagaactgaatatgagttggacaaaatcgaaacttcaccatagcttgaactcttttttttttttaatcctgaactgctgcgattcatgttaggcttgatccattccccaccatcttctttctctatgtctacatcaacgcctttacccgttgtcaaatcttctgtagtcgcaaggctcttttccttctcaagagcgatgggtggtgatagagttgtttcctttacttcctctgtaactaccatgataggtgctgaacttgatggagcttgagtatctcgagcttctgcagaaagacacgtagagtgtagatgtccccatttcttacaataggtgcatctcggcggtagccatggataggagtaattgataactgaatccaactctccatcctcctcacccataatggcacactctttaggtaatcccttagtaagatccgcttcgactaatagttgagcttcatcgaaactcacacatgactctatttttggatgaagcctaattggctttcccactgcacttgccaggaactcaagccctttgtctgtaaacatggtcagaggaatgttggaaagggtaacccacaggggaatcaatttcattgcaggctgagcttcttctgcaaatggagtccatttagatactatcataggaatgtccgtaatattccacatacccctgtgtagtattcgttgcctcatacttccaattcggacacgaaacgtgattgttgattcatttacttcaaaaacatcaattagtgaagatctgtctccaagccgccagatcttattcacaatcatatggatctttcccacatgtggatcttttgtgttgaggaactttcggattatgaaatcttcccacaaaggttttgcacctacaaacacctccttaggtacaaccaccttcttgcaaccatcaacttcgaccacttcaaatttctgttgggtaaagatacgtttctgagccacttggagaaaggtcaacttttggaattacatataaacacttccttagctctacctctctactttgatatcaacaaaggcgactgctacaattacatataaaagaaaaatttaggtaaacacacacatgggccaaaaatacccaaaatacacttactcaaacttttcctaaacatcataggttcatatataatagagcaataactgtcatacgtttacataaagtggaaccatatagtcatacgttcacatagaatggaacaaatgttccttcttcatagaataaaaccaacgtccattctatacaccctaaatagcttaagatttgtctccacaactcaaaaatcttccacttggagagtgatatggttcaaattgccttaaccctattctctcaaataagagatcggttgcagtatttaagggtcgaatttcctcaaagtccttttgttcacacaatgaattcaatgtcaagattaggctagcaaggaatgattaaaataaaaagtaaataaagtaaaaagacagcatattgattggttgtaaacgatgaaataaagagttaggaatagggtattctcagaaaactattggttagtagatctaatgataactaggttgttatcgaaccattcttaaactcaaactctaatcatgtaataaccggtggcgttccgcaaaactccctatgcttatagctaagaataaccggagaagtagagagatctttaacttaaacatgcattctaaacgagttcaattgttcgccttagtagataggccaattcttattacacacctataaactaggctcatcaaataatagatccaactacagatacctatgacgggtatatctattgtctggattcaagatctagttaattactctaaatctagcattaagaataatcaaagatgaagaattctacaggtaacctagcaaagggagcaatctactaaaccatatgaatccctaatgagaaaccttattcctaacaagcaaactactcagtcatattgattgaaacaaataacataattgagtaagaaagcataaacacggcaaataagataagagtatgaaaggatctcttcactatattgaaaactggatgaatctctgagaatagagatgaatagcttatgtctctctgaaaatagggatgaaaagaacttgataggtctaaacaatgacctctaaaactatatatatgccctataaaacgaccaaggactaataatgcaaatagggaaatcttttggggcaatttccacttctgtaaacttgaaagcgtcatggacttttctgggctgaaactggtgtcgatcgacgccagaagtgtgtcgattgacaccctcactgaatctggaactgaaatcgtccttagcttccttctccttagcttttgctccaaaatgtctcctcaactccattgttgtcccactgcatggaagacctgaaaatactctaaaaagactcgagaactaacaaaaatactcaaaatcctaaatctaaaacatagaaaaaatcagtaaaaacagagttatatcatagagtaatcacaatctttgtctccatctacaacatcgtcttctatctgcagtttataagaccgacctaggttgtatttaacctcagcttatcatacaacacgacctttgtcaacatgtctgtcagattctcaactctagggatcttctcaagcaccatcactccatctccaacattgatcttattgaattgatacttcttctttatgtgcttcattcgagaatggtaaaccgggttctttgccaaatctatggcactcttgttatcacaatataacacacttccctcatggttttgatccaactctaacataaatgattgtaaccacatcaactctttgttgcttctgttacaacaacatactcaacttcacagctagatagagcaacgatcttccacaacttagaacaccaacttgttgaagcatcaccaaaaatgtaaacatacgcggatgtactcttcgaactatcaatgtcaccccattgtcagaatcaacatatccttagaatcccttctcaaaactcgaatgttattacttcttgaaatacaacacagaactcaaattcccttttatatgccttggaatccacttaacatcatcacaatgctctctgcccatattgctcataaacctgctaacaactcccactacatgtgcaacgtctggttttgtacaaaccatctcgtacataagtttgcatataacagaagcatatggaaccatatcatatatcccatctcgtttatccttagataactaaaaatgactcgccaagggagtactagccaacttcgcatcatccatattaaacctcttgaggattttcttcacatactcctcttgtgacaacaaaagaccctccttgcttctactaattctcatcccaataatttgtttagcttctcccagatctttcatcgcaaactcttctaagagagttgctatcagcatgtcatccacatataaaagcaatatcaagtaggactccttcagcctcttgaaataacaacaatggtctgcctgacacctcaagaactcataaagctatcaaatttcttatacctctgccttggagcttatttcagcccataaaaactcttttgcaacttgcataccagcttttcttttccctacacatcactgtgtaccaactcgtgattctcaaattttatcttcttgccatcaattgggaaacaaacggtttatgctttccaaggatgtagctttcacacatatggtgattcgccatcttcaaatctggaagtgtaccattcgctatcatgagcttcatacctttgtcgctcatattccccaatctgccacaacttagtcttctttgcattcttgaacacaacaattgtgtcttcataggttgtagtcatataagaatacctttttaagaacttttgaaaccaccatagaacccttagtcactctccaatctccaccgccaaaattgacatcatgtcctatatcattaagttgtcctacaaaaatcagatttttcatcaattttggaacatgtctcacctttgttattttccacacacgtccctctaacaacttcaagttgatgtctccaacaccaacaatgtccaaaggtattccatctactagatacaccttctcataatgctcactaacataggtttcattattctcgggtgtgcagtcgtgtggaatgaggctattgaatcaagaacccaagaatcaatctgactatcaggggaccagaacgatgattatgtggtgtcaacatccactatgtgagactcactctctcttggagaatctacagaccctacaaatgcatcaaccattgctgcattagctccagctcttctattgtcttccttcttctgtaaagcccaacaattctttttaatatggcctttcttgcaacaattcgtgcacccagcaagctttcttgtcttaggttgaccatgtacactgcttgactgttcggtttcctgtgtcttgacttacgcctatgttctcaactttgaaaatagaactcgtcagcttctcatatatgtatatatcctttgaacttcctctgaaaaatttaatctcgaacatcaacaaatttgagcttcgcattaccaacaaaattactaattgttgccctcatggtctccaaactattcggtagagatcctatcaaaatcaaagcatgcatctcatcatcaaactctatttcaaccaaatatagttggttgacaattatgttgaaagcattcatgtgcgctacaagtaggcatgaccacggttacggttattacggtaacggtttattaaacaccagttacggttataaatttgctttaaccttaatcttaaccgttatatatatggttaaaacggttacggttaagtacggttacagtttaatacggttatggttaaataaagttacaattatatgataattatgaaatagtcaaaatattatattttttattctttataataaaataaatagtgatatatcaaataatatttattttacatgattatgtgcttcaaatatctataatgaatcagttatctatttttcttaaataaaccaacgaataaataaattaaaagtcataattataatgattgagttaataacaatatgtattacaacttccaaacgaaaacaataccaaagagaagatattgtgacttgtgagcattaagaaacaattttaagagtatcaataataattatatgaactacttatgatttgatttatggatattgagcagtggagtggcttagatcgtactagtgggcacattaaacgattttaaatactattttagtgaaataattatatttagaattatacacaattacaactatatttttaaggttttaactatatggttaaccaacgattttgatacggttacggttaattaacagttacagttagtatatttttttaaccgtagttgatctatttttatggttaacggttacggttattaaccgttttctacggttacggtggggatacggttaataacggtccggttacagtctaaaatacagttacggttatattttggtcatggctatgcaacaggctaccatcttccatcttcaattgaaattgtttcttcatgagaaattaccgtatcgttggtagaatgtttcttatatatattggagagaactttcatcaacccgtctggagacttctctttcgcgacattatgcgcgatattcttcgatattgttaacctaataacatccaaaacttgtctatcaagaatattccagtcatcctgactcatcgtctctaccttctttcccagcggttaatgcaactttttaccatatatataatcttcaatttgcatcctgcaaaacgaataactagtaccatcgaacttgtccttcatgtgttgaaccatctttgcttcccatcgtttcttgaactacaacactaccatgtgctttgatatcacttgttaggaattatgaatctaattcctcctcaaacacgaaactaaagcaaaaaataaagtatatacaaaatttatagtggttcactcaaaagaactatgttcacttctcttccaatgcggatttcactaagatcaaagaaattcaggagctacaagttatctcaatctctagctttaactctatgctttgattatcaatagagacgactgctacaattacattataaatgaaacctagggtaaacacacatacgctgaaaatacacaattacaaatttaagaatattattatcatcacaaaagagaatgctaaaaaagaatcaaaatgagaatcgcagccgtcctaaccactattaccaaagctattaattgtacggatttattcatattttagtgttgctgacaaatttttaatttgaaaacttttatgaagtacaaaaataaaaacactaacttaattcaataggtaaatcgtgaaatgaaaagtttatctttgtagaattatacacagttacaactatatttttaaggttttaactatatagttaaccaacggttttgatacagttacggttagtatatctttttaaccgtagttcatctattttcacggttatgattattaaccgttttctacggttacagtggggttacggttaataaacggtccggttacgctccgaaatacagttacggttatattttgttcatgtctatgcaacatgactaccatcttccatcttcaattgaaattgtttcttcatgagaaattaccgtattgttggtagaaggtttcttatatatatccgagagaactttcatcaacccgtctggagacttctctttcgcgacattgtgcgcgatattcttcgatattgttaacctaataacatccaaaacttgtctataaagaatattccagtcatcctgactcatcgtctctaccttctttcccagcggttgatgcaactttttaccatacagataatcttcaattttcatcctacaaaacgaataactagtaccatcgaccttgtcgttcatgtgttgaaccatctttgcttcccaacgtttcttaagctacaacagtaccatgtgctttgataccacttgttaggaattatggatctaattcctccttaaacacgaaactaaagcaaaaaataaagtatatacaagatttctagtggttcactcaaaagaactatgttcacttctcttccaatgcggatttcactaagatcaaagaaattcaggagctacaagttatctcaatctctagctttaactctctactttgattatcaatagagacgactgctacaattacattataaatgaaaaacctagggtaaacacacatacgctgaaaatacccaaaatactcttactagaacattttccagacatcatacattcatattattttttgaatatttttgttggtcaatgccggttaaggatggtcaacaccggattttgacgattggtattccggaaaaagatgttcgtgatgttgaccacatatcatcatatagttggtatatgtaggcatgcaatatatctagttctcgtagttcgttgtcaattcttggttatcttttttcctattcgatatttaaaaccgatttatatgctattatatacataatcatttaacagggtgaccaaattgaatatctttaacacatattttcttaaaacatattatcgtttatacatatttgaggtcaaataaaatattgaaattcatatattttctatcacccgatagataaactttatttttcacccatttaaagtaaggtttcactaagattaaccattacatgttagacatcattacaatttaatgccctcatatgtatattataacgggaatccaacattcaccacactcaaagcttctacgtaggagtaatagagcaaacacgtcattctcatcattattttccatccatcatttttttatatgaattatacacctaccaaagtttccattcatatttatattctaaactctaatatctattattttttttgtaataaagaaacataacaaaatgtatgtgagactaagagcatccactgtaactcaacatcatccaaacctcttggaccaaaaagttcaacaccgcttgatgaactctcttgagatgttcttaaaaaaaaattggaaacgtagaccaaaaactcgtgccgatgttagaaattgcaaggaactcgtaactcaactgatgatgtccaagttttcaaaaatttgaaactgcgtatgcttcaaaggaactcgttgcttgctgtcgagaactacactgatctaatggtgaaatatcgactccatgctaaccccaccgcacaatacgttcaacaagtttttgattattttattacaataatacaattaatgggttacttttttgcaaaatatgatcgttatgaagattttcataattgcattgttatatgcaaagaactaggtgcatcagcaaataacaaatgcgtgctcaaaactcttaatcttgctttgttggtggataaatcgttttcggcatgcaaacactttcttattatgaagaaatatcttgacaacaacaacccaaattttcactacaaaaaaggtataatacgctattttatccttgatcattctgactttggtctccaccatattggtaaatcaattgatgtaggccaaaaagaagcttccttcatgtatgccatgctattattatgtagaggcagaactgaagaggggaaggtctatctgagccaccttcaagaggctgaagacaccaccatggctgaaacatgttggaaaaaaaatcaaaacatcattacatgggattagagtggcgagaaaaaattgctatatcatatcatttcgcaacatataacccccacgcgtgtgccatccaagatatttgagcaacacatatgaaacgtgttttatctacaaacaaatgtttaagtatatctttatgatataactttcaacacattatctagagagttggaatgagttttaagaattccaccattaatgtttcaggcggtgaactatcactaagcttcaaaacaaattacattatgtaattgtttttgctttcatgtttctattgttgttgcacaattttttaatttaaataaaattcaactcttatattacctatctacgcatatattaatttcaacgtattgttaatattgttaagcatccatcaatcaaacattatatatgaggcaagaaatcaaaatatgaacaaattaagtagcaaacatttacaaaacaatagatatttttaaataaaattttcaaaaataacaaaagaggacaacaaaacaaatgttaaaaacaaaatcaaatttataaaaatatgtatgagtaagctaaaatggtgctcttctatagtcttttacaactctgtataaaacaaatgctaatggaaaaaacacattttattacattccttatattttaaaaaataaataaaaaattgatatttcttgccaaaagatttttgaaaataatgaaacaactagaaacaattttcaatttgatttataaaacttgatttataactcaatttgatttataaaaaaaacaactattaaacttgatttataactaatcataggttcgttaaagttaaacaattaggattacaacataagtaatacattgatacgaaaatgaaaaactttattcgacaatatgaagtcatttgacacacataatacacaaatgaaaaaacaaaaagaaaaattataacaatcagaaaaataaacacgcaatatatatgtacatttaccaataccaaacaaaaaatatataatacacttacaaattagagtccaaaagaagatgagcggttcaactgtggatcaagtgcggtgcggttcaaatagtaacgaaaatatatacatatacatatatatgtaaatctttttgttactatttaaacagtactgcaccgtgcggtttggtcaccatctaaattacttaccattaaaacaaattagtgttatctaaacaatactaaaacattatcattacatattagacattattacagtttaataacctcatatataaaaaaacgggaacccaacattcaccatactcaaagcttttacgtaaagatacaaattaacgaacattatatagtgcttattaaatagtatatagttctcatccttcatatacaatctcatttatcaaagaacattttaaaaaggataacaaaataaatatataacaaaataattttaagaaactcaacaataaaatctcgcgcatagcacgggcactcacctagtcaaattaaaaagatccatctccattctctattttcaatgtttgattattttcttacatagttatgtatctttaaaatgaaataaatttttaaaattatgctacgacccttacttcatcatctcaatagaattaataaaaaagtttattttctctgttccaacttcattctatagaaaaaatccagagaagaagatgaagatcaaaaaaaaaaatgattcgttttagatatatgagaattgaaattgttcaaggaaatttattttttaaaattagtgagtaaggttctttagaggctatctaagactttaacttcttttttttatataaatttaagtatgatattacttgatgatattggctcaatttcatttttagataagtcttgttatctcttttttcttaaagccaatatcatatgattgttttataaagtaaatcagtcattttaatactaaaatttatgcatgcaaattttttaaagtaaaaaacttacggtcacacttaaaaagacgccatgaaagttttgttgttaagaacaataacaaagcggttttttcttgacaatttttgtattttatttatttattattcaaagtaaaattaacatggttgtgatacttcatcgtttgcacgtgttaaaaagactatgcttctggttaacaaaaacaaatcttcaacattttcagacatgatttcaaaaagctgcaatttgttaaaagaatcgaaggttgttggagtaattagttaagaatatctccattaactttcatgaaagtagtttgatgcataattccatactccttttttccgacatattcctcaaaacttttttctgtcatttgttttcatgtttttaaatagttattttctttagttattgatgaaatatcttttcattttcaccaatttagttttatccgatcttttaaacttttatttctggttgatctttttctgtatattttatatcactaaatgtttacttcgagaccccttatgataaatccactaaaatgtattttaaaaaattcaaaaacaaacaaagaagaaaaaaaaatgtataaaacaaaattacaaaatttaaatttttggaatgaataagtaaaattttgatagcaatttaattatggcactagagacatttctctgtagatcaattttatgtttatgagtgttctaaactgattggttgagtttttaacgcataatatttagttagttagatttcatagctagacatcattatttggttgagtttttaccgcacaatttttatagcttttcaaaatcctaaaaatcgtattcccaccatttttacctctgttcacttgtggatctatgtaattaaataaataaataaacaacttagaagatccattccaatttcgataaactcaaattatgatcatgaagaagctttgaaaaatctttgcaaaaaggagatgaagatcgtaaaacacaattttatctctctttattcaaatggaaagaagacatataaaatgagacgattccgaaaataccttttctgcctattcttcaataccttgactattcacagaatgtgagaagcgaatgaaaaataaactgctttagcaaaaaagcgaagcattttttgggaatcctacaagagccattcgttcttttttctctgacagatgttcaaaactatatgggtttgaatcctactgagagtctactaggtaaatctaggaccagtttagttattttggctaagttttgagtcattctaggtaaatctcattactaactgtctcaatatacaatattagtaagtaccttcttgggtgtgatactagaagaaaatgtacattagtaacatagtcactataagaaataatgcattttgcgattgaaggatttctagctaatccctcgcaaatcctcgcaatgtcttaattgtgatgttgtgttgtgtcttaattgtgaaatattttggatttttccgattaaatttgatgaaattttttgtattttcttttgaggtatctatggaggaaaaatattcaacaaattgagatggaatttgctatatataaacctttgaagtaaggtaatgcatcacattgacatagttgacttttgtattttagattaggtaagacttgacttgtattgattgtagtgtgtctgttttgtgataaatgtttgtgtgtattcaattgttagctgattgtttgtttagaggttgattgattagaatatgtatgacttaacttacattgacatcattcttaatgtcaatgtgatcaaagcttctttgcttttcattaggtaaagaaatatgtttttacattgaatgcttactcaagtaacaacaactataacttaaaacaatcaaagacttaaacctaaccttctatacatcccaagtataatcgcagcttaagccacacttttctcttctttattttcccacatcctcctttaaaagtcactgtaactctttcttcatccttaatgaatccttatgctaacacgttcggcttcatggatctattaacaactcaacaataaacctctgtcaatgtggctgatagtgtttcaccaagtcttggacttggtaaatctgccgcccttgtcttcagtaccaaatggtgtgaagcagcattgtatggtgaaaccacaaacacataccgcataccaagaatgaggaccaagtgggcatctaaatacgatgttttactaatctatgcatggctaaacacaagcaaggatgttgttattagtaatgagcaacgagcaaatgcattctggaaacgcattgcttcttacattgcatcaagtccctctgttggcactctcaacaatcgacccgccagtcattgtaaataaaggttgtcgaagatcagtaaatttacatgcatgtttgtgggatcccatgcagctgtaacatctcagatggcacgtgtaatgaatgagaatgatttgatgaggttagctcataaaatttacgagcaagattagaatgaaaagtttagcatggagcattgttggaggacttaaggcatgatgagaagtggtgtgcctctcttccaaccaaagggaatttactcaacaaaagaagaaaggttagcggtggtcctcctgtagctattccaagctctactcctgtagttgaagcttcccaagctcgtcccccgggtattaaggctgccaaaggtaaaggaaaaaggagcatggctggagattcaacaaatgtggaagaataaggaaatgggctgtagaggatgcaaattatgtgggaaactgcttgatagtttagttgtaagatctgacactcttagtgaagtgaaaacagaactaaagaacaagctaattaaaaacatgtattttactcgatatctttgcgtttcagtttaagtctttcatgtatttgtgtttcagtttatgctttgtgttataagtcttcttgttgttttgtgtttcagtttaatcaagtgctctgtgtttcagtttaatcaagtgctttgtgttggtgtatgtttggttcatgtttagtccgcaaggtcgagcaagctttatttttgcaagttgaattatattcgggctagttaacactctttatgcattatttgttgctttgtgtaggaacaatgacaagatatcaagttgaggaacaatgacaaggataccaagttgaggaacaatgacaaggatagcaatcaatcacatggagacatgatcacatggttaaaggataccaagtttagggacaatgtcaatgataccacatatttttatgctttgtttgtacaccacatatttgtatgctttgtatgtacaccacatatttgtatgctttacttggactataaattacaccacatattggactacaaaactcattctctctattgcacaactctttttctttaatttcacaaactcatttctctcttctttcacaaactaactctctcaaacaaatacaaaacaaaattcacaaactcatcttctctttctatattaatccaaaaatccatattttctacttaatccaaaaacccatattttaacctaagaaaatggcatcctcctcgcgtgataaatttgacgaagcgtttgactaagaatttgaaaatatttccgagcaagaatttgaaaataatttttactcttatggggaacgtcaaagagaaaccaaacctacgaaaagagcttgtttcaaaagtgatagtgaacatggacacatccagttgtggaatgattatttcagagaaaatccagctttctctcctaatctattctgacgccgttttagaatgaataaactcttgttcatgtgtattgttgatcaactctcgaatgaaattcaactctttcaacagagaagagatgctaccggaaggctcggtgaagtgtacaacagcaattcgtatgctcgcatatggttgtgcgactaacgaatacctctagactggtgaaagcacttcgatgaagtgcatgaaacattctgttgaagcaataatttgtttggagatgagtacctaagaaaacccactacacaagatcttcatcgcctactcattcttggagagattcgcggacttcttgggatgatgggaaacatcgattgtatgcattaggagtggaagaattttctcacctcttggaaagggcaatatacacgtgactctggcaaaccaaggaccattttagaggttgttgctttccaagatcttaggatatggcacgcttttttcagacctccacgtactttaaacgatataaactttcttgatcgctctctagtttttgatgatatcttacaaggtcgagcttcaaaagtaaattatttagtcaacgggaccgaatatcatttgggttactatctcactgatggaatttatcctaaatggactacatttatccaatctatttcacttccataaagtccgaaagcatttttatttgcaaccatacaaaaagtttaccgtaaagatgtggaacgagcttttggagttttgcaagctcgatttgcaattgtcaaaaatccagctcttatttgggataaggtaaatataggaaatattatgagagcttgtataatacttcacaatgtgatagttgaagacgaacgagatggatatactcattttgatatatcctaatatatgcgaatccatacaagcgaaatctgctagaagtttacaagtggatttcacttattctacagatataccttcagatattgggaatatgatggccactcgaactcgaattcatgatcaagttaggcatcaacaattaaaatataatttggttgagcatatatgaacagaatttgggaacaatcaagtttaaactattaagttttatgtcatgtatgttataaattgtatgttatgtatgtttctaatttatcatttggaataattattaagtcttctaaatttataaatatttaaaaaaaaaatattttttaaaaaaaaacccaactaagaacctaccattggacacacaaaaaatttatattcattacaccatctcttaagtctatcttattcaattttcatattaaatcaatacttaagaacacaaaattaagaacccaacgttagacatgctctaatgtaccttagatgaatccaacgaatatgtgaaaatttgatgaattcaaagagttcggtgatggaaaatactctatgaaccttgagagtactcaaatgtatcaaaaaaaaaatttgattaaattttataagtaattctttgaactttattttctcaatttacaatatatttgcgatggttctcgcaatttcatcacatatccgtacaaaatttgctatgaatattgtcttcgcaaaatcgttgcaaatttgcgatgaatgtccgacaaatgttaattttacaacaaatatctagtaaatccctcgaaaatttgcgacagatttgcgaggacatactccctcgcaaatttgtgaagattttgctaaggacataacatttgcagcagatgcttcgcaattctatcgcaaatttgtgagatattattgataacacttaattttactacttttaagcctttgttttccatgcctttagcttagtttcatgactctttttatgcattcatagtcttttttcttcatttttcatgttttgcatcgcattgcataacatatttgcatattaagtgatttgaagctaaaacatgtgcttttggacctgttttggaagtttgtaacacaaggagaggacttgctcgagtttgcacatcaagagaagcacaaggaatcatgctcacgatttctgctcgacctgctgatcaagtaccaagcagaagaggtgccatctgaagaactgaagctgctcgagcaaaccaactcgagaagaagtcgagtgcttccattcgggatttctacttggcttgaggtcgagttgtgctgcgccgccttagttattttgtcattttcctttttagggtatcctaggatttactacaaataggacttttatgtttttgcccaaaatatctttttctttagtctggtggataatagtgtattctgagtttgtaatctattttcctgttgaatgttaaagaatttgagtttgatttcttatgcatagttgtttatcttgcttatatctatcacaaactaagtttataatgatttcagggttttctaattttgatgggtttagatctatgatattcttgagtgttcttgagtagtgttattcagagttcttgataatgggttaggtttaggtggattcctctgttcttttagctagctaagtgtttatatgcatgactcccttatggattaggagttcttagtgttatttcctttctggatcaattggaagttaatctgagactttccacaaccaaaaggtgttttgaggaaatgtcggaaacaactaaatccagagatttgcatactctagcccaagaaattggtggggatgtgtgagtagtgttatttattgtctttgagtatgtgtgagtagatttctaattaggtttgatggggtttcaaaggggattcatggggatgttagatcttgtttagattggcagtttctatgatctggtttagattggcagtttctatgattttgtttgatcgtttaaactgtactttctagttgagtttgatcttaatgcatgtatgtccgacacgccacctaatgcgttttatgcttggcaaaatcttgtataacttgcttgaacatagctcaggaatgaatattgtgttataaaatgcgatagttgagttataggacattatggactagaatcgaacttgaacttaatgcgtcaatctatgcgttgttgcctgctctcggcctatacaccatagggttagttgagcaacggtacataaagagattagttggctcttgacccatacaccatggggttagccgaacttgaatgagtttcgtatgtccgagaacttggaaataaacaaacataatcatgttatcacttgatcttgattctaatcctttattgtagaaccctgatacccggagaaaccctagaagaacctaacaccttccccatattgctttacacccgctctttcattttcattgtttactttcattgccttcttcattactttcttttacatgcatcccactctttagttattagcattcaattcaccaaaccccctcttttgtttgtcttggccaggtcatctaacttaaattctaccttgcagctacactccatatagattcgatccttaaatactactccgatttgttgtgcacttgcagtagtcgtgtggtctttcagaaaaaaatcatgaggcgaaataaaacacacatcacatatttggattttcttctgatagaagctttgttggatctggggcctcctttggttgttgtttttttgcattaggacagacttttttacttggaggcttcttgtttagctgaaaccacgccaaaaattgtgttgcttcagtaaataaatcgatccatcacactctcttttgattcaccttgtttgtaataaactggttttttttttcttcatgaaagtaaagtttaacaactgatgttgttcgattgtgtatgagaaattttaaaattctattgacccattgaccgttgtgttgactgttgaatgttgttctacgtgactagacaaacaatgagaccaaaaagaattcttcttataaccttggtaggtttctggcgttcgagcaacgtgagagctggaccaatggtggtcgcaccgccaattatttcatttttaccgacagacgagtttcataatagctaaactgtcggttttggaccgccggtttcttcacttttattggcgtttaagctttggtataggcagaccgctggtacggtattgtcccgccacttgtgaaaagtttgcaaaaattatattctaaaaattagaagccgattccgccggtcttgttgacttggctccatgcatccatgatccatccttgtgtttttcttctcaattacttctgtattaaaaagtgaaagaaaataacagaggcaaaagctaagtcgtgattccaaaagaaataaggtacaactttgcatgagtttgaaatgtaaataaaatgatcatatatagtgtaataagtaataagaaaaacaaaagtagaagagaagatgatcaagactagtaataaagtgtaatgaacgagaagagagattggaagtagggagcaaggacccaagactggcaaaattttgatcgtcggcgagaaacaattaaagtttgagtacgatgatgatatttaagcaaccgttttttcaaagcccaatgatgtgtatgttgaaaatatacaatccgaagaaaacaaaagtcttcttgtgtaaaagatcattgaaataaaataaaaattaaccaaggtagtatatgtaacgtactcgtgcgataacaaagaatatctagcctgcatgtcaaggtcttttagctcacttaggtccccacccacatcgtacttaacttactcctttgactctttgttgattggaccaccgtgtcgaacccatcgatctcttctaaattagagtcgtgttgtgtgatatgtatgtgtcattggttagtatattatatgtaccatatataccacaccaacaaacatggacaatttgaacattaatctaacggtcatgactaactaacatgcggaagtcgtattcattatctgctgcttaattagggcatggttctgcgttactgcttcattatcttaatctaatcgatatatgttttgtagactgctgctaaattagggtctgactctgtattactccttcattatcttaattaagtatatagaaaataacacgtgaaattatagcagccacgaaaactgtgttaaaagtaacacttttttcaatattttctaaatacaaataatttggaggtgtgtgtatcccaaaaacaatggtcatgaatgagtgatggataaaaagcagataaaaggtatatggcacactttccaaatttatctgtttaatgtttccattcaacttttcattatttgagtttatgcatttgtgggagaaacgttatagtatgtgttttttttttgtctttgtctctgaagggagaaagcgtatcaagctgaacaaaaccggattaagtgaatcaagcggatctagtagaataactgcagatcaaacagatttagcggtcccaaataaatatttgaatggtgaaagcggatcaaatattgctgatcatattatataatatttaattataaattaaatataaataaagtacatatatttattttgataattattaaaacattgaaaaaaactatttcaaatacaacattaaaaatagattaaaatgtattattttgattttcccataacatatctacaatattttctctcatatttcccataacatcatcatcaactgtctctaaagcttccatatcccctatattggtttcacaatttgtgtatataacctccgtcacttccattacttccaaaatcaccatctgaaaaatttgaaatccttataaaattatgtagttccattgtagccattaccactctcttctacacatgagtattatatctaaaagaattcacaaaaatactcatttttttacttctgcaataataatttttatttttttaaaaataattactttttgaaatgtgtgttttgtaggtagaacgctcataaattgagagcatggactgctttatggatcacccactttttatcactaaaggataaaaaaaaatatgatccacatggagatgctctgttttcttgtatataattaacacaaatcctaaatgggaaaattaattatggtccctccatattaagtgtaatatattttttaaacgccatctattgatacccttttagtaaaaaaagtggatgaaccacacaacaaaaatggggtggatcatctatataatgcaacacacaattcatgaaataattttatatttacttttaatatcatgtatgactatataataaattgaagagaaacacttctacacacaccaaaaaaaaacctctctattacttaccaaaaaactaaaatctcttacacacaacaaaagaaagaaggtcatatttacttttgaaatcaaggtatgtttttattttatatataatatatgtatgtgttaaaaatatttgattataattttatacatatcaattaattaaaaatagagtaattttattgattaatttctttatagcttcaaacttttgtataaaattattgaaatacaaaaatatttagttataagtacaatttatgaactattacaattttgatttataaatgtaaaatttccatgaaataaaacaataacttgatgtattttaccaattgtttttatatttttttttgttagctgtctataaagtagaaatttagtaatttttatctttttttgatgtaacaaaaaaatcactattaaaatttcatttttaattaaaaaataaatagtatcaaaaggaatatatacataattacatatatttttaaaataaaaataacttttatatggtgtaatttgttttttaagttgcatcaaaaataattataattgcgcatattatatatacataagattaatgcatgttattattagtatttagttctaaatcataattataataaatttaaaatagtagattatttaaaagcaaaatgtagatataatgaaataattgatgttaacataacatttgcttttgtttcatacctacttgaacatgttaattacaaatttttaatattgtagatatgacgtctaatcgccgacaaaacacaaataacaccggagaagctgatacaaatgtttatactgaaacatcaacacgggtaaatatctcctttttgtttttctaaatttttttgcaattatagtttactgtaaaatatatttattctttttaaaacacttgtagagcgaagacaatttcaaatggaaccttagccgagaaagaatatttcttgagttatatgataaaagcaattgccatgaataactaccatttaaaagaccctataccccttggtaaagagtttttggttgaaaaatttaatgagaagttcaatctcaatataaactatcggttcttcaaagaaaagcttaaccagttgaaaaaaaagtacaagaagtatgtataactcatggataacacaggtatcacggctgatcttgtcacacatcagataactgctagtaattcatggtggaaagagcaagaagtaagtatttagaatatttctcattacctaatatgattactaaattttatgttctaaaaatttatttcatttttttcaatatcaggtatgtaaaattatactttaatttcaacaagaaccgccacaactctgggatgtgatgcaacattatttcagattatataatgtcaaaccccaatcatattactcagtaaaccagcgtagaaaagagattctgaacgaaagcacaactaataaccaagataatacatacttagaaacatattgtgatgaaatgcctgaaagttatgttcaagtgacacaagaaagcgaagaggtttatctcgttaatattgatgatgaaacacgtcctacaaatgagttcatcaacaaatatactcgccaaaattctccatcagttgatccaatccagatttctacttcaggagttgaacaacgaggtcgtggaagacgtggaagcactttacaaagatttgtggaaaattcacgtgtcactcactattgcaagtggttcacgaggaattcaaagaaagtaatcttttgagagaacgctaacagatacgatgaatagttttcgtgagtttcaacaccaaagtttacgcccaactccgttcgaccaagatgatttcgatgagtgtgatctagctgtgaagatttttgaagaaatggattttccaaccaacacaaaattttattggtcatgcattaaggaatttagagaagacgaattttggcgtaaatattttattactagagctaacaaatcctatgaagataaaatacaatttttacaagttctatgaggatatacatgtgatgatgaacctgtcggaaagcgcttaaacacgggtcatcattttgggactccaagttctgcttgttttccttatggcagttcaatgtctggtggttttccttacaagagtccttattgtgatggtaattcatggggtacaccaccaaatgctccacaatggggtactccaccaagtgcaccacaatggggtaatctttcaaatggaccacaatggagttcataaccaagtgttcaacaatggggcacacaaccaaatgctcatagttggggttcatcgtcaaatagtccaaactgaagatcaccatcaaatggtccgcagtggggttcatcatcaactgctccgcgatggagttcaccatcaaatgttccgcaatgggggtcatcaccaaatattttagaatggagaacaaaacaacatgcaccaaaatggggtacacctccaagtgggacacaatggggtttatcatcaaatgatccaaactggagttcaccatcaaatgttccacaatggaactcaccaccagttgctccacagtggaatagtgatcaacaatgggactcataatcaaatgtttcacaatggggctcttcaccgaattcttcacaatgggctcatccggcaaattttcaacgtgggttttccctaggaagtcaagatgaaaccacaccaaatcttcaagacaaaaattctgaagaaacaccagttcctaattcttcaacatagcaaataccacgaaaacgaagagcaaggggattattcaatatttagggaaggaagcggggacctaatttaaataaaactcatcaaaatgtttcggaagatgaagattaatttagtaggcatgtgttttattataagtcataattttgtatttttctaatgacttttacgtataatacaatattcactatttagtttcattctaatcaatgtttctttaatttatgtttataaaattatagatttttcgtatatgtcagttgcgtgcacgaggagtccaatttctaagctacgaggaaataattgagctgtagaatttggaaaacgagcaatttgaagagttaataattcaaccaacattgagttactacaatcaatattttcaaagagcaccaatccaaacaaatggtggtttgggatagcacaatatttggtgtcgtctgcaagaagatgatgatgcttgtctacaattattacaaatgtctctttgttgtttcggaacattatgtgaaacacttcaaataaattatgggttgcaaccaacatcgaatgtaagcattaaagagagtgtgacaatgtttctacggacatgtggtcacaatgaagttcaaagagatgttggattgctatttggacaaaatcaagagacagtgaaggagaaattttttgaggtccttacagcgactgagttacttacttgtgattatatcaagactccaacaagacaagaactataccgaattcatgaacaattgcaagtagctcgaagatatgagccatattttaatggatttattggagcaaatgatggagttcatgtctgcgttaaggtgaaacccgagttacaaggaatatattgggatcgacatggtagaacatcattcaacgtcatggcaatatgtgatttgaatatgttgttcacatatgtttggaattgagtaccaagatcttatcatgatacagcagttctcacaatcgcacaagacagagattctgaatttcttttgcttccaacagaaatatattatctagttgattctatataattcttcacgaaacagagttattcattatcatatggcacaatttgaaaatgctcctcctcctaggaataagcagaaactatttaatcgatgtcatgcatctttacgttttattattgagaggtcatttggaatttggaagaaaaaaatgaaggattctttgtgaattactagatatactactcttgtgcaaaagagagtagtaatggctacaatgggactacataattttatcataatttcaaaattttcatataaagattttggagaagtaatgggagaaacagagattacggacacaaattttgaaactggcttagggaacatcgaaactgcagagatagttaatagcgataaaaagccaaatatgagggaaaattattgtagatatgttatgggaaaatcaaaatactagatattatttatttatttttgtatttgaattaaaatattaaatattttgataattatcactataaataatatatttactatatttataaataaaagcataatttaatattatataataaaatccgtaatatttaattcattttcaccattcaaaatttattttgaaccgctagaactgcttgatccgtacttgttcagctagaaccgctttatccgattttgttccgcttgatccgctctgtccggtacgctttctccatttggagtcaataacgtataatatacgagtaaaagatacaagttgacaatgagtttggaaaaagcaagaaaagaaagaaaaaaaaaaggagaagaaggataagaactaagaagtagctcaaaggactcttgtctaaaccctaagtcgaaagtaactattgccgactttgtgttctctgcttcttaccgattttatctgcttttgtgatgtaaactcatttttgaatttttcgattttctttgtctcataataaaaatctctgatttcagcgataatagggttttgtagaatctttgatttgaacacaaatcttgtattttttgtcatgggtatgacaaaacaaaatctatttggttacatttgaaaactagtcgtcggccttacctagatttcttaaggatttctttgttttctttttcgtaactctgagttttgggttttgggtatttttggttggtcatgtggataataaagtcatgctctttagtacatacatgctctatttcttacctgggtcttgtttccagaatttcttagtggagagaaagagctcttgctagtcatggacgaagcaagtaggaggacgaggcatgacgaaaccatgttactcataaggaattaccttgagggacacgtaatggtgaacaccgttcaggcgtgagtacttttagatttttgttattattttcctacagcaacagtgtgttttgtcctaactattgcattgtatgtgtagtgttttttttctgtgttgtgttagtctagattctgagagaaatctggccgatcttgcaacctttacatcataaggacgttatggaagagcttgaaataagtcatatcactggtatgaagtttcatcctcaattacttctagagattcaaagcattatcacatgagttcaaggtatgtttcaatttaaaattgggagtaattaatcattacaactccaatactacttgattttcaaaacttttaagactatttgcttcagaaacagcgtcaaaccgtaggagctgtatgcgtggcttgggaaactcacggaaacaacacaaattatggtagagtcttactaatatatattcttttagttgatattcatttttaaacaacttacactagtttacgaatatttctatttacacaacgatcctttattgtttgtttctatatacacaacttctttgttgtttgtttgtagttgtggttttctgtgaaggtttagttcaaacttacaaatatgcatatgataatcacacaaagcaacaccatgaggtttgtcaaaataaattgttctctgtactaataagaaaacgcttatatacttgttttacatgcatttagcttagtttcatgacacttttcatgcattcatagttttttttcttcacttttcatgctttgcattgcattgcatagcatatttgcatattgagtgatttgcaggtaaaacaggtgcttttggatctgtttttaaagtatctagcccaaggagaggacttgctcgagttttcacatcaagagaagcacaaggaatgatgctcgggatttcatgtctgcgttaaggtgaaacccgaattacaaggtatgtattgggatcgacatggtagaaatcatgtccgtgatcaagagaacctattcgtggatgagatatccttgtccgcgaccgagaaatccgtggcgatcatatgagaatccttttgagtataatcaagaatcctgtcaagagatttgatttgccgatttgtgttaaaagtcaagaatgaaggaggttaactagaaagaagctagatcaagattcaaatgttgtggagaagtcgtgagatgtccgagaaccgttgaaactaaccgtaaaccttcagtcgaatctctgtgagtctcgaagcgtgtgatatggcacatgataggtttggtgtttatttgggtaattgattgcttgtttggttgcatgatcatatactctagcattcattgatttatttcatgaattgtatgagtaatgattaatggtgtgaatgatggtactaagccgcatatgagatcttttagattcttatgtttaaggcttatggttgggaggttatgttgagatattgatgattctatgtgtttggttaaccatatgtctcataatatcttgaaatgtttggtcttgatgcgtggtgctcgtggtaggaggcagagaccataagcgtattaagatcgtggtatgtctgaccttcgtagtgaaccgtgctatcgtgggatcttgttaacgttgttactctatcgccatgtagtgcgaagggctcggagagacggggctagctaccctgatcgagttgtctacacgacggtgtagcattttggtagggatgctccagttacatgcctttgtggttgtaaagcgggagatcccgggagtgtgtgtttttggtgtgggggtgtttgaaggaagcatattgggccatattttagaaaagaaaacttaataaaactggagtcttaattgcatgtgcatgtttttggtagatgcttttgcaatctaccttttgttgctattctctgttgcgtgtttcgagatggggaactaatatctgttgcaggtaaaccgtgctcactaagtaattttagattacttatgattccattttgttttgcaggaaaccttaatggaaaccattagagggatgctcaggacgtaggaaagccggtatagagttttgttgctttttgcaaaacttaatggttttgattcttgatttgatttgagcgtatatgctcgtggcgccattgttaaaacgttttggatacttggtgtacgaaatttctatgttataaaagattattttcatataaagagtgtgtttcatgcgatattagtcttgtccggactgacataactcacgatcatggcaagggttgaaaagcctaaaccgcgttcgtgagggatggttcatgtgggtaatcaggctaagggtctaaattcgtttggaacctaagttgggttgtccgtgtgagctatcaatgtggcgtttccgggttgcccttggcttgtccggccatagagtgattcaggggcgttacagtcactgtgggagagtttcttttgagcggccagaagggaggttggtttatcagggagtgagacctacctccggaagtctcgtcatctcagcagtgcatgcagagaagatgatcgagaaggactgtgaggcttaccttgtaagatatctatgtcggagtccgtggggcaggtagcagtgagcgacatttgggttgttcatgagttcgaggatgtgtttcaatcgttgcagggattaccaccaacacggtctgatcctttcacgattgagttggaaccagggacagcgctattgtctaaggcaccctacatgatggctccaatagagatgacagagctgaaaacggagctggaggatttgttgggtaagggattcattcgtcctagtacttcaccttggggagcgtcggtgttgtttgtgaagaagaaggacgggagtttccgcttatgtattgactaccgggggttgaaccacgtcactgtgaagaacaagtaccctttgccaaggatcgatgagttgttggatcagttgaggggcgctacttgtttttctaaaatcgatttgatgtttggttatcaccagacccggtagcggaggcagatgcttgaaagactgcttttaggacaagatatggacattttgagtttgtggtgatgtctttcggtttgactaatgcaccagcagcgttcatgaggttgatgaacagcgtgtcccagtagtttttggatgagtttgtgatcatttttgttgatgacatcctagtgtattctaagagtcctgaggagcatgaggtacatttgaggagagtgttggagaagctgcgggagcagaagctgttcgctaagatgagcaagtgcagtttttggcagagagagatgagttttctgagtcacattgtttctgcagagggagtttcagtggatccggagaagattgaggatatcagagactggcctaaaccgacgaatgccacatagatcagaagttttcttgggttggctgggtattacaggaggttcgtcaaggggtttgcgagtatgacacaaccgatgactaagctgacaggaaaggatgttccttttgtgtggtcaccagagtgtgaagagggtttcgtgagcctgaaggagatgttgacgagtacaccagtgttagcattgccaaagcatggagagccttacaaggtgtatactgatgcctcaagagttggtttggggtgtattccgatgcagcgtgggaaggttattgcatatgcatcacggcagttgaggaagcatgaggacaactatcctactcacgatttggagatggctgtggtgatctttgtcttgaaaatttggaagtcttatctttatggcgggaaagtacaggtgttcatggatcataagagtttgaaatatatcttcactcagccagagttgaatctgaggcagaggcggtggatggagctagtggttgattatgatctggagatagcctaccatcttggtaaaggtaatgtggttgcagacgcgttgagccgtaagcccgtgggtgtggctccagggcagagtgttgaggccttggtgagggagattggtgctttgcgattgtgtgatgtggcacgggagccattatgattggaggctgtagatcgagcagatcttctgtgtagagttcggttagctcaagaaaaggatgaggggttgattgcggcttctaaggcagagggctctgagtattagttcacagctaatgggactatctttgtgcatgggcgagtttgtgtgcctaaggatgaggagttgcagcggcagatcttgagtgagacttatgcgagcatgttttccattcatcgaggagcgactaagatgtaccgagacctcaagcggtattatcattgggtcgggatgaagagtgatgtaggtaaggtcgcagagtgcgatatttcccagttagttaatgctaaccatcaggtgccagggggcttgttgcagagtttacccattcctaagtggaagtgggattttatcacgatggattttatggttggtttgcctgtgtcgcggaccaatgatgcaatttgggtgatcgtggaccgtttgattaagtcagcacattttctagctatctgaaaaaccgatggagcggcggtgttggctaagaaatatgtgagcgagatcgtgaagttgcatggaatagctgtgaatattgtgtcagacaggaattccaagtttacttctgcgttttgtagagcctttaaggtagagatagccactaaggtgtagatgagcacggcttatcttcctcaggccgatgggcaatatgagaggactatccagacacttgtggatatgttgcagatgtgtgtcttggattggggtggccattgggcggatcacttgaatctagtagagttttcttatgacaacagctatcgcgcgagtattgggatggctcctttcgagacattgtacaagaggccatgcaggacacctttatgttggacccaagtgggggagaggagcatatatggtgcagattatgttcagggaaccacgaagaggatccgggttgttaagctgaacatgaagaaagctcaggatcgacagcagagagagtttgaatttgaggttcggcacagagtatatctcaagatggccatgttgcgaggtccgaacaagtctatctcagagactaagttgagtccaaggtacatgggtccgttcaggattgttgagagagtgggaccagtggcacacatgctggagttgccagatgttatgcgtgcgtttcacaaggtgtttcatgtgtcgatgctgaggaagtgtcttcacaaggatgatgaggtgttggctaagattccaaaggatcttcagcccaacatgactttggaggcgagaccagtgagggttctcgagaggaggatcaaggaacttcagcggaagaagactcctttgatcaaagtcctgtgggattgcgatggtgtgacataggagacttgggagccagaggcgaggatgaaggcaaggttcaagaagtggttcgagaagcaggttgctgcttgagtttgtctatctttggtttccagtttcagagttgtcgagtttttgagcttttgaattgttgttcttttttctctttcatttgcattttcgtttggagttgtaacgatcatgaaatttgatgattaataatatgagtatttttcttgcatttgacttgagttgtgttacttaagaatgtgttgtgcggtttctaaaatagaaagtttcccaaaaaggacttgtctatttttgaaaagtttgagtaaacaacctaagagagaggtgtgtttacgagatggccggaagttggtcataaggatattcccgagaggatatgatggatggtgaggcataaaggtgtcttacgcgaatccatgacagagtttggagatatgctcggaagcgtttagtattgtttgctcgatggacatgagggtcctaatgactcgtgaagagcgggatatgctcctgaggtaccggtaactcgctggattttggcgtctttagagtgcgaggggtaggtggcttcgggtgacgatcccagagcgcactttagggtgacgacccgagaatgagttttgaggtattattttctccaagtgtcgtaactcgatgactgtggcttagccggcacaactcagggtttgactttgagtggggaagataatacgtgtgatacccgagataccgtaggcataggcctaagagtgatggtttatgctcgaagactgcggtctaagagtggagagtgagttgtgagcaacaatgactaataaatcgtgaatatatcgactgaatagagagacctagaggggttgggttggagggagtgcgtactacggttgcacgaatttcttcagagtggaagggtgaagctagattcgaggacgaatctatgttagtgggggagaattgtaacgcccgtgaaccgaaaaatcgattagggtttgtttttaaatcgcccgagttaatctattgggttaatgaaaaccatagagtgtgcctataaaagaaaaaaactcgcaattagggctttggttagccactattcgttctgtaaaggagaaagagagagaagaagaagaaccaaaatcgttagggtttgggaggaaacagtttcgatatatcaaatcgttgtaaaaggtaacaaaattttttagagctatttccaagtcttttatcgtcattctccattttacagaagtggatttggatttaaactggttgagttattcgcagttttgtggttacacgttttctcagacgtgagttagaacccaacggagattgtaactgggaacatggtcttgtctggtttctgatcgtcacgatattttttgggaagcttcgtgacgtctaaaggtagctttctaccagagggatttgatagttaacggttggtttttaatttagggtttcgtctttgagactgtttgtttttggtttttatgtccagtttgcttcaaggttgcttatggttgtgtgacttgttgtaggacgtttctaaactgtttcaaacgcaaggagagtctctcctggttataattgttgttagacgtgactatgagtttatctgagcgatttgttttgtgtgatgatatgtaggttgggtctgtgtttttgggtgaactgttcaatgactggtctgttatgtttgatttgtggttatactcttcatttgtttgtgtgtatagctcgtagatgggaggatcgcctcactaagtatttatgataaaacttacgcatttttttctttatggtgcaggtaaagataaagtgtgatcgtggaatcatggcaggtaaagataaactcttcatttgtttggtttgtttttgtgttttggttattggaaccctgttaggattgttagtcattcttggttatgttggtcgaattatttatttattcataaaatagtatttttgatttgcggtttcaatgttgctttattggttggtttaattaagtatttatgagaatatttaattatgattttaggaaaaaaaaacgggttgggttgtttcaagtctccacagtgttttgctctcaagaacaaagtaaaaataaagaataaaaaaagttatcaaaagttaggtctaaacaataaccttaaaaatctatatatatgttccttaaaacgtgcatggatttctttgaaaataaggagaagttctggggcgaatttggaaatcttcaaaacttcagtaagttacgaaatttaattcccatcagatattggtgtcgagcgacaccaggggtggtttcgatcgacacctacgcgaagtttggtctccaaattacttttgcagcataagttctctattttgctccagaaagctccataatctccaaatgtatcccaaacatgtaaatacctgaaaaatactataaaagactctagaaataacaaaaaaactttaaaaatataactaaatcatagctaaaagcagtgaaaattgaggtatatcacccgcgatggaatgtgaggttcgagcagccttatttatgatgcatccggaaaaagcaccaagcctagatggtatgacagcttttttttgaaaaagcatgggataccattataaaggacctattattcttggttaactcattccttcaagatgaagttttcgataaacggttaaatacgattaatatacggaatgaccgacatggatgactgaattacggcccattactctttgtaatgttggtaataaagttatttcaaaaatcttttgtcaaagagtaaagacggttttgttaaatcttatttcggaaatacaatatgcttttgtggaaggacggctaatctcgaataatactattatcgcacaagagaatgttttatgggataagaactaacccgtcatgtaaagaaaaattcatggccattgaaactaatatgagtaaatcatatgacaggatgaaatagaatttcattgagaagttattacaaaaaatgggtttcttggaaagttgattttgtggttaatgtgatgtattacaacagtctaatatagagttttccttaatggacaacctagaggcttagtagtaccgaggagaggtttaagacaaggcaatccactctctccttacttatttatcctttgtacagaggtgcctattgcaaatattcggaaagttgagcaaagaaaattgattactggtatcaaagtagcaacaacaagtccttcaattcttatctattttttgcggatgatagtttttcttttgcaaagctaacaaagagcagtgcagagtcattttggaaataataaaacaatatgaagcaatttcgggacagcaaataaaaatttcaaaatcatcgatatagtttgtgcataagatagatgattctatcaaggcataaataaaattcaactttggatatcactaaccttggtggtataggtacttatctcagcttaccataaagtttaggtggatataaaacaataatattttctttagttagagatagattacagaataagataaatggatgaataaaatattttctttagtcgactttaatttttatcgaaaggagggaaagaggtgatgactaaatcagtagttgtggcattctcaacttactagtgcggttacaaaattctggtggagttctaatggtgaatttagatgtatgcaatggatagcttggaataaattgtgtattagcaaatcgaaagatgggttgcgattttataatgtcgataattttaattcggccctacttgcaaaacaattgtaaagtctgattacagttccagattcattttttccaaaggtttccaacaaacgatatttttgaaaattaaatcctctggatatataatatcctactctccatcctatggatagagaagtataaagtcacgatgcaactacatcaatagccatggataatttggtatatctggaaagcaaggaacgaaaagatctatgaaaatgtggataaatatcctttataggtattacgcttgccggaaaaagatgcacaatcgtggcacttagcttaaatcgagtttcatactaaaaatcatggtttgttgaatttggaaacttggaattgagtaagggatatttcacatgatataaattatgttgaatgacgttactttgtggatgaatcctggaaaaaaagcaatgagttttctaaaacatgatggtattgtacatcatcaaatggagagacgctaaccatgagagctgccaatctcataagtaatttatctccactacatgtagagttggaagcttttctttgggcgatgaagtgtataattagtgctgacaaccatggtataatcttttttacagactgttaagattttttgaagatggtgtcttctccaaatgaatggtcggccttcttaatgtattcgaaggaattacaaagcgacaaggaaaaattcacaagtttgtctttatctttaatctctcggtgtgcaaatgttaaagcggatttggcatgaaaagtttgtatcgaactccatcatatcacatatgttaacaacattcttcagagatggttcttgaattctaatcaatatcgattgacaaaaaaaaagatggcgtaaaatttaaataaggtttgacacctctaaatttatgaaaatttgattttgtaagtaattttgaaaacagcgaatgacgaattgtgaaaacaattttcattagcattttaaaaataaaaatatggattctaagcacgagttaaatttggtattactatataatataatatggttataatataatcgagttaaatttcataacaacgtctaacaaatctctatttcaacaaccaaaaatttacaaattgaaaacaacattatttaattaacacaaaataacacaaaataacggctaacttctttaattaacttaaaataatctatattataaatacatcacatttatgatattttgatttttaatctaacagaattatatgcaatcttattttgtggttgttaacataaaataaacttattgttcaaacaattttattttttaaaataatattatttttatttccatatcttaagaaacattatgtttaattaagtattatataaaatatatatatatatatatatattcatattaatattatataaggactgacaaaaaatattttatcacttagaactacaatatattaaaattttatatatataattttgtactaaataaaatatctagttggaattatatttttcatctacagtccttcaccgaaaaaattaaataagctaatttttctcgtggatagacgaaaataacaatgctattttgcaattgttataaaatatgatgattatccatcatttacttaattcctaagcagcttcctcaccaaactattgtggataatgtttatccaaatttaacatagctttggcccaaagttactttagtatatatatgtagtcgactaaagttgatttgtagaagaaagataacaagagaaaagatataagagtatgtcatttgctctctcattctctctacacgtccacactttcttctcttctctttattatttctcatactttatgattcttggccaaatcaccattatttttttttgttttaataagatcattggtcaatttcttaaatatccaccaaattaaactccaaccgatctaaaataagattcggtccaagataaataggcttgaaaagccataatttttggaggggttattacaagtcccacatctttaaaaagatccaagattaaatacatgatctcatttggatatgttattgatcctaaggtagaattcatttcgagatgaatgaactcaaagagttattatctcgaaggggagaattaaaggaatcccacatcgatattaagtcgataaattttggtgaatttgacaccccagagcgagataactctggtgaagtcatatcctaaaagttatcactttaagataaagtggaatatctaaaaaatgatgtttactctcaaattgagttttaataaatcgttcataatacaaatccaagagattgcaaaacgatttatggtgatttaatctccgtgtttttacatggaacatgcagttttgcatgtagtaatgattatatataaggccaacgattcataagaaatatttctctcatgtaatttatacatgattagagatcaaatatttatcattttaaattttataagtgtgagatatatattataaatgctcttatgcacctcataaaaatatcatccaaagaggatgaaatatatagatgctggagataagtcttcgctctattaatattgagccatcttttagatgtaccaattgtaagatttgcgtatcatcatgttgatgataaaatttctcaatcattatgggagaattattgaatagtttggatttttgaacaaatatatatgaacttaagagttcaaaagttcaaaatgatcactattcagaataaattgcaaatcaaatgcaaacagctgatgaatgagattttataaaattattgatcctcatataaataaatatgaacttagacagttcatagaaaatctcatattccagctaaaataaaataaaaaatgcaccaaaaatatgtctctggcggatgacatattattgtctagaacacgttaaagaacgtgatagacaactttggttccaaatataaagaaaatcctcgaaaggagcaaattattatacagaagattaaactcttaaaagaaaagcatatagactcctaaaaaggagtaaggagactcctcaaaaaggagtaaagagacgattgacatggttaataacgaaatcaggtacctatatatataaaatcatttattatgattaagagatctcattaaccatgtcattacggtaaatatggaaccaaagccaagtaaagataatataatgtcggcatgaaaaatgatctatgatctagcgcgcaatgtaattaatgaggatcatgaatctccgctctgtgagagtaaagagatatataaatatatattggctaataaataaagagacaatcaagtcatattattctcgtattagaaacgagtaatttatggacacatggtccaagcatcaaaagggtattatgatatataagacaaaacggtgtgtcccaacggattttgttaatataccctatatattgaatttgatgctatataaatgacttgaactacgtctcatgggatgtctgaaggactaatccctgaaagatatatgatatcataattatatttccgggaatttataaacatgatgattttgatcatcaaaactcttaaagagttcattggaataaaagatcttggaaagacaaaagtgtctccagatattccaactaaacatctaaagtaattgatgttatatcaatcactcctaaaggaagtcgactctatatatttggtcataaaacactatatataaatgctgacgagtatttatatattttgtgaattgtatgcagtatttgctatagatctacttgcaggattaactcatctcattcggttagacatcgagataagtgaaaatatcctatattgtctgcaaggttagattgatttggacttattttattctagaaatctcgaatttggtttagttggttttgcagataaaggatttatatcagatccatataaaaatatcgcaaaacaacaacatcgcggcatttctaatagcagactttggtcattgcttgctcaagttatgccaaaattattgcgcttcatgaagcacaccaaaaagatgtatggcttagattaacgccatcaacatatacaagaagcaagcactatagtcaccagtgaagagccaacaacaagacaatgttgtatgtgtttcccaattcaatggaagaaacaatgtagcagaaaggcgcttccagctacaacatttagaaagcttcttcacatatcaaaatgaatcatttgaagaagatgcttacaaggggagacatatgatgatgagcatggctgtactctttgtcccttatcatagtttttatcccactgggtttttccatgaaaagatttttaacgagacagcaaagaacacgcaaaatatagacaagaaaataaaggtctatctctcttccgaaatctttgtcatataatggcaagatcaaacggggcgaagagaatgatcgagatgcatcatctacgaaagctatgaagagaacacgtctcgtttgttacagaaggagattatgtcactgcactattttctttgtcatgggttttatcctatacgattttttcatgataaagttttaacgaggcagtacgtaactcaacaaaaattatggatattcaaaggggagtgttataaaatatgatgattatccatcatttacttaactcctaagtagcttcctctctaagctattgtggataattttatttcctctctaagctattgtggataattttatccaaatttaacataactttggcccaagttactttagtatatatatgtagtcgactaaagttgatttgtaagaaaaaagataacaagaaagaagatataagagtttgtcatttgctctctcattttctctacacgtccacactttcttctcttctcttgattatttctcatgtgtataatatattatatatactttcgttatggtttttaacagcaataaatttttcgtctacagtgcgtcaccgaaaaagttaaataagctaatttacttatcctatgattgcatacatattgcattgagagagaattcacatgcttatgtgagtgatcatgatagcttagcatctacatatcttgatatattgttatttatatgcctcgggatctgattctcctaactcaaaattacttttatatgttgtatagtggtggtccaaacaaaattttgatattctgatgatcatattttgaatagcaatgtgcgagagtactttttctctgtaagtggatagccacgagaaagttacactcgcaattaaaacaaacatttggaaagttagttttacgttttccattattttagggttaattttaccattttcaaagatgtatataagagtttgaaaattgaaagtatatagatttgtaaatatcagtcggggttaccgaggatctataacaacgatttgtttttcacttttagttaaaatctttgtacggctgactagattttaacttgcgatatactgtagagctatatttgtttttaataaaatttaaattgctttgtaggttaaaaatatatataatttaatgttttatatttttaaatatataactcctatatttatatattatttagtgtatacttatcaacaaaatatattatttaatgtataattactatgtttgaattttaccgtttaaaaatatagaaacaataacataccgttcattaagttaaaacctagactataactaaacaattaaaattttaaattatatttgttttgttaatattgtttgttttgtttagtgtttaagatgagatagttgtattttgattgttatatttaggatttcatttgtagtatatcgtttcgtataaatatattcggtgaaattaaatattattttattttctgttttaataatattttaatttaaaagatatataattcaaatcaatttaaaagttttctttcaaatggttatttaatatataataaatttaaatattctaaatatttgaaacccgtcttaccatttaacagcgttcggtgaaactaaacatgatattgtaatttaatagtacttttatttaaaaatatctaattcaaatcaatttcaaaaattttttttaatgattatttatgttttatagattttacatattataaatattctaaacgtttaataaactttatataattataatatttactttttaataagtataaataattataatatcttaagatttcttaatttttagataattagaattgatggagataaattagataaagaaaatgatagtaatcagaaatattaattcattgataagaattaaagacaggggtataacactataaataagtatcaactctgagatttctttcataggtatactcaaaaaatgtatacatatagatttgttacagttacttattcagggttgaaacttgaaagtcatataattattgctacaaaattatggatatttatatcacattaagatagcacgatttctgtaactgttattaaaagtgaaattagagtttttagagtcctagtgtgacagtaatgctatgccctaaattttatgagttagcgccaacacttagaaaaaaaaaggtattctcgcggtttaggagtgaaacaaatcagtggctgggaaaaaaagacaaaaaacaaaaaaaagcaaaaaacatatataaaaaaaacacatcgttggctctctcgctctctccgccgaatccagtcgatttcagctcgccatctctgtcgattccatcttctagatctctcgctctctccgccgaatccagtgctcggcatctgctctcctcaatctcagattttcaatcttcgccgaatctgcagctctcctcaactctgatttcaatctcagattttcaagttttgcaggtgagttcaaagtgagttcgtagaagctgtaatttgttccatgtattgttaatttgttccctatttttatttctgttgagacttgaatgatgaatttgaattctgtaatgtgttgttggatttggtaatgtaatgttggtttaagaaaaattttggtatcaggtttcagggtagtatggaaactgaaaaggacatactgcatagcattcttgatatctatagcatctaaaaatgctgcaacaaaataatatgcaacacgtaaccaaacctataataataaagtaatgtaatagcactaatacaaagagctatcgtaagaaagaccaaacaatgccatgtaataacaatgctatcataaaacttattagcgtcaaaataaatgctattaaagatggtgaaatatcatagcatgtgaaaatcaacgctacaatagcatgtcacctattatagctgccgcaaatacaacgtttaataattcgttatcaatgacttttaatggcgttaatcgtatactatctatgtctatatttgttgtagtgttgttttgacaaaaaaaaaaaaaaaaaagccttttgcaatttttaaataatttatatctttatagaccactttcccctttggcaatggtcccaatcttccttcacggttatagactctccgagaaggtcattaaaaagttgacagcttctacattccactttctcgccaccactttcacctgaattctcacgtcactctttctctctaaaccaccataaagctcaaactttttctcattctctctctaaagctaaaatctttttcacactcttcttcatgttcaagcaatgggaaacctctgttctttgtttactccgccaaaacccgtgaagaaaagaaaacccatcacaaaaagacaatcttctatcggagcttcttcttccgggtcgggtcttaatagtaaccgttggaacaaccgggtcagatcatcttcttctagaagagacaacaagttcgaagatgctttgattcaagaacatgctcttgctgctgctgctgttttgttccgacagcaaaacggtggtggaggatcgttgccgtttgatcggtcggcttcacaacgttatcaaggttcttgttcgaagaagaaccagttgcctcgaagctcgagttcgaggtcaaggtcttctacagatcctctgttacaacctcatcagtttcttaatcaggttcttttcttcttcttgattcttactttttttttttgtacttcattaaagatatgtcttaattagttttcttacttggcattaaatgaatatttatagtatagtttcttgaatgcttgttggctcaacgtattaagtggttacaaatcaatgtgagtcttgaaacttgctgactctatttttgtttcattggttattgttaatggtgtgaatgttgtgacaatgagattatattatagaggatgataagcacataaccagagtaaaccggtgtcatagaaaagagatgtggtcttgttatggctcctaaactaatgggattgtattctccacgatcttagtagtagatttagtggttagtttctttcttatttttgtgtatttaaagacttcaatgttaagttaaggaattagacttgaaaattgacaaaacagagtttatctctttggtactttgtgtgttcttgtgttaagacaaaacacatctctttggctttgaggagggaccacctatcagaggaagacggttttgatgttgaaagtattatcttaatcaagattcaaacttgaaacctgttttagttacttaacattttagccaaacatgcccaaatatagtgttttgagaatttgctcacctaatcttatagatgatccattttgggataggaaaaaaattggattatacattttattggagttcatattttttctcgaacttaaattctttttttttactgatatttgagtagggtataaagctagatgacttggaaacaaaccattttgtccttgttcatggaggtagttttggcgcttggtgttggtataaaaccattgcacttcttgaggaagatggttttaaagttaccgctatagacttagcaggttgcggtattaactcgattaatataaatggcatcgctagtttgtcacaatatgtcaagccacttaccgatattcttgaaaagcttcccataggagagaaggttctgtttctctttgcattcatcttttactcctttcccttttatttcgtctttgaaaattggtagaatgtattatgtaaacttgtaggtgatattggtcggtcacgattttggtggagcatgtatatcttatgctatggaactctttccttcaaagatttcgaaagcggttttcctcgctgcagcgatgttaacaaatggtcaaagtacactcgatatgttctccttgaaggtttgctttctcatatatattcttctcatgtttcaagctttgttccgcgccatagtgatttcgattacaacacactttgcaggccggtcagaacgatttaatgagaaaagctcagatatttatctacacaaatggtaatgaaaaccctccaaccgcaattgacttagacaaatctcttctcaaagaccttttgttcaaccaaagcccttcgaaggacgttgcattggcttctgtatcaatgaggtcaattccatttgcgccggttcttgaaaaactctctctttcggatgctaactacggatcagttagacggtactatatagagacgttagaagacaatgctataccagtgactcttcaagaaaacatgatcaatagtagtcctcctgaaaaggtttatcggttaaaaggcgccgaccatgctcctttcttttccaaaccacaagctttgcataaacttctgcttgagatcgccagaattagccctgcttaactctttatcatgatattcactaactggtgtttcaaagtgtctcatcagatctctcttcctctgtattttttgtttcatttggtgatgttgtttttgtttcttcttgccttttctcaaaggtcatcattctgtatttctattttcttgttctcctgtttttaccagaaaaaaaatgtttataaaaaatgcatgtaatgggacatagggtacaaattcgttttatggtaaccagatgttcaagatccttaaagaagacgttccaattcttctagagggtctaattgacctgctcttgctctcataaatcttcttgtgttcttgtatgttcttgtatgtgtgtgaatgtatttatggcattttttgacgtgtatatgaaattcttttgagatatagaagttgtgaatcaagttggcatatgtggtcctggttcaaatagataaggataataagaaaatgttgtaacaagtggaaatggtaactctaatccaaagcaaaagcaatggccctaagatatatgtttgaaacgaattcattgttgtacacaaagaatttttgaaggaggtaaacttttttcaaaaagctaaccgtaaatattgagaaatcgatgagatcgctctatattaaaatcatacggccgagatgacaaaaattaacaatattctagatcttcattatatccataatattggtttgagaaggttggccactaaaaaggagattgcatcattgtactaatctttgaccaattcatctaaacattatatttaatttggttgcgtaatcattattagaacatcgtaccaaatcaagaacaaaccaaagacatcacaattaatgcctaaagtgattggagatgagcttaagtgatggattcaactagttcattagtggagagcttgctaaactaaatggagcttgaaaataacaaatagaagctttcaaacttgaagatcaccttagaagtttaaaatgaagcttcacgattcagatatttaaaggatcaaataaacaataaaaaaggctctactgacgtggaggcaattttgaaggcgattagggttcctagcttgatcaacaaggctgatgctgccggcggctcctccgcctagggttggagatggcccttcatcggaagaggagctggtctcttcctctgttgagtgcaccagaaacgacgaagagttggacagatctcagacaagcgaggaaaagtttgctggaaatatgggtcaaacgaaatctgtagaggagattgaggaggtttcaaagagtttggaagggttatccccaacgatttcatcatccaatcaagggacttgagttctcggtgagcaaaggctatggctgaaggcagcacaaaagcatatgtttacaaagcaaaagtttgtggtctcggaagttgaagggcagcaaagggtagtggtacctaagggagtttttgaaggagcaaaaccgctctgggaggacttcctgcttggaaaatttcttcatacaacagcaccacatgtgggaaagatctatatgattgtgaacaaaatctggaggttgggagataaatcttctatgattgatgtttttgctgttaatgagacgactgttaagttttgaattagaagtgaaggcattcgaaagaggattttgaatagaggtatgtgaaatatagttggaattcctatgctcgtatctaaatggaccccttttgcggaggagacacagccagctatgaaatccattcccttatggatcattctcaagaatgttccaccgtcgatgtttacggataagggtttggagtttttatcaagtgcagtggggaaaccgctacggctacacccaaaaacagaggcatgtgttagtttcgatgaagcctaaatattggtggaagcagatcttaccaaagacttgccaaaggaatatcgtttctttggtgaagaagagggagaactggacgtggtgatcagttatacataaccctggcttcccccacggtattgtaattgtaaaaaatggggtcatgtgaagaatgcatgtctcgcaggggctagtgatgtgggtaaccatcaaattagctcaaaatcaaagttaccaaaagatacaacaccggatcgagaagacattattgataagaaactgttggagttggagatccggtttaactggtttggtttacaaacttggctacaaagttgcgtgaagagaacgttggcgttaaatcaggaatgtatatcaaagttactccataaaatctgtattgttaatattgtttctatattttcggtaagatacgatatcgtgatagcacaaagatcttgttctctaaagctatatatgtacatgtaatcattcataataaacagaacaactcttgaaactctgtttatttcatggtagcatagcttgagaaatcaattttgattttcttttgaaacgaagagtgacgatggcagcgaacccgaacccgacagtggaggtgagaagaacaatttcaccttacgacctgacttccgccgacaatcctggtgcagtaatctcacatccattgttcactggaagtaactatgatgaatgggcatgcagcatgaagacggcgttatgctctcgaaagaaatttggattccttgacgggacaatttcaaaacccgtagaaggatctccagatttggaagattggtggactattcaagcattgctcgtgtcttggaataaaatgagtatcgatccagtggtgaagaagaacgtttctaatcgtgatgtggcgaaggacctctgggatcatttgaagaaaaggttttctgtgatgaatgggcctaaacttcagcaacttaaatctgagttagcgtgttgtaagcaaagagggcttacaattgagacatattatgggaagctaacaaagatttgggacagtatggctagttttcgtcccgtacgtacctgcaagtgtggtggttgtgtgtgcgatcttggtgctcttgaggagaaggatcgtgaagaagacaaagttcatgaattcttgtttggacttgatgatgctttgtttcgaacagtgagatcaactcttgtgtcacgtgttcctgtgcaacctttggaagaagtgtacaacattgtgaggcaagaggaggatctgatcagaaatggagcaaagattatggatgatcaacgtgaagtcaatgcatttgctgctcagatgagaccgaagctttaccaaggaagaagtgatgaaaaagaaaagggaatggtgtgtaaacactgcaatcgcagcggtcatgcgtccgatagctgctatgcagtcattggatacccggagtggtggggagataggccacggagccgctcaatgcaaactcggggtcgtggagggactagttcaagcggcgggcgtggacgaggtgcagctgcttacgccaatcgtgtgacagttccaaatcatgactcctttgaacaagcaaactatgctcttactgatgaggatcgtgacggtgtgagcggtctcactgatagtcagtggcgaactatcaaaagcatactcaattccgggaaagaggctgcaactgaaaaactaaccggtaagtccacttcaccctcttggataatggacactggagcttcgcatcacttgacaggaaaatttgatatattgatgaatgttagagatatggaaccagttttgatagttctagctgatggtagggaacgaatttcagttaaagaaggaacagttcgtcttggatcagatttagttatgaaatctgtgttttatgttgaagaatttcagtctgatttaatctcaattggacaattgatggatgagaatcgatgtgttttgcaaatgtctgatcgcttccttgttgtgcaggaccgcacttcgaggatagtgatgggagctggtaggcgtgtagggggaacgtttcactttcgcagtacggagatcgcagcatcagtcacagttaaggaggaaaagaattatgagctgtggcatagtcggttgggtcacccagctgcgagagtagttagtttaatcccagagagttctgtttctgtttcttctacacatttgaataaggcatgtgatgtttgtcatcgcgctaagcaaactagaaattcatttccgttgagtatcaataaaacttcgagaatttttgagttaattcattgtgatttgtggggtccttatcgaacaccgtcacatacgggtgctcgttattttctaacaatcgttgatgattattcaagaggggtatggctgtacttactgaatgataagagtgaagcacctagtcacttgagaaatttctttgcattgacagagcgacaattcaatgtaaaaatcaagacagtgagaagcgacaacggaacagaatttctgtgtttgactagttttttccaagaacacggagtcattcatgaacgatcttgtgtgtctactccagagcagaatggcagggttgagagaaaacatcggcatttacttaatgtagcaagggcgttgaggtttcaagccaatctcccaattgaattttggggggaatgtgtgttgacagcggcgtatctgattaatcgtactccgagctcagtgttaaacaatagcacgccatacgaacgtttgcataagaagcagcctcgatttgatcatctgtgtgttttcggaagtttgtgttatgcacacaatcgtcatcgtggtggtgacaaatttgcagaacggagtaggcgttgtgtgtttgttgggtacccgcatggtcaaaaaggatggagactatttgatatggagcaacatgaattctttgtgtcacgagacgtagtgttctcagaacaagaatttccatttcaaatgactcacgaacagagtataatcgatgaagaagaagctttgtggaccccaatagctgatgggtttgttgaagaagaaaataatttgggcccaaacgcaggcccaactactccactttgtgaaacagatcaaattggcccgtttgtaacagaattgcagtcacaagagtcgccgtcagctccgttacccacagaacaagttccgacgcctcaggcgcctcctgtaatcaacccgccgcctgtaatttcaacgacgtcggctccgtctacctctgctccgacgaatctgcagctgttgcctctgtctcgagctaagacaacaacttctcacgtggtggctccaccggcggtacctcctccgcgacgacagagtgaaagaaaacgaacacaacctgtgactcttaaggattttgttgtcaatactgcagtcggtcaggaaccgaagtctaaacttcattcaattctatatccattgcaagagcgagatgatactcgtcgtttctctgctactcatatcgcttatgttgctgctattacttctgcaacagaaccacgatcttataagcaagccatgatggatacaagatgggttaaagcgatgggtacagagattgatgctcaagaagagaatcatacatggactattgaggatttacctccagggaaacgagcgattggcagtcaatgggtctacaaagtgaagcataattccgatggtacgatagaacggtataaagcacgtttggttgcgctggggaacaaacaaaaagaaggtgaggactatggtgaaacttttgctccggttgcaaagatggccactgtgcgcttgtttctcgatgtcgcagcaaaacgcaattgggaaatccaccagatcgatgttcacaatgcgtttttacacggagacttgagagaagaggtttatatgaagctacctcccggttttgaagcttctcatccgaacaaggtgtgtcgtctccgtaaagctctgtatggtttaaaacaggctcctcgatgttggtttgaaaaattgacaacggctttaaagaggtatggttttcggcaatcgcttgctgattattcattatttactcttgtcaaaggttctgttagaattaaaattctcatttacgtcgatgatttgattatcactgggaattctcaaagtgctactcaacaatttaaagagtatcttgcgtcttgcttccatatgaaagatttgggtccattgaagtattttttgggtatagaagtggcaaggagtggcaaggagtgacacaggaatttatatctgtcagagaaaatatgcgttcgatatcatttcagagactggtttgttgggagctaagcctgcgagttttcccttggaacaaaatcataagctcggattgtcaacgtcaccactgctcacggatccacaacggtatagacgattggttggtcgcttgatttatctagctgttacacgacccgacttggcattttcggtacatatattggcacggtttatgcaagaaccaagagaggatcactggcaggcatcattacgtgtcgttcgctatctcaaagctgatccgggtcaaggagtttttcttcgacggtcaggtgattttcaaatcactggttggtgtgactcggattgggctggtgatccaatgagtaggcgctcagtaactggttattttgtacagtttggtgactctcctatctcttggaaaacgaaaaagcaagacacagttagtaaatcatctgcggaagctgaatattgagcaatgtcgtttcttggttcagaattgttgtggttgaaacagctgctgcttgcacttggggttcgtcacgtccaaccgatgataatgtgctgcgacagtaagtctgctatctatattgctacgaatccggttttccacgaacgcacaaagcatattgagatagattgtcactttgtgcgtgatgaatttgttaaaggtgtaatagctcctcgtcatgttggcactactactcaacttgctgacatctttacaaagcctttgggacgtgactgtttctcagcatttcgggtcaagttaggcatacgaaatttgtatgctccaacttgagggggggtgttggagttggagatccggtttaactggtttggtttacaaacttggctacaaagttgcgtgaagagaacgttggcgttaaatcaggaatgtatatcaaagttactccataaaatctgtattgttaatattgtttctatattttcggtaagatacgatatcgtgatagcacaaagatcttgttctctaaagctatatatgtacatgtaatcattcataataaacagaacaactcttgaaactctgtttatttcagaaactagaggcagtggaagatgcagtccataacaccacttcggaaaatgctaacacaggggccaggaaagaaagtacggaggaagaagagaaggcggatggatggatcacaccaataaaaacaaaagaaattttcacagaagtggctaaaaaaagaattgctctcatgatttggcaaagtgagatgtggttttcaccatttgtcttttgaatggtttttagaccaaaatacccttaatagaatcaaccaaactccacagcagttggtttcggtttagtttctatggttcagttttaaaaaaaaaagaaaaaaaaactgaaacgaagcaaccaaagaagaagaaaaagaggaagagaaagagatggagagatttgaaagaaaagtagaaagaagttcaaacttcattatccacttcttcatatttcgacatctctccattgaactccaaaattgaggaagaaatttcttgttttcagagatgaacaaaatgcaaaaaaaaatcacagattcaaacaatttagttttttaaactaaagatactctaggtttacaagatttatatataaatagtaattaaaacgtataaaaaaatgagattttgagaaaactgctaaagatggccgcaaaattaggtttgcagaaaaggatacacaggttgaagatgactggaaaattacaattatacccttcattaaatttcttctgtgtacgtatattcaatttacagtgtacgtacacaaaattatttagtcgaacgtatatggtacgatttctaataagtcaagctattttattacgtattcttatatctcaataatctcatacatacataataattaaatagatatagatggtgaaataatatttgttcctcatattgaaaattatgtacgtatatgtgtaataatgtacgtatatttttgttggtaaattaatgtatgtacatgtgtaataatatacgtacatctttgtttgtaaattaaattattatacaaaattttattgatacaatattaaactaatattggcagtgggcgagatatattctaagacgttcatacgatgtgattttgaaatattctgaattcttgacgacttgagcagtcaaatgtcatggacaagtatcatcaacgcataccatcaccaatcttgtaggatatgacctaggttgcttgtagcaaaaagattgtttgattgcgagataagacattgtttgttgtatgacttttctgttcttaaaaacactcttcaatctatagtgtacgtacattggtacaaaccatgttgacacatacttcttggagtcacagctggtgtacggtcacccgggtgagaaatgttatctccgccaggtaacgctgacttgtgtacgtacactctgccaacagaagactgaattcccttggatgttgaacagtcagctgtgtgagaatgacgttctcctcaacattccctattccatattcttttacaatttcatcgttccacttgttgtaatcataatcttcgccactactttcactaccatcaatagtaggatcgatggtacttcccccatagatccatcgtcaccctgataatcatcatacccatcaccatcttcgttgtccccccatcttcatcctcatctgttttatcgtcttcaatctcgtcttgctaatctatggcctcattattttcatcaacatttaaaacactatcacacacacggtcactttcagcatcgtcaccatgactcctagagacattattcccgagtgtcttgacggttgtaatgaaagagacaaacaagttgagagaaggatacccaccacgaataaaaaaaatcgtatcccaccctcacttgactctcaatgtagacaggagggcgtttagtatctatcatcactaacatctctcccggtatccagtaactaattatgggattgatctctatggacttcaaactgaaagtctcgcttagtgtacatacaaattccgtgtacgtcatgttttccttaacacgtacacagcgaccaaacatgttttcctctggttcaaatttccatttttcttctttgtatctccactcaccgaccatagtaaatacgagattatccattacccaactgcttcataaattcaggagaaacccaataaatgcaactgaaaacattattatatcgacaaaaacaaatagaaattcgttatacgcacttataaacataaatatctacacatttaccattttcaaccaacaaaattagaaataaaaaaattctggatttttttataaagaacaaaattgatttcgaacacaatgaagatcatagtgtattataacaaaaaaaatctttaaaacttcattacttacacgataatgcttgtcttgaccccaaacttcgtaaataaacaagatcaacacatcttcaacatcaatgtacgttagcaattaatgtttgtttctgggttcatctttaactcaacaattattatcaataattttataatattataacatgtaatgatgattttgcattagttgtgacaagagtcacgtctaaactttttgggccattaaatgttgatgtcatttagtttttaaaggaaaaaatctcccttctaactgtacagccgcactcctcaaagtgaaacaaaaatatctccaactaaaccggaacagtgtacctaactaaacctgactaactaaaccgtacattcaatagtttctcaactgtagcagcaagggtaaaatggtcaaatttcagctgaaaagacaaaacgtgaaaaccacatttgactttgccaatcccagaaaataaaacatggtcgaagggtgtggcctgcaaattaccctaaaaacaagccatcactctagtaataccccaagcaagaagcaagagaaactgactttcggtgaggtttatactctctcaaactcctattatgttctaagtgacacaatagagggcggtgaagggaaatcaaatgatgaacttgagggaaatatagaacagacgctaggaaaggagaaagaagaaaacaccagagttgtggtgaatgatgacggcaaacaagagtctttccaaggaaaaactggcttgccaaaaaattctcgggcacacaaggtgggtttgccattgcggtagtacatccctcgggactctaagactgctcacaaattagtttcgaccctttctactcaaatctcgcgggatcagagtaaaaggcccccccaacactaatttatgtcgagctttttctggaatgttcgtggtttcaagaaaatgtctaaacattccatagtaagaaaatgggtttctcaagaagatttgcagtttgggtgtattttggagacgagggtacaagaaaaaaaagcagaaagaattgtaggatcagtctttccggaatggtctttcatatcaaactatgcttttaatcgcttgggacggatctgggaagtgtggagtccacgagttagattgacgccatgttttacaagtggtcaaatgattacttgttcagttcttatggaaaatatggaggaataattttttgtttcttttgtttatgcttcgaacttcataaaggacagaaaagagttatgggaggatttgcaaaatcaccaagattcaccaatgtttagaaataagccgtgtatgatatatggagattttaatgaaattttgaagggtgaggagcattctctatatgaggtaaaccctgttattcccgcaggaatgagagatttccaggaagtggtgcgatattgttctctcagtgatattcagagtcatggtccattatttacttggtgtaacaaaagagatgacgaggagctaatatgtaagaaactagaccgggtgttagtgaatgatgcttggttagcagagtttcggcaatcatatggagtttttgaagcagggggatgttctgatcatctccgatgtcgcataaatataggagctgctaaacaacacagacgcaagccttttaaattcacgaatgctttggctactaatgcagggttcttaccaatgattcaagacttctgagacagcactgaaacgcttttccattcaacttccgcaatgtttcatttttcaaagaagttaaaagcactgaaaccaagaattaaatcgatgagtaaagccaagttgggtgatctagcgaggaaaacgaaggaaatttttgaaactctttgtcgatgtcagatggaaacgttaatgaatccaacaacatcggcaatgcgaatagaatctgcagcttatagtagatgggtgcacctctcgggcttggaggaaaaatatttgaaacaaaaatcaaagctccattggcttaaggttggagatggcaaaaataaagtgtttcacaaagcgacaaaggttagagaagtacgcaatgccatcaatgagatcaaatgccctgatggtactacagtggacacacaagaggagataaaaaaaagaggctgaaagtttttttcatgatttcttagctcacaggccagctcactataagggtatttcagaggaggagctgaggaagctagtgcagtaccggtgtcagaagcagatggaatgcagttggaaagagaagtctctactgaggaaataagagaagtgttattctcgatgccaagtgataaaagcccgggtccagatggatacactgtggaattccttaaggcaacgtggcctatagtaaagagagattttgaggtagcagtccaatctttttttctctatggattcatacctaaaggagttaacaccacaattttagcactaataccaaagaagaaagaagccacggagatgaaggattataggccaatctcttgttgcaatgtgatatataaggtcatatccaagattattgctaacagactcaaaaagctactcccggatttcatttcaccaaaccaatctgcattcgtcaaagatcgtctactaatggaaaatgtgttattggcatcagaaattgtcaaagactaccacaaagaaactatctctcctcgaagtgcagtaaagatcaacatatcgaaagctttcgatttagtccaatggccttttattttggccacactctccgctttaaacctcccaccgcgattcataaattggatagagctttgttaaaccacggcttccttctcagttcaagtgaatggagagttatctggcttgtttcaaagtgcgaggggtctgcgacagggttgttctctctctccctacttgttcgtaatatgtatgcaagttctgtccacaatgattgaccatgctgcccgggaaagcagagtaggctaccatcctcgttgccaaaaactgaagcttacgcacttgtgttttgcggacgatctcttagtattcacggacggaaaacaaaaatcaatagaagaaattctcaagatttttgataagtttgctgaattctcaagattgaaaatcagtctcgaaaagtcgacgtcatatatggcgggggttagagattgtgaaaaagacttaattctaagctcatttccttttgaatcaggtactcttcccgtatgttaccttggtttgccattactaagcaaaagaatgacgacaagtgactatgctcctctcatagaacgaattcgaggaagaataaatagttggacggcaggacacctctcctttgccggacgtttgcaacttataagttctgtgatccatagccttacaaacttttggatgtctgcttttagattaccgagtgcttgcatcaaagaaattgacagtctatgctctgcttttctatggtctgccctgagttaaattcaaaaaaagctaaagtttcttggagggatgtttgtgtacctaaagaagaaggagggctggggcttcgctcactagaagaagcaaacaaagttagttgccttaaacttatttggagactgctatcatcaaattctttatgggtacaatggctaaggttatatgtgaaattactaactagatctaatacgtcgttaatgatgagagtgtgtaaagaacttgtacgtgtgcataaagtaaatgacacagagatttgttaacggggttcggtaacaacctacatccccgggacctagtccagaacaattccactagaacaagattgcaaatacaattgcatatgatattacagcataactatgcttaccactcttttctagatggactttggaaacagtatcaagccacgcatgtcttgactaccacccggcagcaccggtgcatcaccgtcttctctaacggctgcagattccaaaggaataccaccaacagatcatcatctgtatttggtggggcgacgccacacacatgtgtgcatctctctcaactatatcatagacgcgcaacctctttttgtcacgacaaccatctatatatactcaagacaaaaccctaagctccaaatattctcgcaatcttttttctttgatccgaaagtatctgagccaccactaaaggaaacatcacgtctccaatagaaacacgccacgtcatcttcattcttagcttatttctttctacattcagttctcctgttgtgtacacagctgctacctgtggaacacaactctgatactttctgttgatactccagcgtcacacagatctttcaatatctctgttgctgtctgcataaactcttgtttcattctgtgccaagtcctctgttgtatcacggtctgtatcatccctgtttcacacatatgttcttgttgcagtgtagtctgtatcatctcatatcttgagctgtgtgtcatcatcttgagtctaacaaccagttacaaatatactctcattctccccctttgttactgcgttttagaactcaagctcacctatgtagattgtactttgatgatcttcaagcttcaatactatcttagaatgtttctctaaactgtcactgcatatgttgtgattctgaccgagtgtccatgttccaactgtcacagctacacaactcagcaacatcacaatatactaacaatatgtgctacgtaaaggttcgttttggttgcagaaaggaacgtcaacgttaggcacttggatgtggaaaaagctactgaaatatcgacattgagcttctggttttatacagtatgagattcataacgggaagggtaccctcttttggcatgacaattggtctcctctaggacctttgattgcgataacagggcaccgaggttggtatacatgacacagtggctgaagcacttacacatgttggacgtgatcaagtcttcatcttattttattatcttagaggagtagtatattatatagttaagtaactgatttataaactattcgtatcacaccgaaaagatacgtatagaattgttaactacaaaacagttacgtgtgtgtgtatgtgtctttacattgggttgtcttctagagacgtgtccctcagttaaagtgtgtcatgtaaacctataaatactgtttatgtatctaataaaagtgtgtggtttgtgtttacaataattagtgcaatacgttgagtgtcgaaagagaaacagagagagtaagacaaaacagagtaaaatctgtgttgtccgatccttaataactttgagagatcaaagttctacatggtatcagagctatggagacaacaatgcagcaagttattccaatcttcaatggtgaatcgtatggcttttggaaaatcaagatgataaccatcttgaaaacacggaagctgtgggatgttatcgaaaatggggttacgtcgaattcgtcgcctgaaacctcaccggcgttaactagagagcgtgacgatcaagtgatgaaggatatgatggctcttcagattcttcaaagtgcagtttctgattcaatatttccgagaatcgctccggcatcaagcgcaacagaagcgtggaacgctttggaaatggagttccaaggaagttcacaagttaagatgatcaatcttcagaccttaagaagagaatatgagaatctaaagatggaggaaggtgaaaccataaatgattttacaaccaagttgattaatctgagtaatcaactaagagttcatggagaagagaagtccgattaccaagtggttcaaaagattctaatctccgtaccacaacaattcgacagtatcgttggggtacttgaacaaacgaaagacctatcaactctttctgtcacagaattgataggaacactgaaagcgcatgagaggcgtttaaatctccgagaagatcgtatcaatgagggtgcgtttaatggagaaaagcttggctcaagaggagaaaacaagcaaaacaaaattcgccatgggaagaccaacatgtggtgtggcgtgtgtaaaaggaacaatcacaatgaggtagattgtttcagaaagaagagtgaaagcatttcacaaagaggtggaagctatgaaagaagatgctatgtgtgcgacaagcaaggacacatagccagagattgcaaacttagaaaaggtgaaagagcacatctaagtattgaagaatcagaagatgaaaaagaagatgagtgtcatatgctctttagtgctgttgaagaaaaagagatctcaacaattggagaagaaacgtggttggtagatagcggatgcaccaatcacatgtctaaagatgttagacacttcatcgctttggatcgcagcaagaaaattatcatacggattggtaatggtggaaaggttgtgtctgaaggcaaaggagatataagagtatccacaaacaaaggagatcatgtcatcaaagatgtactttatgtacccgaactagcaagaaatttgcttagtgtctctcaaatgatatccaacgggtatcgagtcatctttgaagacaacaagtgtgtgattcaagatttaaaaggaaggaagatcttagacatcaagatgaaggacagaagttttccaattatttggaaaaaatcaagagaagaaacgtatatggctttcgaagaaaaagaagaacaaacagatctttggcacaaacgatttggtcatgtgaattatgacaagatagagacaatgcaaacgctgaagattgtggaaaagcttccaaagtttgaagtaataaaaggcatatgtgcggcttgtgagatgggaaaacaatcaaggaggagttttccaaagaaatctcaaagcaacacaaacaaaaccttggagcttattcattcggacgtgtgtggtccaatgcaaacggagtcaataaatgggagcaggtacttcctcacatttattgatgatttctcaaggatgacatgggtgtatttcttgaaaaacaagagtgaagtgatcacaaagttcaagatattcaagccttatgtggagaaccaatcggagagtcgaatcaaaaggcttagaacagatggaggtggagaatttctatcaagagaattcatcaaactatgtcaagagagtggcatacatcatgagataacaactccttactctccacaacaaaatggtgttgcggaaaggagaaacagaacactcgtagagatggcaagatcaatgatcgaagagaagaagttatctaacaagttttgggctgaagctattgcaacatcaacatacttgcaaaatagattgccatctaagtcactggaaaaaggagttacaccaatggagatatggagtggaaagaaaccaagtgttgatcacttgaaagtttttggatgtgtatgttacatacacataccggatgagaagagaagaaagctcgacactaaagccaagcaagggatattcgtaggctacagcaatgaatcaaaagggtatagagtgttcttgctaaatgaagaaaagatcgaagtgtcaaaagatgtgacattcgatgagaagaaaacatggagccatgatgaaaaaggagaaagaaaagcgattctatcgctagtcaagatcaattcacaagaacaaggaggagggaatgatctaaacgcccatatagatcaagtaagtaacgcattcaatcaacttcatatttcgagtagaggagtgcaaaactcacatgaagaaggagaagaatctgttggtccaagaggtttcagatcaatcaataatcttatggaccaaacaaatgaagttgaaggagaggctcttatacatgagatgtgtctcatgatggctgaagaaccacaagctttggaggaagcaatgaaagatgaaaagtggatagaagccatgagagaagagttgcgaatgatagagaagaacaaaacatgggaagttgtggcgagaccaaaagacaaaaatgtgatcagtgtcaaatggatctttcggttgaaaactgatgcaagtggagaagcaatcaaacgcaaagcaagattggtggccagaggattcacacaagaatatggtgtggattatcttgaaacttttgcaccggtttcaagatatgatacaataagaaccataatggcgattgcggctcaacaaggatggaaactcttccaaatggatgtgaagtcagcgttcttaaatggagacttggaagaagaagtttacatagaacaaccaccaggtttcatagaagaaaaagaagaaggaaaagttcttaaacttcacaaagcgctatacgggttaaaacaagcacctagagcatggtatggacgcattgatggatactttatcaagaatggttttgagagaagcatcaatgatgcagcattttatgtgaagaagacttcaaaggagatattggtggttagtctctatgttgatgacatcatagtcacaggaagcaacgtaaaagagattgaacgattcaaggaggagatgaagaatgagtttgaaatgacagacttaggagaactaagttactttcttggcatggaagtaaaccaagacgatgaaggcattttcttatcacaagaaaactacgcaaagaagcttttgaagaaatttggaatgcaagagtgcaagagtgtgtcaacgccattgacgccccacggtaaaatagaggaggtcttaagtgaaaagcttgaagacgttacgatgtatagaagcatgattggaggtatgttgtatctttgtgcttctagaccagacatcatgtatgcgagttcttacttgtctcgctacatgagatctccattaaagcaacatcttcaagaagccaaaagggttcttagatatgttaaaggtactttgacatatgggattcatttcaagcgagtagaaaaaccagaattggtgggattttctgatagcgattgggccggatcagttgaggacaagaagagtacaagtggctacgtctttacgatcggatcaggtgcattttgttggaattccagcaagcagaagacggttgcccaatcaacggccgaggcggagtacattgccgtttgctcagcagcaaaccaagcaatatggttacaaaggttggtgaatgagatcggtttcaaggcagagaaaggtataaggatcttctgtgataacaaatcagcgattgcaatcggaaagaatccagttcaacatcgtcggaccaagcatatcgacatcaaatatcatttcgttcgagaggctcaacagaatgggaagatcaaacttgagtactgtccaggagagttacaaatagctgacatattgacaaagcctttaaacacaacaaggttcgaggtcttacgagaagagctaggcgtaactatgaagccatgatcaaggaggagtgttggacgtgatcaagtcttcatcttattttattatcttagaggagtagtatattatatagttaagtaactgatttataaactattcgtatcacaccgaaaagatacgtatagaattgttaactacaaaacagttacgtgtgtgtgtatgtgtctttacattgggttgtcttctagagacgtgtccctcagttaaagtgtgtcatgtaaacctataaatactgtttatgtatctaataaaagtgtgtggtttgtgtttacaataattagtgcaatacgttgagtgtcgaaagagaaacagagagagtaagacaaaacagagtaaaatctgtgttgtccgatccttaataactttgagagatcaaagttctacaacacataggcgaagaagacaccgagcggaacaattgaaccaaatggaagctcagctagaagagcttcgaaatggagggcttgatgaagcagaggatgtggtgttgtggaaaggaaaaggcgactgttttacaccatgtttcaagatgaaagacacatgggctgcaacacgagaacaaaggacacacgttgaatggcataaaggtatatggttcccacataccacacctagatactcattcatcgcttggcttgcaataaagaatcgattggcgacaggggacataatgcagtgttggaatgtcggggctaacgctgcatgtgtattctgctcagagcctatggaaacaagaaaccacttgttcttctcgtgccgatactcacaagaaatttggtcaggcctcacttcaaatctgctcacaagccattacacaactgattggactaccaccctcaaactcctcacggacaagacgatgggaaaagataggttgtttctcttgcgatatgcttttcagattctcgttcactcgatatggaaacaaagaaacagtagaagacatggtgaaaaaccattacagtcatcttccttactgcgaaggctagacaaggagattcaaaataagttgtcttccgtatgagagcaaggagacgggagatacgccggatgtatgtcactttggttcgccacaagataagcaaagcctggtcgttttgtttttctctaacaatgtctaagcaaaccttttaacttacatttgcacttgatgtacaaacgtttttttcgaataaattttacatttttattcaaaaaaaaaaaaaaatcaccttagaagagctcactagagccggttaagatactacagatgatggagccaaaatggcgcacgctcaagcttcaaaccttgaacatcggattggaaaaacctttatatgaatgtagggtccaaaactcccaaaatcaagctgagccgcttcaaacttcagcttttgaaatcacccccaaactcatgtcctcttatcattataactaaaggatctttcattttatttaactcatcgtcttgcactacccaacccaaaggttccaactatacccgaagctttctaaaggtccaaagactttttttttttcgagccagactattcaagccaagaaaagccaaaccccacaagccagtacttttcaattccatattataaacttatctgtcttgttttagtcccactaaaaacaacagaatttaatttaggttgagctaaaacccttgacaaaagtgtatagtcgtcgattcagtagcacactcatcactcatcagatttgatagttgacctaaagtatgactactccatttcaactaacaaatgaaaataaaagagacctaagggttagaggattgaaactatactctcaagtcttttatcactaggctactaccagctagttaacttgatggatttaagcaagaaaacgtagaatttatattcgagcagattgtttagctaaaaaagcttgggtttgaaattgccttttctcccatataagcacgtcggttcctaaataactctttctagcggagagtgtctttccaataatttaataaaaatggtgtttgtatatcaaaaaaaaaagaaaaaagaaactgatcgagatagaacgtttgcagttttataaacaatttaaaaaacaaaaaaaattaaactcaatgtattttttattaattcacaaacaataataaatcataggatcgaatatttacacggtatcaaaacctactcgccgctactatataaaaattgaagtcaaatatcaaccgcaattattaaaccagcaagacaataattcataaacttaatataaacataaataaattaatgttacacaacgatatatggtgagggttattactatcttcttcctctcaaaacacatctcctaaccttaagctttagacatgaccaaaacatttttctccttctccttcttcttcaccagctctcttctccttctcctcgcggcaacttccgcaaccgcatctacagggaatgttactagtgggttgagatatgacggatgtgctcctggagacaccgttggagaatgtataaccgcaacggttgaggaggaggatgaggaaggagttgaggcggtagtccggcggattctacaacaaagaaagtacttaagctacaaaactttgcagaagcagccaacttgtgatggtagaattgctggtaattgcatagggactgttaatccaaaaggtgcaacttgtacttactaccagagatgcaaacgtgccgcatagttatttatcttcgtgtcttttttataattgtaattatgttgcctttttcttcttaattatgtgtgttttattaaaatgtaaaagattttttgattaaaatgtaaaagaatttaaagtaataataagaaagttgggtaggttaaaaaaaataaaatttgttgatcaagtttaatgcatagaacatttctagatgtgtataagaaagtttgaatcaatgaatcaatgaaacatattatgcaaccggatctccactaattgtgaggttgacaatagctattaaaatacaaattcctatataactaaaaataacacttatcaaatgagtttttatttatttttgaagctttatatgcatataaacaggcctatatattattgataaatatataaacctacagtactttgtttacttgagatcattttttcgtttatttttttcaaaatacatcaagttaagatcctgaattcatggaaataatacactttcaaatttggtgaaaccattgaaatgttcttagctgatgagcaataccgtgcctatgagtaataaaaaaaggcatttgtctcaggtttttaaaatataaaacattttttagggccccaaatattaaagatgatgtatcataatggttttgaagtatcctattttatttgaataattaaggatcaattccttttccatgttcctttaatataaactaagttttcaatccatgctacacgtgaatattttcgatatattttggttaaaaatacatacaattagttataaattttaaattaaagtaaaatttcatttcaaatacaccatattcaaattattaaaataatagtattgaagaatcaaatttaattaaaagaaccacaaaccaattttattattttatattcaattggttgtcaaacctatgtcttcgtatttctctcaagattctttatcttttacttttcatatcttttattgtcatcttaactatcaattttcttttggaagttatcatcattactttcactgttcgcttcttcgttatacttttcatcttcgtttttatgttgagctacatatatatgaactaaacgttgtcataaagatatcatgtcataattgtttctcactttcttttgccatatttcataatccaagtttatcttatggtgtcaaccaagtttctctctttctttatcatttttagataaaaatcagccgtttttgtacctaaattttgatgtcaattgttcaaaatgcaaagaaactttcatcaattaaatttattatctttattacgccttactaattccccttttttaattgaaatcggtacttaaaaaagaacaactatttccacaatttcaacagaagtcttcatacttttggactcgttagataccatccaaccaaagtacatacaacctaagttaaaaaagaatcatgcaagatgttgccttattgttcataatgcatctacttgttgttttaacataaacaattttaactatactagggtagaattcgggctacgcctagaaacatttgatattttaaagtttgttaattttgaaaaaacaaaaaacatataatgttgtatttaacattttactaaagaaaccatatatataatactattaatggtttaactctatctatttattgttatttcaatgttatttatatttaatttaattattgcttatttttatcattaataggggcatagaattattgatttgagattatttatgttctataaacaatctccccttatagcaccaatgattttctaaaatgtattaaaatcctaccttattgaatttaccatttgttaaaatcaatccaaatatatggttatttgattaatcatttataaaaatgtgcaaaactcggattttgtagtaaaattatatatgatatgatttagaatgatttgagagacaatttacactgaaaattgtggataggaaatcacaccgtatatgtactataagaaatatctacattattagccagaaaaagagctattaaatgtcatccatagcgtttttataaacgctttcttatgcccctattatgttagaccctccatatacgatagcgttttttccatatgctacgataaagtactataccataacattagtaaaacgctttcataaatcaacttatactagcgatatatagacgctatgatctataatttttatgatgctataatattcagtgccataactctaattttatgcgattggttttaagctatttgcatttggtggaacctatttagttttcaaaatatctgatatatataataaaaacatccaaaagatatacatcatttcataaaccaaaaattaattcatacataacacaagtctcaatccaatacttaacctaatatcctaacttttatatactacttctgctaaggaagttattgatgagatcatgcaaaatccttactttgttttctagatattggactcggttcttcaaggaagttagctcagcttcataggttctacaagaaaacctgcaatttgggacggtttgttgtgaccacttattcagtcacaaattatagtgacttctttgtgacgattttgtgaccgtaacaaccacgatataggtagatgctaaacggtcgctaattaacgaccagtggttgttgtcggaacggtcacatatgaacgactattttcggaccctgttgcgacgcaataaaaatggtcgcatataaatcgcaaagagcgactacttactgacgtcatgttggtcagaaatgatagtcccaatatcgtcttaaagtagtcgcgaagagtaggtagaaaatgtcgaaaatatgaaaataattgggaaaaatgtcaaaaaatgcgccaattttcaaatttgggacgaaaaaagcatgaactttcgaaatgtcatttaaatcttaaagtttgggttgacttcttaaaaaaatgtctaagttttgttgacctggccatttaaagcgtgccgtgaaatttccgttaacggaaaaataacggagttaattttccgttaacagctcaaaatgacgtcgttttaaaaattaaaaataaataaaaaactgacaacagcctagactagaaccttagatcactggatctgtagtcaagcattaaaccgttgagctactcacgcttttggtgtttacttaagctaatagatatatatatattcgtagatgtaattaattgaaaaacacaaacctaaaagctccattgttgcctgcgtaataaacaacgtgaacaagtccagaaaataactctgaatcagatgtaatcaagagttcacaatacttgaaatcgacaacattaaacggatctccaattgtataaatccgagaacggtactctccccaaacaaaccatcattggacatagacgagccacacgatctcaacctcacgctcatatttgacgtgattccacgccacctgctcacgctgttttcttctcaggcaacaatggagttctattagtttcaactagttacatatatataagctcaatcaatgttgttacaagtttacagtagctccatggttgaaggcttaataacagctgcagggaatcgtcggtttgacactaggttgtgtccgattttcttcttatttttaatttttaaaacgacatcgttttgaactgttaacggaaagttgactccgttaattttctgttaacggaaatttcacggcatgccttaaatgaccacgtcaacgaaacttagacattttttaataagccaactcaaactttgagatttaaatgacatttcgaaagttcatgcttttttcgtcccaaatttgaaagttggcgcatttttcaacatttttcccgaaaataattaggtgtaagtaggcagaacttactttttgtgactcttaataacggtcgcaaaatggtaacactattttcgaaaacgtttaaaatcattagaaattaggtgtaccaacttttgggactccacattatcgtcacaaaaacgtcacaaatatttcattatatatacgtaccttttcatttgaattcttcataacaaatttcttgagatcgataagtaaaaaaaaaaaaggagagaaaaaagatagaacaaaaaacaaatttgaaacgatatggaataattcatcacgcgaatcgatgtacaatcgaatcgatctatttactaataatatctcgacggattatttggcgggtgtggaagatttcattgaatttgtaagctctcatgttcaagacaaaaaatgtcggttttattgtccttgtgtaggttgtaaaaattctaaacgtatgaaagttgtcaccatttcgagtcatttgcttagtaagaggtttatggccaattattatgtctggtatgaacatggtgaagattacaatgatactggggagggaactagtacttatcaagaatatgttgaaaacatcgattttactagtggtattcatgatgaacctataggatttgataggaataatgtatatgttgggatggttaatcatgcgtttcatggttctgtaccatataacgagttcatgaagaacctacccaagaagcgaaacggttttatgatatgttagttgctgcaaacacgccgctttacgatgtttgtcaagaaggtcattcgcaattatcgttggcagatcggttcatgaaccataaagtcgaccacaatttgtcagaaaattgcatggacggatgggcggaaacgtttacaaagtatttacctgagggtaataaggcgaccggttcctactacgagatagagactttgatgcaaaagctaggattgccgtaccatacatttgatgtatgtatagacaattgtatgctcttttggaaagatgatgagaagttagagcattgcaagttctgcggaaaaccaaggtattagaaaagtgatggaagaacaagaataccatttagtaagatgtggtatttaccaattggagatagattgaagagaatgtatctatcttagaagactgcagcttcgatgagatggcatgctgagcatgaatcagaggagggattaatgtgtcatccatcagatgcagctgagtggaagaattttcagcaatggcagccctcatttgcatcagaactgtgtatcttaggttatgtactgacggtttcaatccttttggcatgtccaaaaatcattcgttgtggccagtaattttgactccatacaacttgcctactgatatgtacatgaatagtgagtatttgtttctaacgattttgaattcgggaccaaatcatccacgagctagtctagatgttttcctccaaccacttatcgaggagttaaaagatttatggatgaatggagttaaggcatacgatgtgtccttagatcaaaacttcaaccttaaagtagttcttatgtggacttattcagtcggtaagttttcggaaatgaaaagccacgactgtcatgtctttatggaacgattgcttccatttgtgttcgcagaactcctaccgcataacgtgcatcttgcagtatcaggtaattatgtcatatatacctatgttaaaataaattatttatgtaataatttactaatcatctcataaatatttctatcgtagaatttggagcattttttcatgacttaagtagccgatcattggagcaaagtcgcgtcaaacttttgaaggagaatattgtcatgattctgtgcaatttggaaaaaaatatttccaccttctttctttgatgtgatggagcacctacctatacacttaccagatgaagccgagcttggtagtccagttcaatatagatggatgtatccttttgaaaggttttttaaacgtttgaaagggaagacaaagaacaaaagatatccagcggcttcaattgttcaatcatatatgaatgatgagatatcttacttctctgaacactattttgcttcacacatttctacagctattagaagaaggtatttcatatttatattataacattatcttaagtaaaattttgtttagcattcaaacaactaaacataaagttatacatatgtttaatttgcaggtcaagtcggtatgatgttggtgaagctcatgttggaactttttgacttaaaatttttttggtgattttccgcccaaattccggtcaaacggctgaacggaattgtcgggtcattagtgcattggaatgctggtaaagagaactccaaaacggtatactcatacgtcaaaaacggagttgtattgaatgagaaataagggtgtaaagttggatacttgggccaaaccgggccgaatcgaaccgaatcgggctgaaccgggctgcgggttgtcggaacgtcccgtcgtcggctcaagggctgtcgggcttgcggaccgtcatgcttgtgagttattggacttgctgagttgaatcttatgaaaatattctcaggatagtcacaaatattctcaggatatgagagtctcagaatattctcaggataccctcaaaatatgtcatgcttattctaagaatattctgcaaaatcctatctctctctactatatagagagacccagcctctcattatttctcaagctctcaaacacaaaacactctaaattctaaagtctctcctctcgctctattgcttcttaaaagtaagttcttagtttagtagtttctgttgataagcttgaagttagcttaaagaataagctaaccaaatcctaagtgattaggattagattgtatttaggagttatctaaatacaatattagtagttatctaatgttattaggagttatctaatagctagagttttcatataaatagagatgccaagttgtggtagtcttattgagaagtttagagtttgagagtttgaaagattgagagctttggtgagagttttaggttttgagtaagtttcctaaagattaataaagagtgagtctttatatacaccattctcttattctataattcgatatttggtatcagagcaatattgaattatcgaacaaaactctaaaaacaataacaaagctttttgttttagaaaatcaaactatgggagatatagttctggttactacaggcagcaagttaaaagaaacgagctcagcttccatctcatgtcctctactcagcgccacaaactataacgtatggactatgcggatgaggttgttgctcaaggtacacaaagtttgggatactgttgaaccgggatcagaagacgtggacaagaacgatatcgccagagccctcatcttccaatcagtacctgagtctctaacccttcaaatcggagaacttgagactgcgaaggaagtttgggaatcgataaaaacgaaaaacgttggagcagaaagagttaaggaggcaagacttcagactctcatggcagaatttgagagagccaagatgaaagagacagatacaatagaagactttgcagggagactttcagagataaccacaaaactgcagcattaggagaaaagattgaagcatcaaaattagtcaagaaattcctaaacagtctaccaaggaaacgcttcatacaaatcatcgcctcacttgaacaggttctcgaccttaacaagacaagctttgaagacaaagtggggaggatgaaagtctatgaagaaaggatatgtgatgaagaggaggatcaaacaaacgatggaaacttatgtatgcaaaccatgattcacaatctcagcaaggtagaggcagaggacaaggagatcgcttctatcaaagagggagaggtcgtggcaggtttggatatcagggttacaaacaagagcgtgatacgtcaaaggtggtctgttacagatgtgataagctaggacactatgcttcttcttgtcctgatcgtctacttaagctacaaaaagcaaaagaagaagaagacaatgacactcaagaagctgaagaactaatggtgcatgaagtggtatatctcaatgagaaaaatgttaaaccaagcgagtttgagacaagttcggatgcaagcaacgtatggtatttagataatggagcaagcaaccatatgttaggaaatcgagcttttttcgaaaattgatgaatcaattacaaggaaagttcgttttggagatgactcgagaatcgacataaagggaaaaggctcagttctgttcattagcaaaaacaaggaaaagaaaattcttgctgatgtatacttcatacctgatctcaagagcaacatcataagccttggacaagctacagaatcagggtgtgaagttcgaatgaaagatgatttgctcattatgcatgacaaggatggaaagctgctagtaaaagcaaatcgatctaaaaatcgattgtataaagtactcatggagattgagcctcctaagtgtctacaagcaatggtccttagtaactcagcaaaatggcactcacggttaggccatattggagttgagaccttgaagacgatggtgaagaaggatcttgttatcggaatgcctcaaatggaagttgacaaagaaacatgtgcttcatgtttactcgggaaacaagtaagcaaaagcttccctcaagcttcatcttatcgtgctacacagaacctagagttgatacacggagatctctgcggccccatcacacctcctacaagtgctcggaacagatatatctttgtgctaattgatgatcactctcgttatatgtggtctattctcttgaaagaaaaaaacgaacccttcgaaaaatccaagagattcaagacaagagttgagcaagagagtggagtaactatcaagacttgtaggacagacagaggtggagaatttgtctctcatgagttcaaaacgttttgtgaagagaacggtataacaagacatctcacagcaccacactctcctcaacaaaatggtgtagtagagcgacgaaacagatccctaatggagatgacaaggagcatatgaagatgccaaattacttgtggtgagaagctgttcgacatgccacctatgttataaaccgggtagcaacaagagttctaactaatcaaacaccgtatgaagcatacaaaggcaggaaacccaatgtagaacacatacgtgtgtttggttgtgttggatatgcaagaatagaatctcctcatttgaagaaactagatgacatatcacgttctctggtacacttaggaaccgaaccaggctcaaaggcatactgtctcttggatctaaccactcacaagatagttgtaagcagagatgtagtcttcgatgaaactaaaagttggaagtggaatgatctaagaagtgaatcaacagaagattcaggaaactttgtacttggttttgaacaatttggaaataacggactaagaagagaaagagaagaacatggttctgagacaagcgagaagaacactgaggatgaagacacttctcgagtcactgaagcaacagaaacagaggaaccaattcaagaagaaggtcaaccacaagagaacacacaacccacactaagacgatctcaaaggcaagtttctatgccgaagtacttagaggattacgttctacttgctgaagaagaaagtgaatatctcctctctgtaataaacgaggaaccttgggattatgctgaagcaaaagaaacacaagagtggagagaagcgtgtgaggacgaaatcgcttcaattgagaagaacaagacatgggatttagtggaacttcctcaaggagctaagccaatcgggctcaaatgggtgtttaagctaaagaagaacgcagaagggaacataaacaagtataaggcaagactcgtggctaaaggttacgtacaacgacatggcatagactttgacgaagtctttgcccctgtagcacgaatcgaaacagtccgcttcatcattgccctagctgcttcaaacggatgggaagtgcatcatctcgatgtcaaaacagcattcttacacggtgaattaaaagagatagtatttgtttcacagccagaaggattcacagagaaagggagtgaaggcaaagtatacaaattgaataaggcactctatggattaagacaagcgcctagagcatggaacaacaaattaaacaagatacttggggaattaaagttcgtcaagtgttctaaagaaccatcgctctatcgtaagcaagagaaagatgatcttcttctagtagaagtgtatgtggatgatttgcttatttcaggttctagcttaaagctcattaatgacttcaagaaaggaatggcgtccaagtttgagatgagtgatctcgggttactcacatactatcttggaatcgaagtaattcagtataatggaggaattatgttgaaacaagggagatatgcagagaagatcctagacgaaaccaagatgagtgattgcaacgcagttcacattccaatgaactccggtttgaagctgtcaaaagcgggaacagagaaaggaagtcatgactcggagacagagaagaacattgagccaaaagagtatagaagaaacattggatgtcttcggtatctacttcacacacgacctgacctctcatactgtgttggtgtgttgagtagatacatgcaagaacctaaagaaggtcatggagtagctatgaagcagattctaagatacttgcgtggcactacttcctatggactatctttcaagcgaggagacaagtcggggctaataggtttcagtgatagcagtcacaatgtagacgaggatgatgggaggagcacaaccggacatatattctaccttgatggctctctgataacttggtgtacacaaaagcaagaaactgtggctttatcgtcttgtgaggctgagtttatggcagccactgaaggagctaagcaggcaatttggttgcaggaattacttggagaggtaacaggagaagcatgcaagaaggtgagactactcattgacaacaaatcggcgatagcacttgccaagaatccagtatttcacggccggagcaaacacattcacaagaggtaccatttcattcgtgagtgtgttgagaatgagcaaatagaagtggaacacgttcccggggaagaacagaaggcgaatcttctaacaaaggcacttggaagaatcaaattcaaagagatgagagagctagttggagttcaagagttgtcgaagtgtgagttcaagcttaagggagtgaatgttgataagcttgaagttagcttaaggaataagctaaccaaatcctaagtgattaggattagattgtatttaggagttatctacatacaatatttagtagttatctaatgttattaggagttatctaatagctagagttttcatataaatagagatgccaagttgtggtaatcctattgagaagtttagagtttgagagtttgagagctttagtgagagctttaggttttgagtaagtttcctaaagattaataaagagtgagtctttatatacaccattttcttgttctataaatcgatagtttcgagagtatatcgtagatctagttcgcttgtgtctaatacttgtgtgcttgggtattagttcgtgatcagttgtatcctgggattcaaaaattatgatgtccgaaaagcacttatgggcgatttattgaagtaaggaaaaagatatcatatcttgcctccgtgatttactttttgtccttaattactgttattgtaattttattgttatc

SEQ ID NO: 1322 - DNA, 56884 bp, Arabidopsis thaliana
agcttataaaagggtaaaacatgatttacgatcgtttttaaagcataagtaagtggcatagaatgatttacaagggattttaaaagtgtttgtatggtttacaatcgttttaaagcataaagaagtggcattgaatgatttacaagggattttaaaagaggttaacatgatttacaatcgtttttaaagcataagtaagtgtcaaaaaataatttacaagggattttaaaaaaggtttgcatggtttacaatcgtttttaaaagataagtaagtggtatagaatgatttacaaggattgtaaaagcttataaaaaggtaaaacatgatttacaagagtttttaaagagttttaaaaggatttacaaggattttaaacctttgtaaatccttttaaaactcttataaagtctttacaagcattttttaactcttagaaaaagaattgtaagtatttaaaacatttacaactctttttgaaccattttaaaactcttgtaaacctttacaaaaggttttaaaaagatttataagagtttttaaagggttttcttataatttctttaaaatcttttaaaaactcttgtacatcttttaaaacactttaaaaatctcttgtaaatattttaaaacacttttaaacactttaaaaatcttttaaaatctcttgtaagttttttaaagccctttaaaatcccttgtaaaaattttaaaacccttttaaaatctcttataaatcttttaaacccttttaaaatcttttgtaaatcttttaaaatattttaaaatccttttaaaatctcttgtaaatctatttcccgccaaaaaaaaaaatacgggaaaaatgttttcgaaatttatttttggcgagaaattttttggcggaaaatttttttccgaaattttttggcgggaaaattttggcaggaaattttattttggaatattttaggcgaaaaatataaatatttcattttgttaacctaaatcaatttacaaataggggtaaaatggtcattaaaaatttaaatcggatataaatgaaaatggtaaatagaaaaagtagaattgaaaagggttagtgtgaaaaggcattacaaagaatttttccaaaaaacaaatattgaattttaatgttaaattattagacaacaaatatcagaacataaaacatgaattacccaagcttaccataaataaaaattaggtgtcaaaaatatatcattcatatacaaataataatttttgtaaaaagatttatataacttttaaataaacatattcacccgcggtatatcgcaggtcaatatctagtgtggtaataaaatagaataggttgcgattctgattgaggaggttaataaatttaaatcgtaaaaacgtaaacaaaagtacataacaatattattaaataatgtgtatcgaactgactttacgaataggaaatactgattatgtaataatgtgttgtatagtttcgtataattatatttaatccaaatatatatgtcaatttgaccaaaaaaataaaatatagttacggtaactatgtatattttatttagttaatgtacctaaccatctaattgtataagaacaaaatatcatctacacccacccaagaaaataccatatatcttcaactgtaataatttcctcgttttcgatcgtttatgacctaatataacacccactcaaatggccaaattttttattattacttttatttcagaaattaattaattttttaaaaacacatcgtcttctcgtccttccgacatccatagatctattagatcaatttctgagaaaaattcttcaaactccttaaacgatcatcttactcatgttgaattccaataattggcgcaacaaagatcgattcaagtattaggtaagagtttttttctttgatctgatttttgataattagattcgttgaattcatgattcaatcggtttatgggagatatgtgccatatggaaaagctaattgtttttcttcctacaactggatttttaattcacaatctcaatcggttcctcattatgctccagtatcaatcgtttagagatgtgaatcgggactttgagataagaggtgaattgaatatcagattttgcaatggagacccgaaaaccataattcgtgaccttttaaatcaatttgtcacaaagacaaagaccataatttgtgacctttcaaatttatttatacttctttatgtttacattgcatgttttagttttaggttcttaagataattttgagtaatgtttatctataacatgtttccggtatgaattatagattgatatgatattttcagtatgaacactactctttataacatggaatcataaagtagtttgaaccttagataaacataaacagaaacaaattaagtttctgaacaaagtttattcaaataaaacgacatagataaataaaaaatagcaagcatagcagttatatcaatccatatccactttagttatcatgatccaactccattttcacataatcataaacttgtccaacttcaaagacatgtctatgttaaaacatgtaaaataaagtcattttgaaatttggtatatactctttatatgatagaatgttacttacaagtatctctgagtgtcaaaatcagtgaaagttggatcaatgtaaagctttgaacaaccattctcactcataaaacagttattacctaaacaaaaacaaaaaaaaaaacaaaatacagtttaattgcattcaaacattgttcacgaatgggaaactctaacaaacttaccattgaactccgagattctccaaaaacgtataacaatgaggactggctcatagttataagtcacataagctattttcttaaactagttcgtgacgaaaaactgacaggagttaccatttacaacacaggttgtaacctttccccttcaaccacaaaatcataagacattttataaataatgatgttttattccaaaaagtgatgtcaaaagacacatatcttgcctcatagttagtctctcggtgacggcatacaaatggaaaccttcgaataggagatacgtttgaaatcacatcaacaacatttgttttaaatcaattagtcctaacttaatatgtttctaaaattacaataatttttgattgaaattacacaaatcaaattacctgtcacataattcttgtcttgatcaatggcatatttgacttcatctcaagggacaaaatcaaggtagttgctacaagatttaggactaataggccacatacttgttagccagatacattgaatttccaaaggacaccaagagtattttgtatgtttagttgatctcattacatagaagtttttcatgttataccaactaccttccttgagtccctcttggaaattgtacatataattttcagtcggtattgttgcatcaatcttattagcctaataagatgtaaactcgaaatagatgaatgatataaagaataaaatcaaaaacaaagttagtaagtgatttaaaaaaaaacaaatgatacatatacaaacattttcatatgtgaggatcattgttgtgggttcatcaaagtggtttggttgatgattcaaaatacacaaaatcttcacgtaaaaaaaaactaggcctttgaatattaagatcagaaatataatcaacagtacccattactacaagaaaacatgtaattagtgacaacagaataaggagcgtaatagtcgataaacccattaagacgacaatttggcgactaaaacacgtactcggcaaaccatgtgtcgctaaattttttagtcgccaaaccgtcgccacttaccgactgatgaataattaagtaatgttgtcactatttagtcgccgatttagcgactgttgggagacattattgccactccatagtgactctttggcgactattttgtgaatgatataatgactatttgccactacatggcgactgtttagttaaagtattggtgcctgaattgaaactatttgatgactgattacatgtttaattatcgatttcacattctattttttggaatcctaattaaaaaaaactgtattaaacaaacaaagaaccttgattcaaacacacaacataaatgaaacatgttcataacataatattcaagctacataatatcaattttttaagttttgataagaaaagtcgtcatgttgtgaacatgtttgaattatgttgcttagacgtcgcatattcttagttagctttagtactttgcatttctcccacatagaagatgcatttaacgaagataacattattttagctcttcctgcaccctggattatgggaagaaattgtctaaaatcaccttaccaccaaaaggcatgttatcatgttttcccagcacacatcatttaaacttctatcaaatgattctaaacaaaccttactcatcattggtgcctcatcccatattataagagaagcttccttcattaaatctccaatatcagtattccgacctattgaagacgtagaggtatcatctggatttaaaggaatagcaaatttggaatgtgctgtccgtccaccgggtaaaagtaatgaagctatctcactcgatgcagcattgagcacgatttttcctttggatctgatagcagctgataatattttacacaaaaattgtcgccagtacctcctaaaccataaacaaagaaaactccacctgattgagaatcaactacacgcattatctcatcaaaaattgatttttactccattttcatcatagtgagccattcgttgtgcttttctatctactcacttatgttatatctcatctcatcaacaatcaatctattcgaattatcaattgtttcccttgttgtataaggaaaggtcttaaggtttgtcaaacaataaccattcataagaagtagtttctcaatctcctgaagattataatttctcttgtcaacttcacacaaagtgaaatctgaaacgtatattaacatgtcctaaaaataagaagcaaatcactgtgaatctaaactaatgattaaaactggtttgtatgaaacatagtacaatcctgggttattaaattcttccctcttcttgttctcaatatcttctgataaaatatgccatgttgcttcccaaacatgttctgctcttgataaagactcagacagtatcatattagcaaacagattctaaagatcatctccaaataaccattggcttgcatcaacgataccatcaatataatttgatcatcgtctaaaatatcacgggccaaacatgcttctttaaatgtttcgtaaaaattctctttgaatgttttgatatcatcagaacatgtaggacctcgtactatgttaagtaatatacgcataaaatattcagcttccatttttcgtgggacgtaatttatacctatctaaagagaatcctcttatacatgtattccattgcttgttcttcccatcccaagtattatgtgctcgtatctcagaataagtgagggtctttgcaaaattgtcatgactattcaaatacaaccaagcagtaaactgataatcttcatttgcttttttttttccaaaacatcttaaatatcttcatcctcatcgaaacaacacgggtgatttccttctttgtggaaagaaagcttatgcaccagtgtatttctaaattgaattgggaatttaaaaatcctctatattgcttctgaaacagatacaaatctgcaaaggattacaaaaacaaagaaattttaatataaaacatccttgttataaattatataacaaattgtttcttgcttatataaatataaacaaacctggaatcaaagtaatccttaatttcattcttctttggcttatcttatttaggaatgttctcagaaactgtatttgaagtttgactcttgtttatacgctcaacaaccacaacaacacgatcaggtcttttattaatatacgtgaataagtatttgatagaacctgtttgattacaccattccacattgatatgagatcgatatcgcaacgataacttcccattgtaaggtacaacatacctattgtcacacttaaatccacacttttcaacaaaatcttatgtctcccgcctcctataaatatttgatggaacctgtttgattacaccactccacattgatatgagcttgatatcctactttagatcaagttagcatgaggcttaggatacatctttaaacacttaccatctaccatacatggagaatttgtaaacgctgcaccgcaagggccgtatatcatcgactctttgatgacctcataaagctctaggttcttttgtttgtcttgtatttcagcacaaattatcctgttaatatcatcagaagattgtagcttactcctagatgccatgaataacagtatatgagcatgtgacaggcctctttttgaaattcaactgtatagatgcatgagaaaaatataatcattacttttcaaaactatttaagatatatatgcatatatattaaacaataaataaatatatagaaaacttacatgcgacagttttccaagaagatgcttttcagtcaaatcaaacataagtgaatcaaggttaatcttgaaaacacgacatataatatctggtctatcatcaggattcaaaccacgttctttacaatacctaataatctatggccacttaggattacacgtaaaaatgatgaatagatctggaaacccgtaatgcttacatatggcaattgcatcataatattgttgtaccatatatcgaggaccaccggtgaatgaggaaggaataatcaaaggtcttccatgttcattcatttttttgtttccagctgcagacgcttctttgatgttactgaatttctcacaacgaatttttgattgattgaatttaatataagacaacctattagcttcaattgtttaatagccatcaaccaagaactgttgaaacaatctcctacacaatagaagagtatggctttcattctccctttcctgaacccgaaaagcaaaccattgtctcatactagtggacttaattttgctggtattgtttttcccagtgtatcctttatgtatcttagttctgaaacaatcttcaccataatagagaatgaaaggatattgtagtggcgaataagaggaatgaatttcgctaatcctttgtagtctgccagttgttttcttttcaacgattatgtcacgagatgacattcctttcacaaaatctccaggaatcactgcagccacttcagatgttgttgggttgtaataattccttccatccttacctatacgatcactaacaatacgcatatggaaagtctcacttgtatgtgagatgatagtttgctccttgtagttgaaacatatttggtcattttactttttgaactgacctatcaactttaccaccaagtgaagtcattgaaaattcttttccgtacggtttgagatttttctgaaaatgtctacttagtcgatcttttcctgtaagtaaccttgttaggcgttccagagactttttcaaaaatggaagtattatagtcccttgcaaacagtagagaaaaacgtcgaatttttagatctccttcttttgttaaaacgctcgtcgtaccacattatagctccacaaaaacgacacttgtatgtcgaatcaccatgatctagataacctaatgataaaaatgttgtactatatacaaatttttatagattttatgtattaaaatattcttgtttaaatacctaaatcatcttttgctgttttaccttttttgtttctctttgtagatagattactgaagtctccacctgtaaatggatcttggttgatagtaggcggttcttcatcagattcagacagagtaagatcttcctcatcattgttattgtataaatacgtttgctcgacatcatctacaatggttttgaaaacaataaattatcacaaaatgaaaaaaatattaatgtttaaattatacttgccttcagaatattatgtctatattgcatcatcaaattcttcctctaagttccgatactttggattacttgatttagatttctcagttgtctttccaagtatttgatcattgttaacagaaactgataataataaaagatggatatattttttttttccaaattaatgtaaatgtttgtcaataaaaatctataaaccaacctttttctgctgctggtgaaatataaattctatcattttccatttgctgagttctaatggttctcattttgcttcagtagtctttgaaaacaaaagaaggagaggtattaattcgtggtggcatggtatgtatttgtgaattgccaatgggaataatattttcagcatctgcatttaatgttaaatacatggatataagaaattgttgatgtctgcacgtcatataaataaacatatataggatgatatattcgcatttatcataatgacctgatttatgcttttatatttctaagtaaatccaataatatctactgctacacaatttaaaatgtgaatataaacggagagaaggatataaaacttttaccacttgagacattttttcctttcgtttttcaggagcagcatcaactacattcatgacaggagagtttagttttcttcctctaacatgtttgttcgtaatgtcttttaatacttaattagcagactttttagtctggatttgctgctttgatcacttgaattctcttggttaattgtccctgaaacaaagaaaaaacaatttatatgttccacattgcatatcccttgcaataagtaaaatattttaagtgtagtcacctttttcgggaaataatgatctctgcctatatcaaaatatgactgactaataggaactgataaaagatttgtatggttttcttcatttttttgtacctgaatataattaggaaagtaagattgaattagtttctacaaaagttttagattagaaatttgaaataagaaccttgtgtcttatataatgaatcttacttgttaaagcttctaatattattgaagttagcaaattatctgatccaagtgctgactttgattgtttcactctgaccggagtaaattcctgaccacctaatttgatctgtaacttggttagaggttgtagtgaagggtttaaaataataaatatatcatttgtatatcatagaaacattattaggaaaatatatttcattctaagtttatgtcatactgattacctatgtctagaggagattcatcaataatttcagaattatgactttgtgataacaaatgtggtatacaatatccattacgatttggtgtaaagtatgattttgaacgatctggcatctataaagatataaccattaagttaagttttggaaaattaatcatcaattaagatatgaaatacttaataaactatttacaaaaatatggatgatctaatatggttttttacacctagctgagattgtaaaaggctgatttatgatggacaatgtgattcttctattacaacaagagttaaatttgtaagatctgcaaatactctatcgtaattagactttataggaacacattgcttagcatttgatgcattatgttgtgtaacattctattacaatctagaaatgggagtggaacagttcctctttgcaggatgaaatgaatttgtgttgctatttttaccaaattccatttttttcttcattattctagaaaaacacactactattacgaattgaaagttctgagaaactaaatgatactgctaaagtatattatgtagatttgtataggaaataataattatagcttttggcagttattctgttttgatttgtgtgtatcttaattgatcttttgaaaagatcttttgtgtatattaagctatcataagaatgtgaatatcatgtaaaataaaagtttgaggctttacaaaaagagtttaacctaaagattgtatccatgccaaaaagaataaaaaaacattggttacaaagacttgttgagtgtcaatcaacttgttagcagatcgatatagttatctcacaaatttaacttgtggttaaggaacatttaagatgatatataaacatcttctcaagaatcgatgtgccattagttggaacaaccttctcccactactctcggacaccacctttgaagcagcacaattgttcttaccccggtacgtttccaagcttcgattcactgcatatggagagagtggaatgctcgttcccatggagacacgcccacatcgtcacctagactaatcaaactccttggaaaaaaagtttgcatcggtatactacaagaaaacagctaagttactttttggcaggacaagaaaacaactaacttattttcttgcaggacaagaaaacagctagatggcgactacatatgaagtcattaatcagtcacaaaacccctatttgcgactactttgtgagtaaaacatgtatttgctaaacatcgtgttaaaataatcactcacataacagcctaatgtgcgaccgatttaagtggtcactatttggcgcaatatcgtcgctaagtatagcgactgttatgcaacatctttgccactacatgacaaaaaaattatgaacgttttggtgactgaattgctactactttgtgactgattagaggtttaattctcgatttagcctgcaattaattcttgatttaattctagataaattgattgtaatttttaatttattatcgacagacttgttaacacataagaaatttgtttttaaaatacaaacaacaaaccacacattcttgttcaattcaaaaccaaaaaccattcatgttcaaaacgaacaaacattcttattcaaaccaacacacgttttcaagttcagagaaggataaaaaattaaaggaccaatgtttggacatcagcaatagcgggatcaatagtttgagactaagggaaggctagaatgtttgggtcggttacgctcaagtacttcttcatgatcatcaagtgctcacctgctcagatgcaatctgcaaagcctctgcttcacgttctgcttgtaaagttttttgttcctttattttgtagttagcttcttcaagctgtgtttgcaggcttgtgaaagaagaagagcctcccgagtatttccgcttctagttggtgtaacatcctaatcttctaaaattaaatattctcctatgtcgtttgggacagtagactgcataaacaaaataaagagtattagttcttaccatttttcaaaacgataatatatgaaaatgcaaacacaaagaagcacattacttgaaaaagatctcgtcatccttttcttgagatagctctgatcgaggcgaagtatcaccggcagactcgtcattctcaagacaaccaacttagctgcctcgttctacttatataacttatgaacttcctgtaatatgacccatgaaactttttgtaaaaacctttgtaatcttcaggtaagtttaaacttgttcttatcaaacctacaaacacaaaataaaaaaaaggcatgcaattagaaacatataataaaagaacaatgaatgtattcctcgtaattactagtagctaaatggagaattagacaataaaagagaattttcaaagattgaaaaaaaatcacaattttaagactataaaggttcaatcaaactacaaaggatcttgagacatagattttaattgtacacatatttaaaatttaatcacaatctataagattcaatcaatgagattcaatcaaaccacattttaaatcaagacaaagattcctacaaaatctatcttcttaattcctatatagagatttcctgataatctatattatctatcttcctagttcgtacacaaacattcctagcatctacacaatctataagatgttaagagaagatacttaccaagtggttccaggctccaatatgggagtgctcctcgccgactataaatccttggaggtgaatagtctttgtaagtagggatcgttggaggatggccgattgggacatgatttcgatgagactctagatatggggcttgagggttcaccgacgtgaatgtgtagttcctaggaagactggtgagtctttgattcaaagtctgtgaatcacctggagcaatgggtcaatttgaggtgtgataacccttcttcctcctcctcctctcttccttcttccacaaaaaaaaatatgaatatctattagggttcaattcgatgaagattggagagagataaaagagatcgtaatggaattgagaggattagggcttgttaggagaggattagaatttgttgcgaaagagtcagtgattttataatatggctgttaagctatcgtaaatggttcaagtctacaaaatcccaactaaaaggccctaatgaaataacatagtcgctaaacaatagctaatagtcacctaatttggtgtctatatgtttagtagctacttagtcacctaatttggcgactatactacgactatttatattagtctcaaactactgacatattagtgactatattgtctttttggtggaatgagggagacagtgtttcccgttttattaagaaaaattaaaattacattcgaacaagtcttgggcacgaagtcccactagtatcttctagcctaaccgaatcaacaacatccggactagagtgaaaaaaatgaaaccctaatggtaaagtaaaagcatagttcgctaatccatccgcaaggcgattagcttccctgtacacatgcgagatacggactatccagtccttcgagataaagccatagcataaccgcgctaggaatgataatgggtgagaatctccaataccggtcttgagaaacccaaccacaatctccgaatccacttccaactccactcttgtcacccatttctcccaagcaatgtagagcccataatacacgccccacaattcagcttgaggtgcagaacatataccaatactcaccgaaaagccaccgcaccaattaccctgatgttcccttatgaccccccccccccccccccgcccgcagctgctagacccgatttccgcgagacgccccatccgtgttcagccatccctcacctggcggtctccaagcgatcaacctttccaccctctctactctcctcgttgacccacttaggctaccttgcgcaacggtgtaatctctcgccaatcttctaacaaagctcactctatctcgagatttcttgttttcaccaaagacattcgcacaccgccatttccatccccaccatagtgttgcagcaaacaaaattggccattgtatgtcatttatcatccgcttactcttgttgttgctatatatccactcgagcagagtttgtgtaaagaacacattagtgagtatattgttttagtcaccattcaactgctaaagagtcgcaatccagtcacaacatttagcaactgctttatcagttgcatcatgcagtcactaattccctcttttcttatatatttcctccattagtgaccttcatggacgcaagtatgatggatccactcaagtatggtttgcattaaaaatttcctctaatccttttcactggctttcgattcggggaaaaactagactaatccgtataggagaagtttaagtggaagaggtcgccagtgcggagggctttggcttatgtagatcaaaaatgatgcaaaaactcaaatggatgcaacactggatgtataagcagttttgtttttgggattttggataattttacattcaattcaaaaaaggttaattatgagcaaaaaaaaataaaaactcgtttctcatttattgtatatgacaacctttttaaaaaatgaataaagttgacgtaaattacacaaataaaacaataaaaactaaaaaaaaagatgaaaaatatttagtattgtttattattacatagacatttaaagttattaagcaaaattaaggtaggcacaataacatttagtgaagtcacatgaatatttactatttatagcacaagaaaaaaatttggtatagaaacgcccttcagattacttaattctttgaaaaagaggtgttgggttaataaggacaccattttcaacagtcttggatagtattcattttcatgtcgtgatagtctgtgcagacaaaatgatttccttgtggtttgcatggtggttttcctgtcttttctcatgtgataggatttgtcaataccttgtcggctttgaataaactgcctatatataaaaagagaatcaataattttaaactactatagagaattttggtaactaagatcagaaaaatgtaaagtatatgacatacattcatgaaaattagtgagtgaaataaggatgatacaaaatacagcaattttggatgacgacattgtaatttttctctttgaaaaaacgttttcttgttttatggtaacaaaaccttacatgtaaagtaaacatatatgtaaatgtctccaactatttttgtagggaaatcctagaaaaactgtttttaaaaaaaattagtttggctagctttatttcctttatattctaaaaattgatgtttaagcgttaattactcatttgaacaaaaaataaaagagagtaaattacttgtttttgaggatttccaaatgatcaatatttaaaacttatactaacaatttttttcttttagttattgatttagatttacggtcgttatatttagttatgtaaatactattattgagttataagaagaggaacatgttcaaaatccaagcttcattcgagaaaaagacagatgcaataagtaagattgctctctcgtaaaattttataacaagaactttacacaaatacattatcgcataacataagagtgttttagatgcttaagtgaattagaaatagtccaatcatattacaaaacacatatcatctttgaagaacgtaatacatgtttcaagagtacatgaatcaatattaaaatcatacaccgaatagttattctctttgtaaccaaatcaaacaatcaatataattataagtctcatcaattattcacaaaagataataatactaagctacataagctgatttgtcaaacttactattctgatatttagaactctaagttccaaattagttttcgagaccactcgtaaaagcaaaaaaaaaaacaaatttggagtacaagaaaatgtgcaaattgtagaacccaaatgtcttactttattgacatcgagatatatttggtcggacttgcaatcaagaccaacacatagcataagtgtaacaacccgccccaatctgcagatcaattggtaacagcttgtcctctgggaaggttgttaaagggtgaggtcttgggttcgagaaacgccaagcgcaccaataacctacatgtgggctttggtggcccaaggagagaggttagggtcgatgcgctgcagagccaacaggatgccatgtggcagagagtggccacgtgtgcgagtcccacgggacgggttgttacaataaggaactataaattttatgaacaactgaaatctggaaattctttttggattctgattggaaataaaatatgacctaaaatgttcttgaaatgatgatatatgtgtcaaaaaattgagttcattagttttgattagatgattaataatacttctttttgtcgttatcgttgaacttctctcttcctttcgtttatgattttatatcaaaaaatgataacaaactttgtaattattgaatagagccctcaatagcactaaacatctcctcaaaggtaacaagtttctttgaacccagcctaaccgatccgaccttattacttttatcctctaatagcctgatttatctatatctaatccggaagtatgttttcttcttagacgcaagtataaaggattatttcaagtatagtttgcatcacgaagtacataaacattattttcttctaattcttttcaaaaatttaaatagatgaagcacatgatgtaaaaacaattgatattttaattggattttgaataaaactttcatttcattccaaagaagttaattatgagcaaaatatttttcaaaaaatcatttctcatatattatgtatgacaactttaaaaaataaataaggttaacgtgaataatacaaataaaatataaaataataaagagttaaaaaaatatttagtattgcatattacatagacatttaaagttattaaccaaaattaaggtaatcacaattatttgtagtgaagtcacatgaatatttactatttatctgataaagaaaaaaatagtttataaatgctcttcaaatttcttaaatctttaaagaggaggtgttgggttaataggttgtgcggcagttcttccgacagccttcaatggtatacattaccaattcttgagaatatgttcggacaaatttatctctttgtggtttgcatggtgcttttcctatctttcttcatgcgataggattggtcaatggcttgtcctctttgaaaaaattgcctatatataacaagagaaataaatgattttaaaatactatagagaatattagtaactaatgatgtttagtgatgggaaaccgtaaactatatgacatacattcatcaagattagcgagtgaaatgaggatgatacagaccgcaattttggatgacgacattgtaacctttttctttggagaaacgttgtattgttatatggtagaaaaccttacatatgtatctctccagcttatgttttgcatatgtatagtctgtatatcccaaatgtcttactcaattcctttgaaatcaacctgacacgaaccgaaccttttacttatccaatcatggatgttcgggttccaaaagaacgtgaaaaaactatgtgtctctgtctataacatctaagagacataaaaataataggtttatcatactagacctagataaaatattaaatgatgaaaaaagagtattaactgatgtctactgctcttttctaccgctttattttattgagatcgagagatgtcaaaaggttatcaagatttttttgtgtatgttcattagataattcaaaagagagtaacccgttccttgaggcatatggacccatgcttgacaactatccagaacaaaaagagcggtagatgatcatgccgcatcaacagcgtgaatgcaattgagtgcctcttgaattccgccagcaccgtgttcaagatcaataacaatgaagtcatatatgaacaaacattatagtcatttatatatattgtttgtagaagatatagtttgaaaatttaacaaataaggcaactgatgataacgtttgcaattactaaattaaatgtatatgaagaagtaataaataaaattattcaaaaataactgcgaaatttatttcaaaccaaaatatgaaagtgtagaaagaagtcatacaaaacaataaataattgaagcctaaagaaaaaaattcttcaaaatgaaataaaatgttatgaacaacatagtatattaaactcctccaagaaacaccttttagattattttgaaaccaaatcctcttccacgattccaacacttcctttgacaatattatctccaatgctcggaatgcataactttttggatgacgatgattgactttcaagaggatcatcttctttgtccttacgcttggatgacgtagttatcgaatgagtagccaaagattcgactctctcactactattacttaacagtagggtatcttacgaagaagacatttgatttaactaaaaactcacacgaaatataaataaaatatataaaaatcaataaaatataacctgatcaactaaaacaatagtctgaagatcgtcaagaacattagaatcaccaatagtgtcactttgtaaaggctcacgactaacccaagcgtatgcaactttgtatgtgtcattaccatcgttgatgttatctttttcaattaacaccacaaactagaatgtttcttatcaaattcaccaagggttgtggtagaatagtaggatcttttatctatgatcagcacattcatattaaattcacaaacactgcatataataatgaagtaaacaatagatagcttataaaagttacctcatcatattctccgttcaagagatcataagcagagcaagagacaatcttctttgcatcggattcaaagagcatcaatttagttgaacaattgaatccatgacttagacaataagcttgtacctaaattaaaattacatatgttcacaaaaactgtaaaaactcttcatactgtaataaaattatgtataagtaaacataccttgggattgctatgtttgtagtttctttacatgtaccatacaccaataaaatggtttatttcccttattatcaacctcgattacaaactttggaactatgaaggcagtgttcttacacttcatacacatgaagtaataccacgaaaagtctttttcaatgggaaaaatagtgcccattatttttaacttcccaacctaaaaacaaattataaggaatcaaatcttatggtttgcatgcatgataccaagtacaaaatttgtagataaaaaatctcagttgactagataaggtctctgatggtacatactcgaagactgttatacaattcaaccttgttttcaacatgatgttgcttaagaacatggacttgcagtgttaaaaacagtccatcttgtggtagactacacaaaatttagggtaaaattaaacacataaattggactaaaatttcaattataaaatagttttgaatggacaataaaagttactcaacaacataactctcgaacttaaggatgatctggatcgatttgcaacaatgacatatcaaaagcactagagacagatctctgtcctgtaaacttaatttcagtttaataatatgtattacataatgcaaacaattttcatattgtatatgttacctttaaattcattcatctttgcgaacaaagcaaacatatagcctttttagtcccaatgttttcgcaagtagcaattagtgtttcataaaatctctcccacaaagtacaggccaacctcacatctctacataatgtatgaaatatataagacataacgagttgtgtgtcacactcgtcaccctcaacattgagactgcgtgctttcaccttacttatatttttcctctattctactttcttaattcaaatataaacttttcttaaaaatataaacttttcttaaaaagaatcttaaatcattgaaaactctgtaataaatcgtatcataaaataacaaatagagaaaataaaccgcgattcccaaaatacaccataagcgagacggacttgagcgactacacacgattctcaccgtgacctggggaaaaagggaaaaaggggtgagtaaagaattactcagtgagaggatcctttccgcccattggaaatacgatacacgattctagctttaaaccacaatcaacaatcacatagaaaatagacacaacactcatatagtctgaatcactatgcaaaactataacacacaactcattcttgcttaagcaagatctccacatcatttccaggttcaatcatctccctgacctttgaacctatctagttccactagactcgtcagtcttttattgagctacaaagaacccgtcaattcaatgtaaaccattttccacttttccactgttacacttttcatcatctcaaaagatggtgattccaatttctcatataacacatataattacttgttatcacaagtacaataattcaatcatcatatattagtagaacaatcatcatatcatcaatcctaaataacaatttattattactaagcaaacaaatctattcctatgcaatgaatcatgaagcataaaaataaaaacttgtaatcgaatttccgcagatcacaccctcaccttagcaactcggaatgagacgcaaactgggagaaaaaggttgaagatgcctagacaatatctgaaacttgcagcagaagaaaacagcacaaagacaaattagggtttctgcagttttggtaaaacatgtgattcttgtccaacaagcaatcgacgtggcagctagggtataccttttcaagtgacgacgaagggtcccatggcttctctaacacttcctctatcggatacaaccgtcttttggtctatctatgcttaggagtgaccggaaatgcctccttaaaaccctaagacgcaactgtttcagatacttggaaaaatatggctctgaaaaactgtgactaatcatcaactttaaatgcgattttccgatcgatcttacctctgattttggatctgaaaactgttatgaaaacttgggaacgagatctactcagaaccgttaagaactcgccaaactccttcggacgtgacgggaaacggatcaccaattccaccacttgaattgtttccttctttcacatattcacacaaaaacccaatagttgaagttatgatccatgaattcaattgctaagtgaaacaatttcagtagtatagttcataactatgataggttttccttacctaacaatccggcgatgaacggtgacgaaaccaaccacgtagaacacttacgaccacaacgtgacgtcaactccggcgttacaacgatgatgatgatggctgggattgagatgtgagataaggaagtgatggtgatgaagaagacgtgagaagaagctgtgtggagagggagatatatacatattatcatacacacgcttagggtttttctattagagaagttgggctgttattgggcctcattagagagttgggtctcacaattctctcccacttaaagagaattcgtccccgagttcaatactttttgttcgactatattttccattcatacctttagaaaagttttgtttatttcaaacacagtttttaagggatatccaataaggatgctttgttgctctgaatttttttattgctttagacatggtaaaattctcaattacgatacattttctagtgacaatgtctcttcgaaactttatggcatgtgccgttttaagcgtcgcagtaattaaaatttcctgattttttttttaaaaaaaagttaatctatatcaaaatattcaaaatatttcttcatatgataattaatatgataactaaaactctcaaaggtgtctcccaaaatcatctcaactgtctcgcctgaatattgtgtgtattgtttccaagtgtgaacaatttttacttgaatcttcgaggttgtcttgaatggcttgatagtattgaggctagtgaaaggcgaagtagcgttaagagctattattatgaatgtaagttttgctaatttctaaagcttttattaagttatggtgtgaaattcatttcttatacgaagcatatatttatattgtttagtattaggtcaaagattaggatcaatttgaagcatattccaaaattatgattttgcgaataaggttagttactaaaagacaatgcataattgtaatcaaatcttgccgagtttgacatttaagaataatatgttcatcaagttcgtaatatattcaatcacacaaatttaatgagaacggtttggttgtcatatagtaaatatagttgtcatattttgtagatagtaatgtatagtttagagaatattgagttgctttattagtaggaatgaattgcgcggatattactcgttttaaactcgatttattaagccaactagagggttgtttagattgtggttaatgttattaaaactgacgaatatttccatatatagttcaattgaaatcgaattgaaattaaaagatcagatttgataaattacttgtaaatcaatttaaattgaagcttaattttaaaactaatccgacctgttttctaaatgtacttctcttttaatagcatagaggttaaacaatttacgaatttagctgacaagaacttattggtttttatacttttcattcactaatctcattacatatatatatctaaaaaactttgctggtattcaatatgtctctctcactgtttggactaaattaaccataaccatgattccctattctacttaacataatactaacaacgaagcccatttatacatgggcttaaattacttatgcccaatgatcttttagatttttatttttttgctaaaatggaaatatttcattgaaaataaagaaagaatacaataaaaaaaaagattataaatctaaatctcatgacaaaagatgataagaacatgaaagcataatttaaaatccttaaatttcagtccattaactcaacataagcaacaaagcgaatggagttaatgaagtgattacgactctgaagtcactagactttaaagcaccatttttatcatcctgttgaaggtaaattcaatctaaacttgtaatgtaatggtttgaaatctatttggctcctcactcagtaacacaaattagcgatctattttgttacacattttaaaacatttacgcgtcattaggtgtctataaaaagtatgattccgtctaaaataggtaaaatcaaatttaacaactgaaaatgatcatttgtataaattgttatattttatgtctatatataaaacacttcacctttttcgttcatcttttactaatcaatttctcatccataaatacattattttggaataatcgtaaacattaaaatttattaaacacatattttcactaattgttttaatcaacaattgtttttacgtacaatgtgagttaatctagaagaattgtgcgtgcaaatagaaaaaaaaaactcaaagaagacataatggagacgatggaaaaagccggctagtgatcacatcaatgcatgttgctatcagtctacagatcgtaccataaggacacaatattggtttggaatccttaagcccacgagggggcaacgtgaatttggggctaacactcacctttttcctcttttgttctttttctcattcattatacacctatccattccatatatatagatgataaattgtaccagaaaaaaatgaattgaaaattcaaaattatactatctttagtattaaattattgttcagaaatggttattaatcggccaaatcttagttcaaaactcaaaacaatactatttttactattagatcattgttttgtgattgattaaccatcttatcacatgcaacaattcatgttatcaatcaaacaatacatcatcatgaacaaacataattagatttgagaattttgttatatttttggtatgttgcattaaaatgtaaccccacatgagagtgtcgatgtggggaggcaaaaagcacaccacatggtagtccactggtgtacatgaagaagttgtctcagtatatgcgattgttgagtttgagtttatgaataacaaagtgattataacaattattttttattttttatgtaatgtgtacttcagtttttaatgcttatgcatattcaattaagattagtttttaggttttctataattttcaagtttttttaataaataaaaaacaacacttaataaatgagttttcgtaaggcttttaaatttatttattttgtaatcctttttcagtagatacactgtattaaaatcttattttgttttagaagacttatggggatgtattggattttacattttgaacgatttgagttttagtcagtttttcggagattcaaactaatcgtatatataacctttcgttgagtttagtttttctaaaaacaacaatacatcgcgaacctatcttagaagttttcactattttgtcagttgggattcagttatttggtttcttaatccaattaagttctattttggatgacatgatggttgacgacatctaccatttcgttggcgaaagtccatacgttgagaagacgatcatgaaatctacattatatatcaagtaaatgtagggtaaaatttgacaattattcattattttatttatattttagattttaatattttatcaattaagattatatttttgagctttcatgtttttttattaattaatagctttacttgtgttattttgaaaattagtaaacgagctttgcaaagatttttgatattttttcagtagaattagcaagatctcaacgagtttaaggaattttggtttatttcggaattctaagattaacaaataaccatgcaatggtcatattttttatattccaaaagtgaacaaatcactagctagtagatattcgttcctactacgtggttatgcataatggtaatggacaattaaatcctcaaatgtctttgtttataagaccagactttaaacttgaaatgcacattgaaacaaccaatcgagtgagagcaaacaatgcaggagaatatacagaaagttgccgtagcgaatgattttggagaaatagaaactataaactttttctttggattaaatttcattgctactattaccaagcatgaaaagatttacctccggatatatcaaacttttaagaaaaatttctttgggaatcataagtcatttgtgttgggatcaaacaaacagcattaatcctataactatccatatgaattcaaatttaacccaaattttttgggaaattgattagtttaagagtaatatgacttaacataactagcagacgacattcataaagccattagtgtaatgtatctatccaaccccatgaacatgacttgtcatattaaaatagattttcaatatttgatagaaaccagaggttatatggatgtaagcctaaaagaaaaagtggtgatgcaactataattgactcatcatttcagattattattttcctcatttgatagaaccattgttgatatggatgagagctaagagatgagaggatataatatattcgtatcctttcaagtaatatatatacaaacatatctataaatatagaatatttgaaactgaagcaaaggagaagatgatggagaaagaaacaacagccaagacaagcacttggacatggaaaaaaaaaacaaaagaaaatgtaatggggaccttcacacatgggtgttagaaagacaagtatatagtggagccaacgccaaagctcatcttaagaatcttttctagcaaaatgttggttgcaacctcatcttccctacgtaccttttcttcttcttaatttcaacattgacaatcttttgtttcaatcatttttttctatatatatgaaaaagatttgcatatgtttttatatatattcgagggatcgaataccgtataaatgtatgactaaagactataaatttcgttagtttagctcacaaaaaaaaagactataatttggttagtaggttttaacagacaaaaaagtttgggtagttgcaaaacattgtgctgcatgagcaatgcatgtgatattattgattgaatttgtaccatattatatttggtacatgatcattttttgtatggtgcatccatcaaatcaaaattttaattataaagagatataataaccaaatctactattattcttcttttctttgtaaggtataacaaacaattttcatattataataattacgaacattctagtgtttacatcagtataattattgtatgtatttttatttcttctttgagttaagcaaaaatgtgctgatttcagaagtattaaaattttcagtgtgataaactaataattaatgaaataaagtagtgtgctgatgtacatatccttaacttataatatatagtatatatatatatatatatacaataaatttcgttatcattcgaaaaatccattaccattttattgttgccagcttgttatacagcaaaatatataaataatttattgtttgttcaaaagaatatattaaataattttaaaaactttaataataattgtagttgaaacccacagattcgttatggcccattattgtccatgcaaccgcagccaccacacggatggctaaagtcaccatataatttggtttcctttaatagaccgtatcttatattataattaaatttttaaatatggatcatatagtatattttgaaacccttttttcttagacaaaaatattattgacacccatgtgtcacattataggatcaatggttagccatttcgctaggtttggactttttgcttacaacgaaatgttgtgccaatttagtctttcaactttgccttttgtttcatttgataagacttttaccacattactaaaacttgtttagccacgtaaaatattcctcctactctaagtaattaaccgtaggatctgtggagtcaaagattttgagatgactatgtagtatttaatgatcagtttggaagaatctatcaaggaaataaaaagacaaatattatattacatcaaaataccaaagtagatttcccgaatctactacagttaggtattaagctgtaaatatatttttcttttttgcatcaatcaaaccataccatatatgttggaatcttggtccatgatttttttcattttttgtcttcagaatttggtcatatattcatatatggattcaaatggtgtaggaagaagtgaaatacggtctacattttattaccatttaccaaacattatggtttatgtgtataagtataacgttctaaaattagttgtcaccattcgaacggtgttagactcatatgcgtcaccgtgaccaggagatttggtgtgtgctagtcattgtgatttaaaatgttctcgagccttgtaattttcgagttcaagattgacttgaaaagtagataccaaatttcacatggaagcaaaattattatatactaatttcacatgaagcgtatgtcacaataccatcaatctgttcccacttgtctcgttatgataaattatgatattgtaaataaaagaaaattcttttaaacagtagttttgttttatagtcggaagatctcaaacaacttgatcaaacttgcaactgcttgtatctgaattctgcaatggttaaagaaaaatatgtctagcaaaaattgaactctttcctagacttaaaataatttgctatgccttcggttggttaaaatctagtgataaggcaataatttgttttattatgtcaaatgtgttaatactattttgttgttttaagccaattcattcaaatccacgctaagtggcatttgttttatttattttttactggatgaacatttgcattaggtgtggattttacgttaatagtattcttttgtcatattgctttctatttgtatgagagtttagtagctatcaaacatgtttatatataaacttacaataaaatagcgaaattaattgaatttgtacagtaattcaaattttaaatgttatttaagtaggcatgtcttgagccataccaattaaactctacagtgaggataccactacaagtgtgactaatagtattttatagaagaaaactaaaaaataataatcataccggaatttctataagtttgttcggttttggtttatgcctatacctgcttggaaactttttttttaattagtaaccagtttggtattaaattttcgtattttctccaatgtttccaatttttaatacaaaccaaacttctgaaccgtatcaaattttacaaaattttcaaaactgtttgaattatgtcgtaatgtagacaaatgtaccaaagctattgaaaaactggaatttagtctcacataaacaaaacaaaactaaatgtaatttcgattttaattttggaaccaataaatttaggataatattactagatgaccaaattatgaagggaaattaaagatagaaaaaaaaaactatggctcagtttgtttaggtaaatgatttttttttttgtggtgggtaaatgaaaaaatatctccaaaatttttcttttcttacatttcgcttttttttttccaacctcttacaacaagtactaaccaaaattcaatttgagctttcacatggagtaacgtggaatctagagttagtagttagtactttgaaaatattttgatatatggcgaaacaaaataggcaatgggctactcactactagtgttggtagtacacattctacagaaagatggagtaaaggtaaatagaatcgatcagcaaatatgaaatgaaacctttcgcttttttgaccttttcagttttttgacatctagttcaaaaatggctaaacattgcatttattgaacctcgcatttcggttcgacattagaattgagttacaacattactgatcaaactttctgaatatttacatatatgccactattattaaagtaagtttttattctatctattttttttttacaaaaagatagtaaagaaaactgaaaaacgaatatgatggcaaattcaaactgtttttttctaactttaacgcctcgtactgtctttgagtatgtgtaaatagaatggttgaacaaaatcccaaataaataaattccttttaaaaaaggattattatatagaatgggatttcaataaaataaaaaataaaaagcgttttgaacaatgcctataaaagattgagatagttagtcctatacaaggcctataaaagcttgagatagacaaccatgtccatttttacgttctataaaacttattttctttttaacggtcgataactttactaatcatttatctttaagtttaaaacaattttgctttaacgtttaaactatatcgaattcggaataactctattaactaaatgttaactattattaacaatgcgtttcattcatcaaaatcaattcaagtttggaggtattttcatttaatgagataattatatttttttggtcattcctttagttaaagtttttttttctataaacatatattcaatattgtactaattattattaatagatctcattcggaaaaaatgttaattaatacaccaattttcaaaaagtggtcatttaaaccataaactccatatatggccaaataaaacttagtaaaagcgttgaccggccattttatacatctcaaaacgttgaccaagccaaaaaccctgcgacgttagcagtcgttaacagagtcgataacaggcgttagcaggcgttaattaatccgtttaaacacaaaacgacgtcgttttgtgtttaatcgaaaccaacaaaattcccaattcgattctcaatccctaaaatccccaattccaattctcatgccctaaaattcccaaattcgaaaaatcttcaaatcgtcttcccaaatgacgaaaattaggatgggaggcgtgatatctacgattggatcaggggaatcagagagtgttgtggatcgtggagttgaagtggcagtcgaattagagagtgtcgtcggagacggagttgaagttccaccggttgaagctccagtcggaatagagcttgttgccagaggagaagattgtgttccaagccggcatcgaaaacgaagaaagataagagtgggggacgaagacgaggctgaaattgatcccgaccccgactacgaagatgattgcgcagttcatggtgatgaagactgtgatgcttatactgatgcagtaggtggtgacgatgatgcaaccggcggtgaaggtaatgatgatgaagcagtaggtggtggtgatgatgcaaccggttgtggaggtaacgatgatgaagctttaggttatgatgatgatgcaacaagcgatggaggtaacgatgatgatgacggaggtgttgaagaagatgctaacctcaaccttgcagaagaattcccagagtttgcgggagtagaagaagattgtagtgatgatgatccaccggatgatgtatgggaggaagataaaattcccgatccgttttcatctgatgacgaagatgagagcagaaccagagaagtacatggtcatagagatgctgcgaatgaagaggttttgctagaattgaagaaaacttacaacactcccgatgacttcaagcttgcagtcttgaggtactcattgaagacaaggtacgacattaaactgtttagatcagaagctaggattgttgctgcaaagtgtagctatgttgataaggatggtgttcaatgtccgtggaaagtgtattgttcatatgagaagactatgcataagatgcaaataagaacttatgtgaataaccatatatgtgtgaggtctgggcattcgaagatgttgaagcggtcttccattgcttatttgtttgaggaaaggttgcgagtgaatccaaagcttacaaaatatgagatggctgctgagatattgagggaatacaacttggaagtgactccggaccaatgtgctaaagcaaagacgaaagtggtgaaagcaagaaatgctagccatgaagcccattttgcaagagtctgggattaccaagcagaggtaataaagcagaatccatggactgagtttgagatagagacaactgcaggggctgtcattggagccaaacagaggttttttggttatacatttgttttaaggctcaaaaggattcatggataaaaacgtgtagacctttcataggacttgatggagcttttctgaaatgggatattaaaggccatcttctagctgcagttggaagagatggagataacaagattgttcctattgcttgggctgtcgttgagatagaaaatgatgacaactgggactggttcttaagacatctatctgcaagtttggggctttgtcaaatggctaatatagctatcctctctgataaacaatctgttagtttttttaactttgtgtctttgttaaattggtttgttgttttgtttactgatttttggtcatgttttatgtcatattgcaggggctagtcaaagctatccatacaatacttccacatgctgagcatcgacaatgttcaaaacacatcatggataattggaaaagggacagccatgatttagagctccagcgtctgttttggaagatagcacgaagctacacggttgaggagtttaataatcatatgatggagctacagcagtacaatcgtcaagcttatgaatctctgcagcttactagtccagtgacatggtcaagagcatttttcagaataggtacatgttgcaatgacaacctcaataatttgagtgagtcttttaataggactattaggcaggcaaggagaaagccaatattggatatgctggaggatatccggaggcaatgcatggtcagaagtgcaaagagattcctaattgctgaaaaattgcagacaaggttcacaaagagagctcatgaagagattgaaaaaatgattgttgggcttagacagtgcgagagatacatggccagagaaaacttgcatgagatatatgtgaataatgttagctattttgttgatatggagcagaaaacttgtgattgcaggaagtgtcagatggttgggatcccttgtattcatgcgacttgtgtgataatcggaaaaaaagaaaaggtggaagactacgtgagtgactattacacaaaggtaaggtggcgagaaacttacttgaaaggtataaggcctgtccaagggatgcctttatggtgtaggacgaataggttgcctgtattaccaccaccatggagaagaggcaatgctgggaggccaagtaactatgctaggaggaaaggtagaaatgaagctgcagctccttcaaatccaaacaagatgtctcgggaaaagagaatcatgacatgctctaactgccatcaagaagggcacaacaagcaaaggtgcaacattccaactgtcttgaatccaacaaagagaccaagaggtcgtcctaggaaaaatcaggtttgtgactctcatttatgactctcctttttaacaatccaacattcatttatgactctcctttttaacaatccaacatgtgtttctgactctcttttttaatttaagaaccagaagtgtttggatctcaatcttatcttggatcacaagagcaatcacaatcttatcttggatcacaagagcaaccacaatctcatcaaggatcacaggctgatcttgaatcacaaggaccaagtgctgcaggtcgtggtcttggatcacaaggaccaagtgctgcaggtcgtggtcttggatcacaaggaccaagtgctgcaggtcgtggtcttggatcacaaggaccaagtgctgcaggtcgtggtcttggatcacaagaaccaagtgctgcaggtcgtggtcgcggagcacaaggaccaagtgctgcaggtcgtggtcgcgtagcacaaggaccaagggctgcaggtcgtggtcgcggagcacaaggacaaagggctgcaggtcgtggttgtggagcacaaggacaaacagcatcaggtggtggtcgtggagcacaaagacaagcaggtggaccatcacaaggaccgcaaccttatagaagacatggttcagcacaagcagaagcagaaccacaaggacttcgtcgatttgaatcatggtttgagtgttcagacaatcttagtcacaagtttctttttgttattgtctgcagcttagtcataagtttctttttggtggttgaacttgtctttatgacttagcttagtatcgatttcattttgttgttttgacttgtcttggctttgtgacattagtgttataatgtatgaatcgtttttaatgtatgaactttgtttaggattattaatcattgtgaaacaaaacaagaattgcattaccaatcatggtttcattacaaacttagataaaagccatctaaccaaacacaaacattagtaaccaagaacaaaacaagcattgcattaccatagtaccatttcattacaaacttagataaaagccatctaaccaaacacaaacactagtaaccaaacacacatcactagtaaacacaaaccatctaaccaaacacaaacgctagtaacctctcttcaatttcctcatttttggtcttgtagaacattatgatcacaattgcaatgaaaattatacaaaggcacaccaagcacactttggtcatcgatttccatctcttcaattctcttttgctccacatttcatcttctttcaattcttggatcaaaccctttaattcagcaatctcgagcaacctccgatttggcattgtttacctcgctgtcaatgatagagattctcggtattgcatctacaacctcttcatacacacaatcttcaacccatttaaacaaatggtcctgtaattccatcgacaattatttacttatgaccaaaaacaataaaacaaaatcaaatctacttacatcttgataggttggacatcgaaagtaaggtcttcccggattcttcttcgagcttgatgtatagatgacgacatctctaccacaacgacactttgaaggaaacccacggttcccacttccttcttccccaacactcgagatttctaaactcatatctgcagaaaatggctatgaaattggagttttcgagttcaaacgaacaaaaatggagaggcttttgaagattttcgaatttgggaattttagggcatgagaattgaaattggggattttagggattgagaatcgaattgggaattttgttggtttcgattaaacacaaaacgacgtcgttttgtgtttaaacggattaattaacgcctgttatcgactctgttaacgactgctaacgtcgcagggtttttgggcggatcaacgtttttgaatgtataaaatggccggtcaacgcttttactaagttttatttgaccatatatggaattcatggtttaaatggccactttttgaaagttggtgtattaaacaacatttttcccgatcgcattctatatttttaaaacaatttttaagtcacatattttaaaatgattagcaccagtcgacaaaacagaaatcaatcaaacgtgagaaagattaattgaatagaaaagaatgtagacagtttataatccgagcaactcattggataaagcaaaccacaacaaaacattgttgtcattgtaataaaccttagtccggtcttacctcctattagactataaccaaacaagagtaaccagtagacttaggcaagagagaagaaagtccgtgaaggataagagagagaaaacgagagaggagacaaataggtcaacttcagagaataaagacatgggtacgtggacactagtagccacacgtgcactcaatcatcacagttatacatgcatatatgtataatatatgcttttatatttataatatatggtttttatattggtattataaaagaaactcaaattctcctctcaccggaagccgacgagtacttgaggacaaaccaactgacattctttaatctctttctatgggttccactctcttgcccttttgttactctattcaattactccttccaaccacataagcatttaccattaattctgaaaattatacaaattaaagggtatagggatttaaaattgtcttatggaatacatttttgtacttgcgtttgctccaaaacgaatataatttattttaagaaaatactaaatttgatatatcccaacttttttatgtttccattaaaagaaaaaattatcggctagaaagttgtaatttgtgttaaagaagcaatgataccaaaataagatttatttccttctcgttcctcgaattaaaaagcatgcaacctatatattagtatgacatttttggtccatataatttgttttgcattttcttattctgcaggttggaagtcaaaattgcgactctcaagactgctactatatagatatatttgacctaatttttgctatttactatttcaatttttggtttgaactgtttcaatatatatatataaattaatcatattatatttattattttatgtattttaattaagatttcaatcatgcatcaactcttaattataaaaatattggcatgttttcatttattaatgaagtaatttcaatttaattagttaaaaaaagtatatcaaactcatatataaattaattaatttaaatttaattgtattaaattatataatcttatgcatattaaattttaattatgtttttctttattaaagtataaaaattaaataatatgatattatttatttcatattttcagttaatacaatatatagagagagagttctgtgcaaaaaaaacctcaaaatcgcccatttttgcaactttactctccacattcaaaaaatacaaaataataatataaaatctaaaataatacgcaatatagtccatttttacaattttacatatattataaacgtttcatgatcacgtacatttgcctttgaaaattttaaaaataaagttgaactcctcatctcgaggacttcgatttgatatattgtttatcaaaattttaaaacttgacaatattgaaaaaggatatattgtgtattatttttgatttcaaatgattattctgtatttttgggacatgaaaggtaaagttacaaaaataaattagctttaagattttttgcacaaaacccatatatatatgtgaagacaataaatattagttaaatttaaggttattttaaggtaaatataatatactaaatcaaagttatttttattttttaaaatatattttaaaataacaatgttttgtttgttttataaagtaagtaactgtaaataagcgttaaaaatgtaatttaaaaaaataaaaaaacaggaatgaattatttactcgacaaagagagaaatacatcaaaatggttaatacaaaatgccaaaaattgttataactaacaaattatgtatgaaaaaacttgcatgttttgcatatgttggcctagtactacttaaaaaatgatttttattaattaatctatagtaagattccgatttgattgttttgtaagtggagagcttgacgccagaggaggtgatggagctcaaggacggctctggatcttacttcttctcggcatcgacttggctttccgacgcttaattagactcagatcaattttgcttctctcctcggctctttgtggtggttggctggctggacaaagcttttgaagaggctctttgtagttgttcagtacgactgcagcagtggttttggaggtgatatgtgtgtctcagtcttccgtgtatggcttcattgtggctctatcttggttcagttttgttgttgcttgtgtgttgctgtcttttttttttgttgttgttgtaggttcagcctgcgatgaattgaagccgtgtgatgctttggtggggttatccatggggaatagaggcgacggttcggtttaggtggctttgctatcttgtgggagatggttcttgtcgctcgcgatgagtttggtggctagaggcgccttctatggctgcttgtagatgctcttgtgccgccagatgtgtatttttagtccgtcatagttattttgtttaagttttagtcttcggagaagttgtaagcattttgaggatggactgaggtttgagatacttgtggcaacaatgatgcgaaattgagatctttggacctgaagaaaccacgcaaatgtcagaactttgcggtttggaattggtattttttctggatttgatctgcttgttgagtttcactattgctttcattttgtattatgtattgtgtcgtaattttggtggtttctgtagtctcgttcttatattctctataacttctgtcatatatttgtaaaaataatatatatatatatatatatatatatatatatatatatatatatatatatactcaacattttaccaaaaaaaatgtgttaaaaccacttaaatattataatattgtttctttcttttttaaactcttttttttgctaaaatcaatttaacacttatctctagttatattttgattaagtgtaattcatggctttgctagagtaaatactgtaggtagaaaataaaatgcactaaaaatagaaagtgagcttaactcaatgtaaatatttttatttgtattggataatgttctaactctgttacatgtaaaaataatttatctaggtgataaatcgtatcaccagttgatttataaatttgaaacagcagctgataaaaaaaattattggctacaagataaactattttgatgcacacacatgcatgaacatgaacacgaacacaaccaaaaagaccaaccaatcaacagcaggttttggatgcatcatacgcatgggaatatacatattaatattatttgattattcctttctttcataataagaaatctcattattatgctataaaaaatcaactcaactgttcactcaaaaatatataatatttttaattcaaaggtttaatctctttcatttcttattttgtcacaaaggtaattaatcactcaaaaatgcaataataaagaaaataatacgagagagagaaagaaaaggatagagcaaaaggggacaaaaaagaggccctcgtgcaactagagattttcaatgtacgatataacattgcagcttttaatttaatgcctccaaaaaataattttcgagttcttgaaaatatgaaagaacatttatatattcaattacttatataatatacttccattttcagtgatttgcagagaaatgcatatattatttaatgtgcgcgtgtgggtagacattcctgctctggtctctatctaagcacacgtacgtctaacttatttattacttgtatattttatcaataattcaatcgttcacttcacacgaaatacatcgattttctcacatcgagcatttatgagtgcatggccagtatgggtcctgtcactcttcgaaattattttcagaatcatataattttgaaagcttttaatcgggtatgtaattttacttttgattaatcttagttcttaaaaaaaaagttaaatcttccttcttgtaatggaaaaaactcttaattaggaatttagaatacaattttgacgtaataaatccaatagactagtctaaccaaggaaacaaaaagacggaaaggtgctaaagttgccacatctatatgaaatggtacgtacgtcttttgaactctatctccaattgttggcttgtgcaataatttcatttggaaaacaaacaaatcaaccgacacatttttcttctatattgaatagtatgagttatttagtttatacaaacaaactggtatgagttatatctagtttatactgtcgttactttatgatcgagcaatcgtatagatgattggtgaacaaaaacaaaatattttgtacggctttcatttgtaccaatcgcaaaagttttatcaaaagcgttacaaaaaaattatatttatttttattgtacagctttcttgaagagttattttttacagttttgcattcttctaaaaaaaatagtttttgctaaccggtaaaaattttgtacagctttgcgttaccaatcggacctaacaaatagtcaaaaacatgcaaactctggttgtttaggcgattaaggtttctttccaacttgtttccatagttttagagtaatcaaaatctttagactcggattaattagaatctaatcagcgattaaaccaattttttgaacattgatatttactaacaagttaatttatatcgttttggttaatatatgattagactaaattatcatagttcgcgtagacggttcctaaagcaatattttgaacactagtaattactaacaagttgatttacatcgttttggttaatgtatgattataaattatcatagtttatgtaggataggacatcaaacttttagtatgtgtatgaaatgataaactcattcgtgtttatatataaacaatggagatagtttgggttttatacgatggagatagttcggattggaataaacacctcaagaaatctctatatatgtaaacaaatggtaaacactagacgtacgtgcacaatggttacagatatgcatgtttgtcatgtccttttcaaaggatctggacttggatacaagcttagcttcaagtcgcattctaatgcaactttatttgcacaccaagacaaatgccatcaaactccgtcgttctctatttgtcattagttttaaattcgataaaactagaaccaataatagatggggttttttttttttttttttgtgaagtaagtaaggacttatatagaatacaaatacattgattagacgtatcctttatcataacatacattgatgttcacccgaaagatgtacggacccgctcataaatcataatacctacttcgttatgatagagtggttataaagttttttttaaaaacatgaagaatataaaagaaaaaaaaaagcaatgaaaagataaacaatgcaatgaagaaaaacaaaaacaaaaaaaatagactgacgttttgaactcattaaacgcatttaattaaccactattaaaataaaattcattcatatttagagccataaacttacttaataatcagaatttggagatgtgaacaaatgttttttgtccgtaaaatatgcactcctgtttttgttttgatattgaactcttttgtgacaaaagtgatccatgtctatagttactactaagattcccttgcaaaattcagttaagattttctatccatattgcacacatgtcgatgtaactcgagatgcatttaaaaaccaaatccagacgttaaatgagaagatgctattttatttctacaaaagaatgaaaaataatgaagaattgtttggttatcatatgccagccaacaaaaataaagaaaaatgctaaaattagtctttgtacaacaaacaacaaaagctagaaaatcaaacttatagaaacagaggaagtattgtttaagcaaaaaaggttttattttatttatttgaatgtttttaaattttaatgtaaaattaggtatttttttattgttattgactcctgaaaattttctgtttttttttatttatttatttgttaaattatttctagtgagagggctagatattttaaaaataaaattaaatgattttttaatgtatgtgctgaaattttaatatataaaaagaaaaaaatagtgtttacaaataagaaaggtgatctccctcttccaaactactagaagactccaaatccaaatcataatgaaagtcaaattgatgtgattagtaccaaattatgtatttatctcaatcacaaacaaaagaacaaaatacaaaacaactttccattcattttggcaagtatatatcattatttggaactaatattatgcgcatccatgttgctcgcttccgaatttctaacaagtatcaaaatatttttttttagttttattatttgttgtataaaaattgcaaattaatatatataaattatcatagctaataattaattaaacataaaattttgtttcaatacaattaattatggccaatgttcaaagagattttagccactagtcatacaattgaaggggctaatgtaatatttatatcccacaattaagataaattttatttaagaaaaaaatcatggtgaaaaatgactgatgaatcaggtaacaaagattacattttagcaattatgtaaagaccgaatgccattttagtgagcctccacatcttctcttgatccgtggatttataattttcggacagtcgatttgttagttttgaaaagtttaaaaatttgtttacttaccctacaaattaccacgtgatatatttgtgtgttttgtcctaacttacataatactaacaattaatttccaaaaatcatatatcaaaaattgttctagcacaagcacacttaactatggaagttttttgacaataaaccacatattagctttcggcaaaatatctagattcaaagaatcgaaccaaaccacaatcgacataaatagtcgatgattctagaatttaatatttaagaactcgtatataacctgaactgaaaatcgacaggatgcctgaaaaaacatgatatatatacatgtaaatttatattagttatatttagaatttcatatttagacttgtaataatccaaatatacacaactacaattgtaaactcaaatattttagttattttcaaataaagttaaccaaatttttttaaaaactaaactaaagttttagttttttttttcaaaagatatttacatataatttgattttacttaggtaaaaaaaataatcaacctgaactttatctcataattttcaaattttaccaactatacaattgaatacatgaaccaaataacggaatcagaatcgaatttcaaaatacataagcaggtcttaatcccctatatccaaaatatttgaaacccgaaagaatcaaattagagtttagacaggtaatggaatgtctaggtctaccaaagaccaaagtataaaagttgatagttgttaaacttgattacacactttctgtatcaatcatatattttttgacagttcatatataacagtaaatatcatttttgttaaaaccaaaaaagattcccaatacttcttaaacgtcatgggctcatggctggttgatgacgtatgcacagtactttttataaatatgtgtacatattttcatgattcaaggcggaccaaaattcaaacttgcagttagaacagaggcaagaatgttgtaaaacaaattgtctccttctttctatatatattatccaaaacaaaaacaaaaaaaattgaacaagaaagaaaaatggaatatagaaaaacacatacaaattcattcaattgatgatttttttaaccgaaattcaaacgaatattaaaaaatgacaaaagattaagatgtttaaaatattcacaataactaaaatcacaatagaaaaaataggaatattggtcctttataatgtaatggtaaatattttaatactggtaataattttctataaatatatttatttatataatttgaatttaaataaaatcttaaaaacaacaacttgaatttacatatttcgatccaatcaactttcttcttcatcgatactctgcacgaagatgataactcactatgctagtgttaataaaggtataactaattaatttaaagtggttagttatatatcacccatcacatttccatgaataggttaaatctctcaaaacttttttattgcaaaactctctttctctcttcttttattcacatgcaggaatgacactagcgtgtgtctcttagcgagttaatgtaaaaattccatatgaaaaaatatatatttgttagaacatacacgtgaacttcttgtaagttcttttaaggaataaaattgaataaaaaggttttaaagatgatttttttttcttttttcttttagtgcttttggtttaaatgtactttttgttttgggtggtgcccatgtgcccatcctcatctctcccaagtaccttccttcaattcttcttttctttgttcttcttaatttttttatttatcaatagataatagttattaattaatatttaaatcattacttttatgcaaccatcattttacttaaccctactacactgtcgaatcataaacataccttttaatttaattgagaatgtgataccaaaatctttaaagtgtataactaaaaaaagaaagaatttgaagattttctctattcatatgtacgaaatattatggtttgattccaaagctcttctgcaaaacatagatatatactgaagtcggtgtgtaaaatgtaacttatagatttaaccttaacttcgtgtcaagttaaattgaactatagacctcaaatttcagtttctaccactgataaatatatgttacagatttgtgaagcagataatcttgtttaaaacaaattattacgttttatgtgcaaaaaggataattatctctaattttggtagtataatataatgtattatgtatacatatattatgttaatctgttatcatttaaagttactgtggtatgtaaaccgaaggtacataatacctacatcttttttcatcccaattatatcgaaatcattaatgtgattatttataacaaacctgtaaagatgcaactataaagttaaaaactttaatttgacctgaaaagaagaatcttcactcacccactaccaaacaagcattcatgtttgagatcttgaagaatgagttggtggtttaattaagttctactctgtctacattctttttctttaatcttaaaatattgtcataatttttaattattaccttttacattttcagtttaaaggttctaaaaccgactgcggttacatatataacatcttttaagtattagagcatgtatataggtgatattcatatagtatcataaataattttatagtattatttataatatttatttattatttgagatttttaatgatatttttactaaatatgtttgcattggtgagaccggtttaagtatcaatttttttttttgcaaaatcaaaaattaatatattaaaacataggattactaaagatttttttttttttctgatttgagcgaaaatactaaccaaccgtatgctgccacgtcacctgatactgagtattaaaggtatcagtccactgatatcgatcaggcccaaattcatagtttgattaattaaaatatgatttttgggctactgatacccaaaataaataacccatgtacatgatcttacatcattggtctaaatagtaaatattaaccattgaatatggctgaattttgttgtaagtttttacggaatcctactgaaaaagttagaatttaaatggtaacctctgaatatggctgaatttttgaaaacatcaatcaaaaatataacatataaaaattgcttaattaactatttttgtcaacaatattaatgaaatacacaaataaattattataagtttatataattccaccaaatttttaagaaaatttacaatgacaaaagagaaaatgaaaatatttaatttgatttattatatatatatatattaaataatattattaagttaacaatgcaattagaaaataaactataattctaaacaataaagtaattatttgtggaattttaagttaatatttttaatagttttattgaaaaaaaatatcaaacataattatcgtataaaaccataaactcttaaaattaataattaattgtttacaattttgttttattctttagtcatcaatatgaacctaaccgatttcatccttatttatgtcttttactttttaaaaaaatttaattaattactttttataatcatcacacaaactatttttttaatgatattataatttataatattatagtattcataatttattgaaaacataattataataattttacaagcttttaaatactatttaaccaaatgatgtgactaaaattcatcatgtttttatttgtgtaaatgatgtgactacaagaaaatccaagccgtattaactacggatcacgcgatctccaccgtaatctgcgaatcgcatattctctcctctcacctataaaaaaatgccttctcctctcattcacttcgctcgtttcttgttaaagactaaaggaaactctttccttctttccatttttttctcaaagtaagtttcaagagtatatcgtttatttcaagttcgcaaattctgctatcgagtgttcgcaaattctgctatcgagtgattgtatcttgcaatctgctgcttataaaaaccgccacattttgagagttagtttagattatgaaaagagattaaatctcgcctttacttattttcgaaaaccgtcttttctaatcgttttataaaattcttttacttttatttttaaatcaggatttcgcggtcctacaatttattgtttaagaaaaaacattaatgtacaaagatgaataaaaaggaataaattgaacaagatcaaagataagacactgtgataacaagctgataattcctttccggacttgtcactcctcatggaataaaaactctatgtacaataattgttaatttgtaaaacaaaatcaaattattttaatattttatatcttttatgtaaattgaccctgaaaaggtatcatgtttaaatcttcaacctttagaaaattggtttttataaaatcatattctgatagtttaacagagcagtgcatatttttttttttttttttttggtgttagtgcatatctatatatatagtactattataatatatttcaatatatatattttaagaaaatatctgattcttaagtttggacttatttgtcaacaatagccagtaaaaaacaaaagcgaagtttcactaacttaaaaaataaccacatttgtatatttcgaatacatactataaattaataaatttatcaaaacaactatagaaactgttatttccaatcaatttctttatcaagattatatctgaaatatatttattaaaattaatagttatttacaagaactatttttatgaaagtgtaagaactctctgaaaacttgataagtcaatattttttctaacatcgtaaacataaactagattcaaattcgaatctagttattcaaaaacttataaaaacataaaaatgaaatactgttacttcaacaaaaaaacattattattattttgtttaaatatctaaatttattcatcaacagcaaaatatttaaaagagtgggaaacaaataaaaattaaactctgttttggtatgataaaattatttactaaactaaactcaattttttttagtatcacggttataactataacaataatcgaactttgttattttcttggtactggttttagtagtatagatagatattttagtcataactcataagatacatgtacaaatatttgctatatatgatcagtgataactgaatttcgtgctgaaaattgccatagtttgcttattttactcttgaaacaataacgatatggtcgttacttaaaacaacattttaaaaacgaagaaaattaaacagagtttgttaaaataaattaaataccataaatttctctttgactcttcctatatagtaaaatctctcatccccttctctctctctctcatagcatgttggtctttaggttcctatataaacaacgccacacacacccatttagtcccaaccaaagactctttaccatctctttctctctctgtttgaagacatagcacaaaaaaaaaaaaaaagacagagcaaaaaaacacacaaagatgggcataatgatgatgattttgggtcttcttgtgatcattgtttgtttatgtactgctcttctccgatggaaccagatgcgatattctaagaaaggtcttcctcctggaaccatgggctggccaatatttggtgaaacgactgagtttcttaaacaaggaccagatttcatgaaaaaccaaagactaaggtaaaaaaaatacttccattatattattatttttatgttaaggttactcgaaagttctgggccgaaaccgataatatttgtgtccctaattagatatgggagtttcttcaagtctcacattcttggttgcccaacaatagtctcaatggacgcagagttaaacagatacattctaatgaatgaatcgaaaggacttgttgccggttacccgcaatctatgcttgatattctagggacatgcaacatagctgcggttcatggcccgagccaccggctaatgagaggctcgttgctttctttaataagcccaaccatgatgaaagaccatctcttgcctaagattgatgatttcatgagaaactatctttgtggttgggatgatcttgagacagttgatatccaagaaaagaccaaacatgtacgttttttaagcttttctctctctttctctctttgttttttagacattgaatctgaatctcgggtctatatcctttattggggatgtaatgtttttaatatgtcagagcaatttattgtttttgttaaaaagaaaattaattactatcattctttttgacaaaagaaatttgttcgtcctcactttaattaattttgttggtctattagattcatattatagccaaactatttttttgttgattttaggtaaaaggtatatattattctaaattctctcagggagttagtttttattttgttttggaggggtagaatcgtaatttgacgataattgttaatgtctgaatcttggagaactaaaacagttttttagtataatttaataatcttctgttgactcatgttattttgttgtgcagatggcatttttatcatcgttgttacaaatagctgagactttgaaaaaaccagaggttgaagaatatagaacagagtttttcaagcttgttgtgggaactctatcggtcccgatcgatatcccgggaacgaattaccgcagtggagtccaagtaaaatacccgaaaaccgacatcaagataacaaaaatgcaaaaaaatgagtatatactaacatttttctggttgcttttcaggcaagaaacaacatcgataggttattgacagaactgatgcaagaaagaaaagagtctggagaaactttcacagacatgttgggttacttgatgaagaaggaagataaccgatacttgttaaccgataaagagataagagatcaagtggtaacgatcttgtattccggttatgagactgtctctacaacctccatgatggctcttaagtatctccatgatcatccaaaagctcttgaagaactcagagtatgtacttttagaaagaatctcttaaaccggtttctttgatttggttcggttattgattttttttggattttgcagagagaacatttggctataagggagagaaaacgacctgacgaaccgctcactctcgacgatattaaatcgatgaaattcactcgagctgtgagtattttcgtacacaaattaaattattaatattcattgtttcattgtgatttaatataatgttggaccattttttaaataggtgatctttgagacatcaagattggcaacgattgttaatggtgtccttaggaaaactactcacgacttagaactcaacggtaagaaactatttttcattttgattgtcaaattttaagaaatttttagtttttataaaataaaataaaatagtatttaaatgagaaaaataaattgggcatgtggaccttacattacatcaattatttacaaaaatataccaaccaatccagcgaagcaatcatctccccgtgaccctccataattttatttcaattattttgacaggagagaagatcaataaccctttttatttttactttgtaatcataaaaaaccaaacaatctcttatctgtattaatagtggttgtgtttttgataattacaggttatttaatcccaaaaggttggagaatttacgtatacacaagagagattaactatgatacatctctttatgaagatccaatgatctttaacccatggagatggatggttagtgtttgcatcataattttttttggtgctctttgtgttttgttgtttgaaagattctggcttacaaagagggtttctttatgtaggaaaagagcttagaatcaaagagctatttcttactctttggaggtggagttaggctttgccctggaaaggaactaggaatctcggaagtctcaagcttccttcactactttgttacaaaatataggtatgttcttgattcatgtttctctaatggtatcttattttaatgttgttcttgtgacttaaatgtttttttgactttgtgcagatgggaagagaatggagaagacaaattaatggtctttccaagagtttctgcaccaaaaggataccatcttaagtgttcaccttactgactagttttgtcctaatattgaaaaatgtgtaaataaatctattaagggtcattttgtagggctaattaacctattttatctattaaatctctcaagatcatagaggagatggataatgtacagagagaaagagagaagaagaaaatggaatatagaaaaaaataaaatatttgaaatgttgagcttagtctcttatcttgtaaatttgtaacccataaatttttacatttcataattacgttctgtgtttttttttagtctaacatcatcgttccagttacaatatttgtttttcttttctgatgttcaaaaactgtccaagactttgtgaatgatctgaataaaaagcttgtttgttcgtgaaactatatgagacaagtatattacagagtaacatgtacatatgcacataattagttatattgttatgatttgggcgggctgattactaatatttgggcctacttgcaatgagccaattatagcccattatacttttcttttggttgacagcagcccattctacttattgaagttttaaattgagtttttattaaaaaaggataacccaaataagtgtatttatagacagcccaaaaactacagatagacagcccaactcgacttaaatccatataggttttgcaccaattctatttctgtaatgtggccaatcacaactgaaatatgtcaggttcgaattcgtcattcttatttataaactagtggagtggagacttgagttatatgagtcaggtttgaattcttcattcttatttataaactagtttatgactgatttataaactagtggtggatattttattatttctacaatcataattttactcatattttttttttggtaaaatgtttttactcatactttgataagagcatgagaaattatgtgactagagaattatttgtgtatcttatatatggaattgtatttaattaattattctctactgttaacattttgattgtgatttgataataacatttagcaagactctttaccattgcaattatttttaacaacacatttctctctaatgtatctctttattgatctcatcttgcatatacttatcaatagtctgattctttttgtagtcgtacttctatttccatctaatgtataaatagagagtaatgaactgtattgtgttgtattattatggaatgaaaggttataacttatatataatccctaatgcaaatgcatgatgcaacataacataatcaaaaagcataattaaagggattacatagaataatataataaatatatattagagtgatatatgagatttgagtaatcataggtgatataaagatactctttctttaatacgcgtcctcaatctcaacgcggtgatagaatgtacgttatacaacataagcaacgtcttaagattgacatcatttcgaaaatcatatttgtgacggttgtaacgagatttaatcgtttgctttgaaagaagtcgatggaagcatttagcttagaaaaaggtcttgtgacttaacataggattaacttcgatcgtggacgacaaaagtcgtgtggaagcatatcgcttaaatgaagtcgagattgactcaaccgcttatggactcaagatgggcggtagatagcggaatgcgttaagcatattaagcatataatatatacagagagaaatgcatctcgttagtagtctgttgaggccgagagatggaaacgttggtggcttgtctcggagctcccatgggatttgaaggagaatacagaatcgcacagaagagaaccgagattttagatggtgagagatgttgagtttcggtgatggcaaaggaggaaatgttgtccatagtgattttcttttgttcttttttttttctttttttttcctatttttttttcttttttttttggtatgtgtgtacaaaaatattaaaagaatatgagtttgatcgttaaatcgaaactcataatcaaaacccgctttgataccatgtaaatatagagtattgaattatattgtgctgtattattattgaatgaaaggttacaacttatatatagacacataacacaatcaaaaagcataattaaaaggattacatataataatataataaatatatattagagtgatatatgagtaatcatcagctttctcatcttcatctcgttcttattctcatttatatttgtagtctgatcaaattcatgctcatcttcaactccatctttaccaatatttctatcttgggcatttgttggaatatcagtctcatcaccgatctggaaaatgtcacgctaataagtgttctacacttgggtgcgtcaactaaggaagatatcctaggttggtatttcacaaaatctggaaaatatactgttaaatctggatatcatacggcgcagttaaagactttggatgataactcttcttttattggcctagacatcaaagtcttaaaagcatactcatggaaagtatagtgtccgcccaagttacgtcactttttgtggtaaattttagcaagatgtgtaccagtaacagccaatttacgaaaacgcggtataaactgtgagatatgatgtagcagaagtggtgctctagaagaaaccattaaccacacgtttttcttatgccatcatgcgcgtcagatttgggcactttcacatatacctacggtcccatgaaatttccttatgcatctatttatgcaaatttagatcattttttcggcacataccttcggaattcgaattatcttcatttctatggataatttggtatatttgaaaagtaaggaatggatttttttttgaaaatgtggataaagatcctctagagatatgatatttggtggaaaaagagtcagactcgtggaagtccgcgcaacttgagcttcacaatgaaactcatggttcattcaatttggaaaatcataatcgagtgcggcattttacataagacaacaattattctggatatcgttgttttgtgaatggatcttagaaagatagcgacaatttttctggcttaggatggtactgtacatcatcaaattgagagacgccaaccatgggagctgccaatctcagaagaagtctatctccattacatgcagaggtggaagctctcctctgggcgatgaagtgtatgattggtgctgacaactaagatgtaatttttcttacaaactgttcagatctggtgcagagggtgtctttcccaaccgaatggccggctttctctgcgtatttggaagagttgaagagcgacaaggatgagttcacaagtttttctctatctttaatctaccgtagtgctaatgttaaagcggatactttcgcacaaaaaattcgtacccaaccgcttcatattacatatgtaaacagcattcttcaggaatggctcgtttgagccataatttattttcggatgacaaaataaaataaaataaaagtctcatcaccaatatttctatttatgaagtatcacccacatcactattcttgttaatctcatgctctaaagcctcaacaatattaaaaattcctgttcgtttaacatactgtaacatcgaattagcgattgactttgttagtgtttcttgtctcttttctttcttattttttctcctccctcactttttatttgtttggaagacatcttactgaataaaaaataaatttaaattagtacaaacaagaacgaactaagaggcatagcatcatttatataactgcatatggtggcacaaaaagttaatactatatcttagaaaattacaacaaaaagatcaatttgattacgaggtttatcgtcattggtaaaattcttggattaattagatgaattttagaatatttatgagatacatgcataggtaaaatcaatgatttgaaaaaaaagatgacaaatttagaactatggcagtagtgaaccaccacaatgctagaggaagaagagtaattagaaagaacgtgacgatggattgggatttaagttaatcttgtttttcgttttttctttttctaaaaagagtattttattggagataagtttttctacttaattatttacaattaatatttttgagtaaaagacaaaaaaaataatgacatccaaaatagagaagctctttcattaacttaccaaaccattacataattttgaagccgaaaacggtttatatacactattgttcgcaagcatggacatgggcttgcccagcttgtatttgtggccggctcggtttgtaataaataaatcacaccttacaatccaccagacatagatatatttgtctttgtacgcaagatgaagctatccattgtagaactgggattcttgtgttgtaaggtggttcttagttttattagcattaaaagtttaatgtttgattgtgtattatatcaagattcgcctcttgtttaagagacaaatgatgagttaagaggcgagcacgtgtctatcgataagtgaagaagagaaaatataaaaccgaaaaaatcatgcccgtgtttctctctctcttcctcttccttctctcttttttttttgcaatttatatccaatgaaagcaaaggaaatttctctctaaatcgtaaccaatcggaggattcgatgatgtatattcaatcatggtcatcgacggtgaatcttggtcatcaaatcagtgaggtggtcattcaaaactggagagcaatctcgccagatctctgagtttcgtatgataaatcggtgttaatcgttcaccaatcaggttgtcatggtaaaaatctctcttagtttgtattagttgatgttaattgattgttttgaaatacggttcataaaaatgagaaattagaatttttttgttgtctgtaaaattaggttaatttcatgattgtttcgattaatagtccgttgtatcttaatttgatatttactagagtctttggtaattaatgattgttttgtgggcagataaagtttttttgaagtcttgataaatttttcgattaataatctttggatattaaatttgttcatgaatttgattagttattgttcctatatgcatgaatgttaggtttcttttgagatattatgttgaaacggttaaggttttcgtgattttcatttcaatttgatcaaactttctctgttttattttaaggtatctatggagaaacttggacatttaaattgagagagaatatgctacatattcatggttgaagaaaagtaatgcatcgtcttgtagttttatatgactttttgatatagattaggtaaaaattttgtatatagattcgtagtatctattttgtgataaaagcatgttagtgtattgaggtgttttctctttatctgtttacaggttgattagaatgtgtacatcatttttattgattgctatatgtttatgggggaaaaagggcgtttttcaacccgaacgatttacaaagtgcatttttataccttaacaaaatacatagtacctttttcaacctcaactttaaaataattcgaataaattaactacctagactattaaatttgagcaaaaactacattgacttaaacacaatcagtcaaccatttgttttcactcactttatacgatgacaacgagaagtaacaccgttttggttatttgagtccataaactcaatacagtgacaatgaagtgtcggtttatctttacaagtgatattttttcttaattaaatattatcgttttgttgagtttatggactaaaataaccaaaacaacgtcgttcagtttagtttatggattcaaatgaccaaaacgatgttatttaattaacataaaaggatgtctcgttgccaatatattgtttaagcgagtaaaacaaaatggttggcaaattgtgtttaagtcaatctagttttctgcccaaatttaatagtttaggtagtttattcaaattgtttcggagttgagattgaaaacgagactgtatatttattgaggtataaaagcgtactttgtaaattaagttgaaaaatattaaaataatatttttttcttttgttttaatattattataatagaaaatattttatttagttacaatagattatatatgatttgtaatgagatttaagtaatctaattaaggcttgtaactaaaaaataatttatcagaactatttttgtattctttaatttaataatatgaattatgaattagtataaaatatcaaaactaatacagaagttgattgaaaatacaataaaataaattaaacattgataacataattaaaaaattaaaaccacaaaaacataaaaactaaatgcaacaagataggttttaaaaacataacaaaaacttgagaaatggctacggaaaattgtttccggttccgctaagataattataatattgggtaaaatcttctcggttatttggtgatctttggttttcaccttgatccggttcttcttgaatttgttttccatcagattgacttttttgataatgagatgctcgatattgggattcttcaccatcttcttcatgttgatttgtttgtgctctttgttccaaaattctttttctctcattttcaatatatgcacgagaggatggatcacttatgaattcaaatctgcaaataatattttattctcttctttcgttctagctacctcgatcttctggctttgaattttatttctttcagaagtacctttagtaatagctttgataagtttatcattttgttccaaaagttgtttaacagttcttcagattgttgttttcgctttgctttttttcaaacccataggccttgaagataaactaaaattggcatcttcactatccatatttagatcaattgaattcataccagggaaagatgatgactcggtattgattgaaaatgatgaagatgacgtaacatttcgaccttctccttggaatgcagcaggtgtcttcatgttatcattagcatttctcaatacctttaagaataggccatacatgatcaaatttgaatcctctcttgtatttttcatattgagttaataacaacttgacaataaacaaataaaaataagttagtatgtacaaataatttaataaagataagttagtaaacgcaataatttataattgagtacttacaatgtcttcttcggaagcactgctaggatctttatactcaatttggttaacacatcctctcagctttgagactgtagaaagaattgacgtcattcgagtttgtaaagatctttttggtcttcgttgaagacgaaaatgatcggatttatgatactcggcttcaactcttgtccatagttgatctcctgattggtttattcttattattgaattttgggaaacatcaagatacacatgacacaattgtatatcttcttgaatagaatatgacaaagagcgacttgaactcatttttgaaaaatataagaaataagaaaatgagttggagatgtgtgattattcatagagtagtatatatttatatagagaacataaagtaatactaaaagttagatcttggtaaattcaacggttaagattaacttatttttttttctaaagaagtgatacttgatacacaacatgaaatgactaatcaatgcagcggtaagatcttgatcaaaaaattcaacggctaagatgaactcctctttttctcatgaggtattaattgatttacgatatgaaatgactaatcaatgcaacggttagatcctcttcaaaaaaattcaatggctaagatgaactcatctttttctcatgaggtgaccattgatagaagacataaaatgactaaacagtgcaacggttagattttggtcaaaaaagtttaacggttaaaatcaatttatcttttcctgataagatgaatatcacaattccatgctcttctatataat
